United States Patent Application Publication US 2005/0196754 A1 - sequence listing, part 4

SEQ ID NO: 6786 - DNA, 3667 bp, Homo sapiens
  SIMILAR (436)..(2103): 1001254mologous to Homo sapiens hepatocellular carcinoma autoantigen,accession number AF057352,Smith-Waterman Score=2838.
tatatcatgtaagctagtcacacctatttgaattcacttttctttgtttcttgatttcttatggctattattgcaacaatcaaacaaattttgaataccttttgtgagctagcactgtggaaatatgagggaagtttattgtgttcttactttaaatagtttgcagttttattgtgtatacaaatgtatgcatgtgaaatatacagattttaaaaaagcagatcattaaagattaggtcataaggtgtagtctgtacatggaggaagagctaagttgattcagaataacatggttagatttcgaagctagcctggatttgaatcttggatccaccactgactagctatgtaagcttagtcaagcaactcaacggaggaggcgaggagcgccgggtaccgggccgggggagccgcgggctctcggggaagagacggatgatgaacaagctttacatcgggaacctgagccccgccgtcaccgccgacgacctccggcagctctttggggacaggaagctgcccctggcgggacaggtcctgctgaagtccggctacgccttcgtggactaccccgaccagaactgggccatccgcgccatcgagaccctctcgggtaaagtggaattgcatgggaaaatcatggaagttgattactcagtctctaaaaagctaaggagcaggaaaattcagattcgaaacatccctcctcacctgcagtgggaggtgttggatggacttttggctcaatatgggacagtggagaatgtggaacaagtcaacacagacacagaaaccgccgttgtcaacgtcacatatgcaacaagagaagaagcaaaaatagccatggagaagctaagcgggcatcagtttgagaactactccttcaagatttcctacatcccggatgaagaggtgagctccccttcgccccctcagcgagcccagcgtggggaccactcttcccgggagcaaggccacgcccctgggggcacttctcaggccagacagattgatttcccgctgcggatcctggtccccacccagtttgttggtgccatcatcggaaaggagggcttgaccataaagaacatcactaagcagacccagtcccgggtagatatccatagaaaagagaactctggagctgcagagaagcctgtcaccatccatgccaccccagaggggacttctgaagcatgccgcatgattcttgaaatcatgcagaaagaggcagatgagaccaaactagccgaagagattcctctgaaaatcttggcacacaatggcttggttggaagactgattggaaaagaaggcagaaatttgaagaaaattgaacatgaaacagggaccaagataacaatctcatctttgcaggatttgagcatatacaacccggaaagaaccatcactgtgaagggcacagttgaggcctgtgccagtgctgagatagagattatgaagaagctgcgtgaggcctttgaaaatgatatgctggctgttaacacccactccggatacttctccagcctgtacccccatcaccagtttggcccgttcccgcatcatcactcttatccagagcaggagattgtgaatctcttcatcccaacccaggctgtgggcgccatcatcgggaagaagggggcacacatcaaacagctggcgagattcgccggagcctctatcaagattgcccctgcggaaggcccagacgtcagcgaaaggatggtcatcatcaccgggccaccggaagcccagttcaaggcccagggacggatctttgggaaactgaaagaggaaaacttctttaaccccaaagaagaagtgaagctggaagcgcatatcagagtgccctcttccacagctggccgggtgattggcaaaggtggcaagaccgtgaacgaactgcagaacttaaccagtgcagaagtcatcgtgcctcgtgaccaaacgccagatgaaaatgaggaagtgatcgtcagaattatcgggcacttctttgctagccagactgcacagcgcaagatcagggaaattgtacaacaggtgaagcagcaggagcagaaataccctcagggagtcgcctcacagcgcagcaagtgaggctcccacaggcaccagcaaaacaacggatgaatgtagcccttccaacacctgacagaatgagaccaaacgcagccagccagatcgggagcaaaccaaagaccatctgaggaatgagaagtctgcggaggcggccagggactctgccgaggccctgagaaccccaggggccgaggaggggcggggaaggtcagccaggtttgccagaaccaccgagccccgcctcccgccccccagggcttctgcaggcttcagccatccacttcaccatccactcggatctctcctgaactcccacgacgctatcccttttagttgaactaacataggtgaacgtgttcaaagccaagcaaaatgcacaccctttttctgtggcaaatcgtctctgtacatgtgtgtacatattagaaagggaagatgttaagatatgtggcctgtgggttacacagggtgcctgcagcggtaatatattttagaaataatatatcaaataactcaactaactccaatttttaatcaattattaatttttttttctttttaaagagaaagcaggcttttctagactttaaagaataaagtctttgggaggtctcacggtgtagagaggagctttgaggccacccgcacaaaattcacccagagggaaatctcgtcggaaggacactcacggcagttctggatcacctgtgtatgtcaacagaagggataccgtctccttgaagaggaaactctgtcactcctcatgcctgtctagctcatacacccatttctctttgcttcacaggttttaaactggttttttgcatactgctatataattctctgtctctctctgtttatctctcccctccctcccctccccttcttctccatctccattcttttgaatttcctcatccctccatctcaatcccgtatctacgcaccccccccccccaggcaaagcagtgctctgagtatcacatcacacaaaaggaacaaaagcgaaacacacaaaccagcctcaacttacacttggttactcaaaagaacaagagtcaatggtacttgtcctagcgttttggaagaggaaaacaggaacccaccaaaccaaccaatcaaccaaacaaagaaaaaattccacaatgaaagaatgtattttgtctttttgcattttggtgtataagccatcaatattcagcaaaatgattcctttctttaaaaaaaaaaaatgtggaggaaagtagaaatttaccaaggttgttggcccagggcgttaaattcacagatttttttaacgagaaaaacacacagaagaagctacctcaggtgtttttacctcagcaccttgatcttgtgtttcccttagagattttgtaaagctgatagttggagcatttttttatttttttaataaaaatgagttggaaaaaaaataagatatcaactgccagcctggagaaggtgacagtccaagtgtgcaacagctgttctgaattgtcttccgctagccaagaacctatatggccttcttttggacaaaccttgaaaatgtttatttaaaaaaaaaaaaaaaaaa

SEQ ID NO: 6787 - DNA, 352 bp, Homo sapiens; identical to SEQ ID NO: 4496
  SIMILAR (1)..(213): 851254mologous to Mus musculus Pro-Pol-dUTPase polyprotein,accession number Y12713,Smith-Waterman Score=322.

SEQ ID NO: 6788 - DNA, 1774 bp, Homo sapiens
  SIMILAR (1705)..(1770): 541254mologous to Mus musculus Pro-Pol-dUTPase polyprotein,accession number Y12713,Smith-Waterman Score=62.
gtccaagagtgatcttgtggtgaatgacgtcaggcctggatctttcaatttaatgcagcagcctccgctctggcccaaggtggatccagaaatgctgatgaggggccaaggcctgaaattggtgtccctaggagagcccactcgttgctccatcactctatcatcaagcttgtactcaagctcaggagtctctccccatggctaccacatctggaaatgctctgggtcacccccaaatccagttctatactgggtgtcacccaaggcccacagtgaatactacctgattaccactaaggtgtattcaaggcccaagggctctttaggcaaacttaacccacccagacctgtgctggcccttgcttctactgggttatcagagcaattgttaaattttcaagaattttgtaagctcttcgatgtcacattcacaacttatattggcaatgctgcttcaaatgtcaccatttgcacttcatcttgctctcgttccatgctctccatttcccacatttctgggtctgctaatggccacattctgcgcccctgggccagtggctgcggagggtgtactgggtcccccagcagtgccagcccactgacgctgcgctcgatttctcaccgggccttagctgccttcccgctgggcagggctcgggacctgcagcccaccgtgcctgagcctcccaccctctccgtgggctcctgtgcggccggagcctccccgacgagtgccacaccctgctccacggggcccagtcccatggaccacccaagggctgagcagtgcaggtgcaccatgcaggactggcaggcagctccacctgcagcccccgtgtgggatccactaggtgaagccagctgggctcctgagtctgcacgctcagatgtttttcatgtaaaacattgcaaccctgtctgctttgttgtattggtcaaatttgactcatccgttaaatcaagagttagaaatgggagacttcctcttgatgttgcagaagtgaacactccacatgaaagcaggactgcaatggactcttgcagacagcctattgtgggacctagtgattgtcttcagaagcagacactgagcctcaaatctgctaagattgccctgagtgagagtcttatctcctgtagagaaagagctgaaactgtgaaaaaacagacaagctcttatcatacgagtgagtggtgtacctgcaaggaaagatgcatgcacagccttgccaggagacggctctgcaacgggtacaggctgctgtgcaagctgctcccgcttgggccatatgacccagatccagcagatccaatggagcttgaggtgtcagtggaagatagggatgctgtttggagcctttggcaggcccccaaagccacccctgtcatcgcccaatgggcccatgaaaaacgtggccgtggtggcagagatggaggttacacatgggctcagcaacatgaacttccattcacaaaggctgacctggctatggcccctgctgagtgcccaatttgccagcaggagagaccaacactgagccctcgatatagcaccattccttggggtgatcagcaagccacctggtggcaggttgatcatattcaacttcttccatcatggaaagggcagagccttgtcctcactgaaatagactcttactctggatatgggtttgcctgtactgcatgcaatgcttctgccaagactgccattggtggactcatggaatgccttatccatacaatattgcctctgaccaaggcactcacttaa

SEQ ID NO: 6789 - DNA, 1018 bp, Homo sapiens
  SIMILAR (794)..(1015): 741254mologous to Mus musculus Pro-Pol-dUTPase polyprotein,accession number Y12713,Smith-Waterman Score=298.
atgcaagtggctgacctacaacaaaaggtgtatgctcagcctcaccacctgtctactgataaagtaagggcaatgattggaaaagaatgggaccctgcatcttggaatggggaaatgtgggaggaccctgatgaagctggggacgctaagcttgtaaactctgataagcctttcttgccagaggaaacagcctccctgcccccagtggtggcaacattccctcctccactcacactgccatcagtcttgccacctttgaattaaggtgattaaccatacactgcctgaggcaacagtgatggcctctcttgaggcagttgccaggcaagataatgctgattctcctcaggaactacccccaacacccctgtttgcttctagacctgtaaccaaagtcctggcaggcctcaagagatcttacagtggaaccacagtcactcaattagaaaatttaaaagcaatgggaataattggatcccgaggtggcagggaccaagtggcagcactcaactgtcaaaggcaagacctccaacctttcaccagagtaactgtgcaatggggaaagaggaatgttcagactttttggggattattgtacactggatctgagttgatgttcattccaggggaccaaaatgtcactgtggtcctccagttaaaccgggggcttacagaggggtatatcatctccccggctttgtgccagaatcttgtttgcagagatcttgatcacttttcccttctacaagatatcacatgggtccgttacattgattacactatgctgattggatctaatccaatggtgcttgaggtgtcagtggcagatagggatgctatttggagcctttggcaggcccccatagatgaattacagcaaaggtctctaggattttggagcagggccctgccatcttctgcagataaccatcctcctttcgacatgcacctcttggcttgttatcgggctttgatagaaactgaatgtttgactatgggtcatcaagtcaccatgtga

SEQ ID NO: 6790 - DNA, 1937 bp, Homo sapiens
  SIMILAR (571)..(1326): 821254mologous to Mus musculus Pro-Pol-dUTPase polyprotein,accession number Y12713,Smith-Waterman Score=1090.
atgcaggcaggtgtggacgtttggctcctcagaatagggagtccccagacagcgatgccggctcagcctgctcatcctggaaactggcggcccttgcgagggcggcgacagtggaatgcgttgaggactgccctgctaatgagattagttcgtctgaaacgtggaaatggtgcagatcacatcatatatcgtttaggaaccgttctgattactactaacaggacgcacgatggctgcgggatcccagtcatcatgttcacattccaggagtgcagaaaagaaaaaactgcaaacacagccggacatcagaaggaacaaacgggggacacgctgcctttaagaaacataacaggcaccgtgagggtccacggcttcattcttgaagttagtgagaccaagaacccacctaatcccgggcacaaaaccacctcaatctcccaaagaccgaaagccctggtgtcgctgggaccagaggtgagacgtggaacacgtggggaagatgagaaggcgctggagaaggagggtggtggtcgcagatgggaatgtggtgaagccaatgagctgtgcgggagacctccagccttcaccagggtaactgtgcattggggaaagggaaatgatcagacatttcaggacctattggacactggctctgagctgacattgattccaggggacccaaaacgtcattgtggtcctccagttaaaataggggcttatggaggtcagataattaatggagttttagctcaggtccaacttacagtggatgcagtgggtccctggactcatcctgtggtcattttcccagtgccagaatgcataattggcatagatatgcttagtagcaggcagaacccccacactggctccctgactggtagggtgtggactattatggtgagaaaggccaaatggaagccattagagctgcctctacctagaaaaatagtaaatcaaaaacagtatcacatccctgaagggattgtggagattagtgccaccatcaaggacttgaaggatgcaggggtggtgattcccaccacatccccattcaactctcccatctggcctgtgcagaagacagacggatcttggagaatgacagtgggttactgtaagcttaaccaagtggtgactccaattgcagctgctgtaccagatgtggtttcattgcttgagcaaattaacacacctcctggtacctggtatgcagccattgacttggcaaatgactttttccccattcctgtccataaggcccaccagaagcaatttgccttccgctggcaaggccggcaatacacctttactgtcctacctcaggggagatgggaaataaatatgactaaaattcagggaccttctacctcagtaaaatttctaggggtccagtggtgtggggcttgtcaagatattccttctaaggtgaaggataagttgctgcatttagtccctcctacaatcaagaaagaggcacaacgcctagtgggccaattaggattctggaggcaacacattcctcatctgggtgcgttactctggctcatttatcaagcgacccaaaaggctgccagttttgagtggggtccagaacaggagaaggctctgcaacaggtccaggttgctgtgcaagctgctctaccacttgggccatacgacccagcagatccaatggtgcttgaggtgtcagtggcagatagggatgctgtttggagcctctggcaggcccccttagccacacctgtcattgcccaatgggcccatgaacaaagtggccatggtggtagggatggaggttatgcatgggctcagcagcttggacttccactcaccaaggctgacctggctacagccgctgctgagtgcccaatttgccagcagcagagaccaacactgagccctcaatatggcaccattcctcgtgctgctacctg

SEQ ID NO: 6791 - DNA, 376 bp, Homo sapiens
  SIMILAR (202)..(2): 911254mologous to Homo sapiens open reading frame A,accession number J04801,Smith-Waterman Score=302.
  misc_feature (1)...(376): n = a,t,c or g
agtttaacttttccttttttgctgtctagtcatcctcgtcggtcttctgcttcttggtatcgacatcgtcatcctcatcatcttcagctgcccgcttgcccgtagctgactcagcttcctcatcttcatctccatcctcttcctcaccatcaccttcttcttcctcctcctcttcatcccaaccttcttcctcttcttcgtccttggtggtgatttcggagctggtgtctacggctgcgtctgacatggtggggcacgccggtgatccgatgcaggggattaaaaagaaagcgagagttcagggactctggcgataaagctgccggagtccgcggcggtgggnngaggcgcgcggcggaggcggctgcggcgagca

SEQ ID NO: 6792 - DNA, 398 bp, Homo sapiens
  SIMILAR (8)..(220): 781254mologous to Homo sapiens open reading frame A,accession number J04801,Smith-Waterman Score=265.
  misc_feature (1)...(398): n = a,t,c or g
catgtcagacgcagccgtagacaccagctccgaaatcaccaccaaggaagaggaggaggaagaagaaggtgatggtgaggaagaggatggagatgaagatgaggaagctgagtcagctacgggcaagcgggcagctgaagatgatgaggatgacgatgtcgataccaagaagcagaagaccnacgaggatgactagacagcaaaaaaggnaaagttaaactaaaaaaaaaaaggccgccgtgacctnttcaccctccacttcccgtctcagnaatctaaacgtgggtcaccttcgagtagagaggcccgnccgccccaccgtgggcagtgcccccccgcagntnncacggggttttccaccacccaaccccaaaccttgaggtttttncaacnggggg

SEQ ID NO: 6793 - DNA, 410 bp, Homo sapiens
  SIMILAR (187)..(402): 1001254mologous to Homo sapiens prothymosin alpha1,accession number M14630,Smith-Waterman Score=377.
cagttaatgtgcaggtttcatgatggagcctggagggtgttgactggagaagggtctctggggtgggcttggcttggctgggctgtagatgcagccgccagcctctggtgggaggccgggcatcaggagcaacgctctgtccagcctggggccagctggtaatgacatggcctgttttctgtcgaggagaatgaggaaaatggggagcaggaggctgacaatgaggtagacgaagaagaggaagaaggtggggaggaagaggaggaggaagaagaaggtgatggtgaggaagaggatggagatgaagatgaggaagctgagtcagctacgggcaagcgggcagctgaagatgatgaggatgacgatgtcgataccaagaagcagaagaccgacgaggatgactagacagc

SEQ ID NO: 6794 - DNA, 959 bp, Homo sapiens
  SIMILAR (644)..(540): 971254mologous to Homo sapiens prothymosin alpha,accession number M14794,Smith-Waterman Score=178.
atttgctttttttacaaggttttttttctcctttgagattataatgaacatggtcacaccacaagtaaagtcagaagtaggacagagaacgctccgaaggctggtttggtcatcccgagatcattaaaaaatggctgaccccttaacaattatgtaccaaaaaatataaaatgtaaaataaaaaaatacaaaacaaaattccctttttaaaagtacttttaaagaaaaaaagcagggccttggaaagttttggttccttttttccctcccctgttgcaaaatcctcatggtttgggttgggtggtgaaaaacgcgtgtcaatctgcggggggcaacttgcccacggtgggcgggcgggcctctctactcgaaggtgaccacgtttagattctgagacgggaagtggacgggtgaatacggtcacggcggccttttttttttttagtttaacttttcctttttttgctgtctagtcatcctcgtcggtcttctgcttcttggtatcgacatcgtcatcctcatcatccttcagctgcccgcttgcccgtagctgactcagcttcctcatcttcatctccatcctcttcctcaccatcaccttcttcttcctcctcctcttcctccccaccttcttcctcttctttcgtctaccctcattgtcagcctcctgctccccattttcctcattagcattcccgttagcaggggcgtctcttccattttctgcctcttccacaacttccttcttctcctttaagtccttggtggtgatttcggagctggtgtctacggctgcgtctgacatggtggggcacgccggtgatccgatgcaggggattaaaaagaaagcgagagttcagggactctggcgataaagctgccggagtaagcggcggcagaggaggcgcgcggcggaggcggctgcggcgagcaaggaggcggatgaggaacaatgcaag

SEQ ID NO: 6795 - DNA, 420 bp, Homo sapiens
  SIMILAR (1)..(189): 1001254mologous to Escherichia coli Peptidase T (EC 3.4.11.-) (aminotripeptidase) (tripeptidase) ,accession number D90748,Smith- Waterman Score=327.
atggggcttatcaatgtgaccttaagtgagaagggcactttgatggcgacgttaccggctaacgtccctggcgatatcccggcgattggctttatttctcatgtggatacctcaccggattgcagcggcaaaaatgtgaatccgcaaattgttgaaaactatcgcggtggcgatattgcgctgggtattcagcttggcttctggtcgctgctgttctcgcatatcaccttctgcctgccatttgtggtggtgacggtgtattcgcgcctgaaaggttttgacgtgcgaatctgccatatctcccggcaagacaaagcgcccaggctgaataaagtgcagcccctgctctttacagtggtggagataatcggtccacgcggcggcaatgtccgccagccggttttcgtcggcaggcgctag

SEQ ID NO: 6796 - DNA, 325 bp, Homo sapiens
  SIMILAR (121)..(324): 911254mologous to Escherichia coli o200,accession number M87049,Smith-Waterman Score=293.
atgccgggaccccttagaagcgaacgacgccgacagctaccgtttattctggcagtaatccatccgtatgcatcccgatcaggataccctgaaagccatgatgcaggatgccggattcgaaagtgtcgactactacaatctgacggcagggtattgcgcgtggaggtaaaaggcttttcgacgtcattgattctggtgttcagcgaacgccaggttgatgtactgggcgaatgggcaggcgatgctgactgcaccgttatcgcctacgccagtgtgttgccgaaacttcgcgatcgccagcagcttaccgcactgattcgcagtg

SEQ ID NO: 6797 - DNA, 288 bp, Homo sapiens
  SIMILAR (288)..(199): 561254mologous to Escherichia coli hypothetical protein,accession number U73857,Smith-Waterman Score=83.
aggctcaacaccacatggaagcttccaaggcttggggcttacaccctctgaagccatggcctgagctctatgttggccccttttagccatggctggagcagctgagatgcagggcatcaagtccctaggctgtttcggcctgcctatttgcatacttaataggccggataaggcgtttacgccgcatccggcatccgagcaccattgcctgatgcgacgcttacgcgtcttatcaggcctacaaacctgtgcctgaaccgtaggccggataaggcgtttacgccgcat

SEQ ID NO: 6798 - DNA, 849 bp, Homo sapiens
  SIMILAR (18)..(599): 941254mologous to Escherichia coli Flagellar biosynthesis protein FlhA,accession number D90830,Smith-Waterman Score=921.
tgcgcccttaacgccggattgttggtgaaaatgaggcaaaaaaacgccgctcgaaagtgactcaggaagccgattttccgggctcaatggacggggcaagtaactttgttcgcggcgatgccatcgccgggatcctcatcatggtcattaacattgtcggcgggttgttggtcggcgtgctgcaacatggcatgagcatgggacacgcggcggaaagttatgcgctattgaccattggcgacggtctggtggcacaaattccggcgctggtgatttctaccgccgcgggggtcatcgttacgcgtgtcagcaccgatcaggatgttggcgagcagatggtgaatcagcttttcagtaacccaagcgttatgttgttaagcgccgccgtgctcggtttactcggcctggtgcctggaatgccgagcctggtatttttgctgttcactgccggattgctcgggctggcctggtggatacgcggacgcgaacaaaaagcgcctgccgaacccaaaccggtaaaaatggcagagaataataccgttgtcgaagcgacgtggaacgatgtacaactggaagattctctgggaatggcaactggtctactcacctgaccccgatgggagattgctcctcctgatgctccacccgctcggaccgcatacccctgtctcccccaatcactctttccccgcatttggcgatctcccccgcgtcaccggcggctccccctgttgcacctcccatcgacgccctgctaccacaacttcactgcgactggtaccccttcgccaacgactctcccttgccgctgcggcttctattgtccagccgggcagctatcccttcggc

SEQ ID NO: 6799 - DNA, 1383 bp, Homo sapiens
  SIMILAR (1064)..(474): 871254mologous to Escherichia coli o200,accession number M87049,Smith-Waterman Score=828.
ggcggatcgccattgatgacaaagtaagcaaagcggatctggaaatttttgttgatcccttaagcaagccgctgccgttcagcgaagttactggatcgaaaggtaaagcggataaagaaaaggtgggcgattacgtttttggcctgaaggcgcagggactatataacggtgaaccgctcacgggtacggaaaaaataggcggtatgctggcgctgcgtggcgaagggacgccgtttccggtacaggctgatttccgatctggtaacacccatgttgcttttgatggcgtcgtgaatgacccaatgaagatgggcggtgtccatttacagcttaaattttctggcgattcactgggggatctttatgaactgacgggcgttctgctgcccgataccccgccggttgaaacagatggtcggctggtacagaaaatcgacactcctagacgaaccctagctcgtaccctccccattcttccccagccgtttggtcagggcatcaacagcacgctcgacggcagccgtctcttccgcaaaccaggccacttcaagcggaccgggtgccatacgccactcttcagtaatggcttccgccacataacgttgctggcgcttaatgccgtgatgcaggaactttgcgcctccgcgcatggctttgctgattccttcagcggcgatatcaccggtataaggggccagcagttccgcagggtcgaactctgccagatctgccagcgcaacgaagttttgcaccacctgaatatcgccctgcacttccagctcaccactgcgaatcagtgcggtaagctgctggcgatcgcgaagtttcggcaacacactggcgtaggcgataacggtgcagtcagcatcgcctgcccattcgcccagtacatcaacctggcgttcgctgaacaccagaatcaatgacgtcgaaaagccttttacctccacgcgcaatactttacccagcagacgcgagcgggccgttttcagcgcggctgagcgatacaggaaggtgttgagcacactttccattcctgccgtcactaaagggttaaaaggcattttcggcctcctgccagaacttataaccaccatgcaccgccacaacccctgccgtcatactgtattagtccccactttcaaatccggtattctgcatcatggcttttagggtatcctgatcgggatgcatacgcttggattctgccagataacggtagctgtcggcgtcgttcgcgaccagttcctcaacttctggcggcgtatagttttcatcgtgtttcgccagcacttctttcgcgaggatatgattgcctttttccagttcgccctgcaccacaacgccctgcccttcacggaacagatccggcaaaatgccttc

SEQ ID NO: 6800 - DNA, 1038 bp, Homo sapiens
  SIMILAR (358)..(543): 961254mologous to Escherichia coli flagellar protein FlhA,accession number U88319,Smith-Waterman Score=284.
cggctgacgtaactcaggctgatgaaccacgtctcccggacgtagataccaggcatcgccttcctcttcggtcgaatcacatcctgcgcttacatcacgctacgcttaacaccatgtgttgccagtgttacttaccgttcctgtcaccttgtcgaaggaccatttaagaaattctcatgctcaatggcttcaccgccgagcatgatgacaaacgtttttccccgggtggcgcatttggcatcgacgcatgactgccggatgcggcgtaaacgccttatccggcctacggttcaggcacaggtttgtaggcctgataagacgcgtaagcgtcgcatcaggcaatggtgctcggatgccggatgcggcgcacaaattccggcgctggtgatttctaccgccgcgggggtcatcgttacgcgtgtcagcaccgatcaggatgttggcgagcagatggtgaatcagcttttcagtaacccaagcgttatgttgttaagcgccgccgtgctcggtttactcggcctggtgcctggaatgccgaacctgccattgcccaaacagcattgttcattgattctggtgttcagcgaacgccaggttgatgtactgggcgaatgggcaggcgatgctgactgcaccgttatcgcctacgccagtgtgttgccgaaacttcgcgatcgccagcagctatttactcgacagcacccggagctgcccgcggctgggaaaggggaggaggccgaaggggtggagttggggagggtccctcgcgggccccctcgccgcgccccctgcagggcgcacccccggcgggagcgcaaggagctggggcgctcgggacaagggcgcacggaacagccacaatgttatgacactaccacactgccgccgtacgtcgcggcgcaccaaactgcctgctgctggctgacctgccgtttatggcgtatgccacgccggaacaagccttcgaaaacgccgcaacggttatgcgtgccggtgctacggcacaagtctatttcggaaaaacggtcgaccaactga

SEQ ID NO: 6801 - DNA, 413 bp, Homo sapiens
  SIMILAR (2)..(298): 671254mologous to Homo sapiens neutral protease large subunit,accession number M27826,Smith-Waterman Score=326.
accttcttttcaagggcctgtttcccttccctccataactgttgtgagtattgacagccaggcttctaaacctcttaaaactcctcaactctggtgccaacttagacaatactcttttaagcactcctttttagttgtccccacctgcccagttcccttattaggctgagacactttaactaaattatctgcttccctgactattcctggactacagccacatctcattgccacccaccttaacccacaagtagaagatacctctattccctccttggcaacctatcatgcaccccttaccatctcattaaaacctaatcacccttacccctctcaatgccaatatcccatcccacagcatgctttgaaaggattaaagcctgttatcactcacctgctacagcactcgtgcc

SEQ ID NO: 6802 - DNA, 346 bp, Homo sapiens
  SIMILAR (168)..(344): 451254mologous to Murine leukemia virus integrase,accession number U87552,Smith-Waterman Score=138.
  misc_feature (1)...(346): n = a,t,c or g
ctcaggcctcctccttttcctacgcatcaggctcatggntttcctccgacacaagattggcaaattgactttattcatatgccgcgtgtctgtaaatttaaatatctcctggtttgggccaataccttcaccggatgggtcgaggcctttcccactagctctgaaaggctactacagtcatttnttcccttctgacagatataatcccccaatttggcctccctacttccacagtttctcaggctcttggtattcagtggaaacttcataccccctaccgtcctcaatcttcaggaaaggtagaacggntgaatggtcttttaaaaacacaactcaccaagctcag

SEQ ID NO: 6803 - DNA, 500 bp, Homo sapiens
  SIMILAR (168)..(497): 691254mologous to Homo sapiens putative envelope protein,accession number U88902,Smith-Waterman Score=356.
tcaaatcacccaagcagcttctcaggctcttggtattcagtggaaacttcatatcccttatcgtcttcaatcttcaggaaaggcagaacggactcgtggtctttgaaagacacacctcaccaagctcagcctccaacttaaaaaggactggacagtacttttacctcttgcccttctcagaattaagagcctgtcctcgagatgctacagggtacagtccatttgaacttgtatacggatgcgctttcttactcagccccaacctcgtcccagacaccagccccctagacaggtccagcaaaacgtccccagacatttcacaccagcaagctgccgccctcctccacacttacataaaaaacctttctccttatatcaactctactccccccatatttggacctctcacaacacaaactactattcctgtggccactcctttatgtatctctcagcaaagacccactggaattcccctgggtaacctttcaccttcttga

SEQ ID NO: 6804 - DNA, 1023 bp, Homo sapiens
  SIMILAR (372)..(440): 471254mologous to Mus musculus pol protein,accession number M19005,Smith-Waterman Score=60.
ctgtactcactctttgttgagtctcccacaattaccattgtttctggcccggacttcaatccggcctcccacattattccggataccacacctgaccctcatgactgcatctctctgatccacctgatgctctccccatttccccacatttccttcttccccatttctcaccctgatcacacttggtttattgatggcagttccaccaggcctaatcgccactcaccagcaaaggcaggctatgctataatatcttccacatctatcgttgaggctaccactctgcctccctccactacctctcagcaagccaaactagttgccttaactcaagccctcactcttgcaaaaggactacgcgtcaatatcttactgattctaaatatgcctttcatattcggcaccaccatgcagtcatatgggctgaaagagggattgttcaggtctcctccctttcctacacatcaagctaggggatttgcccctgcccaggactggcaaattgactttactcacatgcctcgagtcagaaaactaaaatatctcttagtctgggtagacgctttcactggatgggtagaggccttccccacagggtctgagaaggccactgcggtcatttcttcccttctgtcagacataatccctcggtttggccttcccgcctctacacagtctgataacggaccggcctttactagccaaatcacccaagcagtttctcaggctcttggtattcagtggaaccttcatatcatttaccgtcctcaatcttcaggaaaggtagaacggactaatggtcttttaaagacacacctcaccaagctcagcctccaacttaaaaaggattggacagtacttttaactcttgctcttctcagaatcagagcctgtcctcgagatgctacagggtacagtccatttgaactcttatatggacacactttcttgcttggccccaacctcatcccagacaccagccctctaggcaactatcttccagtcctccaacaggctagatag

SEQ ID NO: 6805 - DNA, 423 bp, Homo sapiens
  SIMILAR (127)..(372): 801254mologous to Human endogenous retrovirus K gag protein,accession number Y10392,Smith-Waterman Score=308.
atggaccagcctttactagccaaatcacccaagcagtttctcaggctcttggtattcagtggaaacttcatatcccttaccatcctcaatcttcaggaaagagtgaaggtaggctcgagcgtggttattgaggacaagtcgacgagagatcccgagtacatctacaatcagccttacgtaagacaaggttcaaaagagccctaccctgatttggtggcaaggctacaagatgttgctcaaaagtcaattgctgatgaaaatgcctgtaaggtcatagtggagttgatggcatacgaaaacgccaatcctgagtgtcaatcagccattaagccattaaaaggaaaggttcccgcaggatcagatgtaatctcaggtgtacccaacagctccgaagagacagcgaccatccagaacgggccatga

SEQ ID NO: 6806 - DNA, 1290 bp, Homo sapiens
  SIMILAR (508)..(897): 381254mologous to Mus musculus pol protein,accession number M19005,Smith-Waterman Score=232.
atggcgggcgcccttcccccagcctcgctgccgccttgcagtttgatctcagactgctgtgctagcaatgagcgtagctccatgggcataggaccctctgagccatgtgcaggatataatctcctggtgtgccgtttgacaaagaaaaaaagaataagaagtacgaacaaagtctgggattatgttaaacgaccaaatctaaggataattggtgttcctgaggaagaagagaattctaaaagttgtgaaaacatacttggggaaataattgaggaaaacttccccagccttgctacagacctagacatccaaatacaagaagcacaaagaacaccccagaaattcatcacagaaagatctttgcctaggtacattgtcatcagattatccaaagttaagacaaaggaaagaatcttaagagctgtgagacagaagcaccagatcttcttgactcagcggctgaagactaacactgcccaatcacctcagaagcttcctggaccatcacagacacttctggtaactcttacaagggagattaccattgttcctggcctggacttcaatccggcttcccacattattgcagataccacacctgacccccatgactgtatctctctgatccacctgacattcattcaatttccccatatttccttctttcctgttcctcatcctgatcacacttggttcatcaatggcagttccaccaggcctaatcgccactcaccagcaaaggcaggctatgctatagtatcttccacatctatcattgaggctacaactctgccctcctccactacctctcagcaagctgaattcattgccttaactcaggccctcattcttgcaaagggactatgcatcaatatttatgctgactctaaatatgcttccatatcctgcaccaccatgctgttatatgggctgaaagagacactttcactggatgagcagacgcctttccccacagggtctgagaagcccaccacagtcatttcttcccttctgtcatatataattccttggtttggccttcccacctctaaacagtctgataatggactggcctttattagtcaaatcacccaagcagtttctcaggctcttggtattcagtggaaccttcataccccttatcatcctcaatcttcaggaaagggaagggcaggaagaaatgtggagaagggaaaggcccccatggctgttgggtctggtggggtagcagggatgctgctccctgccggggtgaccatcaagggctggaatctagccagggttctctaa

SEQ ID NO: 6807 - DNA, 1272 bp, Homo sapiens
  SIMILAR (835)..(1269): 691254mologous to Homo sapiens ribosomal protein L12,accession number L06505,Smith-Waterman Score=465.
attatttgctctaggacaggggtccccaacccccaggctgcagactggtatcagtccgaggcctgtcaggaaccgggcagcacagcaggaggcgaacgatggcatgctttaaaaggattaaagcctgttatcgctcgcctgttacagcatggccttttaaagcctataaactctccttacaattcccccattttaccatccaaaaaccggacaagtcttacaggttacacgctgctagcccgcctcttagaatctctcatttcctttccatcgtggaaatctattctcaaggaaataacttctcagtgttccatctgctattctacgactcctgagggattgttcaggccccctctcttccctacacatcaagctcggggatttgcccctgtccaggactggcaaattgactttactcacatgccccgagtcaggaaactaaaatacctcttggtctgggtagacactttcactggatgggtagaggcctttcccacagggcctgaaaaggccactgtggtcatttcttcccttccgtcagacataattcctgggtttggccttcccacctctataatacagtctgataacggattggcctttattagtcaaatcgcccaagcagtttctcaggctcttggtattcagtggctcctggttttacctcaaaccaccacccttaagtctctcttaaagtggataaaagatcttcagtggcaaggtcttacaaacaagctgttattccaagaatctcttcaaaaaacagcaacaaggctttcagctttcagctgggaggaggccaaggtgcaactttcttgggtcgtcctgaatctagccacctctgccatgctgccgaagttctaccccaatgagatcaaagtcacatacctaaggtgtactggggatgaagtgggtgccacgtctgtgttggcccccaagatcagccccctaggtctgtcttcagaaaagaacagagaggcccagattgaggtggtgacttctgcctctgccctgatcatcaaagccctcaaggaaccgccaagagacagaaagaaacagaaaaacattaaacacagtggaaatatcacttttgatgagattgtcaatgttgctcaacacatgtggcaccgatctttagccagagaactctctggaatcattaaagagatcctggggactccccagtctgtgggctgcaatgttgatggctgccaccctcatgatatcatagatgacatcaacggtggtgctgtggaatgcccagctaattaa

SEQ ID NO: 6808 - DNA, 744 bp, Homo sapiens
  SIMILAR (127)..(318): 511254mologous to Rauscher murine leukemia virus Pol,accession number U94692,Smith-Waterman Score=153.
atggggaaggaagagcacagatctccacatttcttgaatgtttctcatatgctaggaatgttcatgtctgtgaattcatttgatcatcacaaaaactgttcagtgaagtacaactctactccctccttggcgactgatcatgcaccccttaccatcccattaaaacctaatcacccttaccccactcaacgccaatatcatatcccacagcatgctttaaaaggattaaagcctgttatcactcgcctgctacagcatggccttttaaagcctttaaactccccttacaattcccccattttgccagtcctaaaaccagacaaggcttacagtctggtaatgaaccggcctttactaggtcaaatcacccaagcagtttctcaggctcttggtattcagtggaaccttcatatcccttaccgtcctccatcttcaggaaagaccttctcaccagctcaggtgtctcaacaatgccagacccacatcaaaggttacttagctttagtgtccagtgaatcagccaacttagtaaatgtggaaataagcagattacctgagaaaatgaaagccgagtgggggcctgagagtgctggtgggacgctcctcatttatacagattggcaggaaaggcggacctggcaaagtgacatttcagtagagtctgtgttaagtgaaggggacactctgcagacatctgggggaagagctttgttggaggaggcgccacaatttggaaggccctga

SEQ ID NO: 6809 - DNA, 2250 bp, Homo sapiens
  SIMILAR (862)..(1521): 851254mologous to Homo sapiens reverse transcriptase homolog= pol {retroviral element},accession number S61070,Smith-Waterman Score=935.
atggataccagcatctgttctggtggaggtgacaagggggtgattaaaagctttattgctcacacaaagcctgtttggtggtctcctcacacagacacgcatgaaatttggtgctgtgactcggatcgggggacctcccttgggagatcaatcccctgtcctcctgctctttgctccatgaaaaagatccacctacaacctcgggtcctcagacccaccagcccaaggaacatctcaccaattttaaatcgggctgctcatcgccatgccgagctaagtcccaattcttcctcagtctctgctcctccaccctataatccttctatcacctcccctcctcacacctggtctggcttacagtttagttccacgactagctcttccccaccttcccaacaatttcctcttagagaggtggctggagctgaaggcagtcaggatgatcgggaaagagttttttctctagcccaatctcacgctgataaccaccggcttcacgagccagacctccaggaaggcagtagagtagttccccaagaggatccccaatggaactctcaggcaaattccccagatctgcttggcttagcgactgaagatcgacgctgcccgatcgcctcggaagccccttggaccatcacagacgctgagcttcagctccttcagctatgctcactctttgttgagtctcccacaattaccattgttcctggcccggacttcaatccggcctcccacattattccggataccacacctgaccctcatgactgcatctctctgatccacctgacgttcaccccatttccccacatttccttcttccctgtttctcaccctgatcacacttggtttattgatggcagttccaccaggcctaattgccactcaccagcaaaggcaggatatgcaatagtatcttccacatctgttattgacgctaccgctctgcccccctccactacctctgagcaagccgaactagttgccttaactcaggccctcactcttgcaaaaggactatgcatcaatatttatactgactctaaatatgccttccatattctgcaccaccgtgtggtcacatgggctgaaagaggttacctcactacacaagggtcctccatcattaatgcctctttaataaaaactctgctcaaggctgctttacttccaaaggaagctggggtcattgactgtaaggggcatcaaaaggcatcagaacccattgctctaggcaacgcttatgctgataaggtggctagacaagcagctagctctccaacttctgtccctcatggccagtttttctccttcacatcagtcactcccacctactcccccgctgaaacttccacctatcaatctcttcccacacaaggcaaatggttcttagaccaaggaaaatatctccttccagcctcacaggcccattctattctgtcgtcatttcataacctcttccatgcagtttacaagccgctagcccgtctcttagaacctctcatttcctttccatcacggaaatctatcctcaaggagatcacttctcagtgttccatctgctattctactacccctcagggattgttcaggccccctccctttcctacacatcaagctcagggatttgtctctgcccaggactggcaaattgactttactcacatgccccgagtcagaaaactaaaatatctcttagtctgggtagacactttcactggatgggtagaggcctttcccacagggtctgagaaggccactgcagtcatttcttcccttctgtcagacataattcttcagtttggccttcccacctctatacagtctgataacagaccagcctttactagtcaaatcacccaagcagtttctcaggctcttggtattcagtggaaccttcatatctcttaccatcctcaatcttcaggaaaggtagaacagactaatggtcttttaaagacacacctcaccaaggtcagcctccaacttaaaaaggattggacagtacttttacctcttgcccttctcagaattagagcctgtcctcgagatgctacacggtacagtccatttgaacttttatatggatgcactttcttgcttggccccaacctcatcccagacaccagccctctagacgatcatcttccagtcctccaacaggctagacaggaaatttgccaggctgctaatcttctcttgcctactccagatccccagccatatgaagacaccctagctggatga

SEQ ID NO: 6810 - DNA, 3998 bp, Homo sapiens
  SIMILAR (2283)..(3995): 911254mologous to HERV-H/env62 envelope protein,accession number AJ289709,Smith-Waterman Score=2697.
taatgcccccgctcgcaggaattcggcacgagccccttcttaatcaatacggaggctactcactccccattaccttcttttcaagggcctgtttcccttgcctccataactgttgtgggtattgacggtcaggcttctaaacctcttaaaactccccaactctggtgccaacttagacaatactcttttaagcactcctttttagttatccccacctgcccagttcccgtattaggctgagacactttaactaaattatctgcttccctgactattcctggactacagctatatctcattgccgcccttcttcccaatccaaagcctcctttgcgtcctcctcttgtatcccccgaccttaacccacaagtataagatacctctactccctccttggtgaccgatcatgcaccccttaccatctcattaaaacctaatcacccttaccccactcaacaccaatatcccatcccgcagcatgctttaaaaagattaaagcctgttatcacttgcctgctacagcatggccttttaaagcttataaactctccttacaattcccccattttacctgtcctaaaaccagacaaggcttacagcataattctcataaaaacacacgtgctctccctgattatcgtctccggctaatctcccaaaccccaatcccttctacaaaacaacaactcctttccttcctaggcatggttagtaaggtcagaattcttacacaagagctgggaccacgtcctatagcctttctgtccaaacaactggaccttactgttttaacccaaccctcatgtctgcatgcagcggctgccgctgccttaatacttttaaaggccctaaaaatcacaaagtatgctcaactgactctctacagttctcataacttccaaaatctattttcttcctcatacctgatgcatatactctctgctccctggctccttcagctatattcactctttgttgagtctcccacaattaccattgttcctggcacggacttcaacccggcctcccacattattctggataccacacctgaccctcatgactgtatctctctgatccacctgacattcaccccatttccccgtatttccttctttcctgttcctcaccctaatcacatttggtttattgatggcagttccaccaggcctaaatgccactcaccagcaaaggcaggctatgctatagtatcttccacatctatcattgaggctaccgctctgcccccctccactacctctcagcaagccgaactagttgccttaacccaagccctcactcttgcaaaaggactatgcgtcaatatttatactgactctaaatatgcctttcatatcgtgcaccaccatgcagtcatatgggctgaaagaggtttcctcactacacaagggtcctccatcattaatgcctctttaataaaaactctgctcaaagccgctttacttccaaaagaagctggggtcattcactgcaaggggcatcaaaaggcatcagatcccattgctctaggcaatgcttatgttgataaagtggctagacaagcagctagctctccaacttctgtccctcacggccagtttttctccttcacttcagtcactcccacctactcccccactgaaacttccacctatcaatctcttcccacacaaggcaaatggttcttagaccaaggaaaatatcttcttccagcctcacaggcccattctattctgtcatcatttcataacctcttctatgtagacataattcctcggtttggccttcccacctctatacagtctgataacggaccagcctttactagccaaatcacccaagtagtttctcaggctcttggtattcagtggaaccttcataccccttaccgtcctcaatcttcaggaaaggtggaacggactaatggtcttttaaaggcacacctcaccaagtttagcctccaacttacaaaggattggacagcacttttacctcttgctcttctcaaaatcagagcctgtcctcgagatgctacaggatacagtccatttgaacttttatatggacgcactttcttgcttggccccaacctcatcccagacaccagccctctaggcgactatcttccagtactccagcaggctagacaggaaattcgccaggctgctaatcttctcttgcctactccagatccccagccatatgaagacaacctagctggacgatcagttcttgttaagaatctgacccctcaaactctacaacctcgatggaccggaccctacttagtcatctatagtaccccgactgccgtctgcctgcagaatcctccccactgggttcaccattccagaataaagctgtgtccatcggacagccagcctaatccctcctcttcctcctggaagtcgcaagtactctcccccacttcccttaaactcactcatatttctgaagaacatgcctacacagctgtccccgccttacagacagactgggcaacatctcccatctccctacacctccgaacttcctttaacagccctcacctttaccctcctgaagaactcatttactttctagacaggtccagcaagacttccccagacatttcacatcagcaagctgccgccctccttcgcacttatttaaaaaacctttctccttatatcaactctactccccccatatttggacctctcacaacacaaactactattcctgtggccgctcctttgtgtatctcttggcaaagacccactggaattcccctaggtaatctttcaccttctcgatgttcctttactcttcatctccgaagtccaactacaaacatcaatgaaacaattggagccttccagctccatattacagacaagccctctatcaatactgacaaacttaaaaacattagcagtaattattgcttaggaagacacttgccctgtatttcactccatccttggctatcttccccttgctcatcagactctcctcccaggccctcttcttgtttacttatacccagccccgaaaataacagtgaaagattgctcgtagatactcgacgttttctcatacaccatgaaaatcgaaccttcccctctacgcagttaccccatcagtccccattacaacctctgacagctgccgccctagctggatccctaggagtctgggtacaagacacccctttcagcactccttctcacctttttactttacatctccagttttgcctcgcacaaggtctcttcttcctctgtggatcctctacctacatgtgcctacctgccaattggacaggcacatgtacactagtcttccttacccccaaaattcaatttgcaaatgggaccgaagagctccctgttcccctcatgacaccgacacaacaaaaaagagttattccactaattcccttgatggtcggtttaggactttctgcctccactgttgctctcggtactggaatagcaggcatttcaacgtctgtcatgaccttccgtagcctgtctaatgacttctctgctagcatcacagacatatcacaaactttatcagtcctccaggcccaagttgactctttagctgcagttgtcctccaaaaccgccgaggccttgacttactcactgctgaaaaaggaggactctgcatattcttaaatgaggagtgttgtttttacctaaatcaatctggcctggtgtatgacaacattaaaaaactcaaggatagagcccaaaaacttgccaaccaagcaagtaattacgctgaacccccttgggcactctctaattggatgtcctgggtcctcccaattgttagtcctttaatacccatttttctccttcttttatttggaccttgtatcttccgtttagtttctcaattcatccaaaaccgtatccaggccatcaccaatcattctatacgacaaatgtttcttctaacatccccacaatatcaccccttaccacaagacctcccttcagcttaa

SEQ ID NO: 6811 - DNA, 531 bp, Homo sapiens
  SIMILAR (313)..(450): 531254mologous to Human T-cell lymphotropic virus type 2 gag polyprotein,accession number AF139382,Smith-Waterman Score=160.
acaaaggagacacgttttatccgtggacccaaaactccggcgccggtcacggactgggaaggcagccttcccttggtgtttaatcattgcagggacgcctctctgattattcacccaggttttagaggtgtcagaccacgcagggacgcctgccttagtccttcacccttagcgaatttaattaacctcaccttcaaggtgtacaataatagaaaaaagttgcaattccttgccttcactgtgagacaaacctcagccatgtctccagcacacaagaacttccaaacgcctgaacctcagcggccaggcattcctccagaacctcctcccccaggagcttgctacaagtgccagaaatccggccaccaggccaaggaatgcctgcagcccaggattcctcctaagccacgtcccatctgtgcgggaccccactggaaattggactgtccaactcacctggcatccactcccagagcccctggaactctggcccaaggctctctgactgcttcccagatcttcttggcttag

SEQ ID NO: 6812 - DNA, 522 bp, Homo sapiens
  SIMILAR (186)..(55): 461254mologous to Human T-cell lymphotropic virus type 1 Gag,accession number S74562,Smith-Waterman Score=136.
ctaagccaagaaggagtcagtcagagagccttgggccagagttccaggggctctgggagtggctgccaggtgagttgaacagtccgatttccagtgtggtcccgcacagatgggacatggcttaggaggaatcccgggttgcgggcattccttggcctggtggtcagatttctggcacttgtagcaagctcttgccccttccccagaaaagcgggacttgctgctaagggtgaaggaccaaggcaggcgtccctgcgtggtctgacacctttgaaacgtgggtgaataatcaggcatctctgcaatgattaaacaccaagggaaggctgccttcccagtccgtgaccagcaccggagttttgggtccatggataaaacgtgtctcctttgtctctctagagcaaagagcaggaggacaggggatttatctcccaagggaggtcccctgatctgagtcacggcaccaaatttcatgtgcgtccgtgtgaagagaccaccaaacaggctttgtgtgagcaacat

SEQ ID NO: 6813 - DNA, 882 bp, Homo sapiens
  SIMILAR (9)..(125): 791254mologous to Homo sapiens calbindin D28K,accession number S46006,Smith-Waterman Score=172.
gatcgggggacctcccttgggagatcaatcccccgtcctcctacactttgctctgtgagaaagatccacctacaacctcaggtcctcagaccaaccagcccaagaaacattctcaccaatttcaaatccgagacaaaggagacacgttttatccgtggacccacaactccggcgccagtcacggactgggaaggcagccttcccttggtgtttaatcattccagggacacctctctgattattcacccaggcttcagaggtgtcagaccacgcagggacgcctgccttggtccttcacccttagcggcaagtcccacttttctggggaaggggccagctgctcctcgccagaccgagctaggtcccaattcttcctcagcctccgctcctccaccctataatccttttatcgcctcccctcctcacacctggtccggcttacagtttccttccatgactagccctccccctcctgcccagcaatttactcttaaaaaggtggctggagctaaaggcatagtcaaggatttaattaacctcaccttcaaggtgtacaataatagaaaaaagttgcagttccttgcctccactgtgagacaaaccccagccacatctccagcacacaagaacttccaaacgcctgaactgcagcagccaggtgttcctccagaacctcctccccgaggagcttgctacaagttccagaaatctggccaccgggccaaggaatgcctgcagcccaggattcctcctaagccacatcccatctgtgtgggaccccactggaaatcggactgtccaactcacctggcagccactcccagagcccctggaactctggcccaaggctctctgactccttcccagatcttcttggcttag

SEQ ID NO: 6814 - DNA, 331 bp, Homo sapiens
  SIMILAR (2)..(133): 751254mologous to Homo sapiens neutral protease large subunit,accession number M27826,Smith-Waterman Score=153.
agggcgagccactttaactaaattatctgcttccctgactattcctggattacagctacatctcattgctgcccttcttcccagtccaaagcctcctttgcgtcctcctcttatattcccccaccttaacccacaaatataagatacctctactccctccttggtgaccgatcatgcatcccttaccatctcattaaaacctaaccacttttaccccgattaatgccaatatcccatcccacagcatgctttgaaagggttaaagcctgttatcacttgcctgctacagcatggccttttaaagcctataaactctccttaccctcgtgcc

SEQ ID NO: 6815 - DNA, 786 bp, Homo sapiens
  SIMILAR (52)..(702): 421254mologous to Phascolarctos cinereus pol protein,accession number AF151794,Smith-Waterman Score=391.
atggggtttcgccatgttgcccaggctggtctctttctcttgggctcaagtgatctgcctgccgtggccccccaagtgctgggattgcaggtgataaaaagctttattgctcacacaaagcctgtttggtggtctcttcacacggacgcgcatgaaatttggtgccgtgactcagatcgggggacctcccttgggagatcaatcccctgtcctcctgctctttgctccgtgaaaaagatccacctacgacctcaggtcctcagacccaccagcccaaggaacatctcaccaattttaaatcggcacgctttaaaaagattaaagcctgttatcactcgcctgctacagcatggccttttaaagcctataaactctccttacaattcccccattttacctgtcctaaaaccagacaagccttacaagttagttcaggatctgtaccttatcaaccaaattgttttgcctatccaccccatggtgccaaacccatatactctcctatcctcaatacctccctccacaacccattattctgttctggatctcaaacatgctttctttactattcctttgcacccttcatcccagcctctcttcgctttcacttggactgaccctgacacccatcaggctcagcaaattacctgggctgtactgccacaagccttcacagatagcccccattacttcagtcaagcccaaatttcatcctcatctgttacctatctcggcataattctcataaaaacacacgtgctctccctgctgttcgtgtttgactaa

SEQ ID NO: 6816 - DNA, 645 bp, Homo sapiens
  SIMILAR (431)..(556): 501254mologous to Homo sapiens Human secreted protein HCHPF68, SEQ ID NO:163,accession number Y86248,Smith-Waterman Score =112.
atggacgccgagcttcgggtaactctcatagtggaggcacgctttaaaaggattaaagcctgttatcactcgcctgctacagcatggccttttaaggcctataaactctccttacaattccccctttttacttgtcctagaaccagacaagccttacaggaaaagaaagtaaatatcacctccaaacaggcatattttagcctccgtggaggtgctaaagaatcaagtgaacagtcacgaattcgagagaagtgctctgattcacacattgacatctggcttggctccatgcagtcttcacaaaatgtgcagcaaactccccagaagctttctgagtgttggcagtggcaccgggaaggaagcacgaagcaaaatattaacatttcgcacagcaagcaggcatttggtgctctgaaatggaggtggattccaaagaaagaacaaaaaagagggaaaggggaagataaagaaagagagaaagaaggaggtggaaaagaagaaaacaagaaagaggaagaggaggatgaaaaagaagaagaaagaaggagaaaaaggagaggggataagaaaggaggaagaaaaagcagagaaggagaagcttcaataagaggaccacacaaagagttgaattacacacagagttga

SEQ ID NO: 6817 - DNA, 1377 bp, Homo sapiens
  SIMILAR (1)..(837): 961254mologous to Homo sapiens unknown protein,accession number M22334,Smith-Waterman Score=1443.
atgagtgaactcccattcacaattgcttcaaagagaataaaatacctaggaatccaacttacaagggatgtgaaggacctcttcaaggagaactacaaaccactgctcaaggaaataaaagaggatacaaacaaatggaagaacattccatgctcatgggtaggaagaatcaatatcgtgaaaatggccatactgcccaaggtaatttacagattcaatgccatccccatcaagctaccaatgactttcttcacagaattggaaaaaactactttaaagttcatatggaaccaaaaaagagcccgcattgccaagtcaatcctaagccaaaagaacaaagctggaggcatcacactacctgacttcaaactatactacaagcctacagaaaccaaaacagcatggtactggtacctaaacagagatatagatcaatggaacagaacagagccctcagaaataacgccgcatacctacaactatctgatctttgacaaacctgagaaaaacaagcaatggggaaaggattccctatttaataaatggtgctgggaaaactggctagccatatgtagaaagctgaaactggatcccttctttacaccttatacaaaaatcaattcaagatggattaaagatttaaacgttagacctgaaaccataaaaaccctagaagaaaacctaggcattaccattcaggacataggcgtgggcaaggacttcatgtccaaaacaccaaaagcaatggcaacaaaagacaaaactggcaaatgggatctaattaaactaaagagcttctgcacagcaaaagaaactaccatcagagtgaacaggcaacgggttgcagcactgctaaattcagctgttttccagaatgctgtggaagtggtggtttggcccagttcagaagttcatgtcaagtttctgttttgcaagattataagctgtgcagggcagaaacaaccaattaaatttgatggcagcagtagtctgtctggagtggccactgccatgatgtcagctacaatagcacacttgaaaaggattaaagcctgttatcgctcacctgttacagcatggacttttaaagcctataaactctccttacaattccctcattttacctgtccaaaaaccggacaagccttacaggaagctggagtcattcacttcaaaggccatcaaatggcatcagatcccatcactcagggaaacacttatgctaataaggtagctaaagaagcagctagcgttctaacttctgtccctcatggccaatttttctccttctcatcagtcactcctacttacttccccactgaaattgactttacttacatgccccaagtcaggaaactaaaacacctcatggtctga

SEQ ID NO: 6818 - DNA, 892 bp, Homo sapiens; identical to SEQ ID NO: 6704
  SIMILAR (259)..(546): 821254mologous to Homo sapiens reverse transcriptase homolog= pol {retroviral element},accession number S61070,Smith-Waterman Score=396.

SEQ ID NO: 6819 - DNA, 2146 bp, Homo sapiens; identical to SEQ ID NO: 5260
  SIMILAR (1478)..(1882): 601254mologous to Homo sapiens NAG13,accession number AF194537,Smith-Waterman Score=369.

SEQ ID NO: 6820 - DNA, 858 bp, Homo sapiens; identical to SEQ ID NO: 5261
  SIMILAR (358)..(702): 841254mologous to Homo sapiens reverse transcriptase homolog= pol {retroviral element},accession number S61070,Smith-Waterman Score=498.

SEQ ID NO: 6821 - DNA, 381 bp, Homo sapiens
  SIMILAR (20)..(250): 461254mologous to porcine endogenous type C retrovirus reverse transcriptase,accession number AF033260,Smith-Waterman Score=165.
atgacctctggtcctcagaccaaccagcccaaggaacacctcaccaattttaaatctgcatgctttaaaaggattaaagcctgttatcattcgcctgttacagcatggccttttaaagcctataaactctccttacaattcccccattttacctgtccaaaaaccggacaagccttacaggttagttcaggatctgagccttatcaaccaaattgttttgcctatccaccccatggtctctcagccatggataccagcacccgctctggtggaggtagcagtgaagtaaactggactcagtgtgatcccttggttgtaattttgtttagtgcactggttttctggaatcctgattgtgctagcagtgaagttgtcatgtga

SEQ ID NO: 6822 - DNA, 2208 bp, Homo sapiens
  SIMILAR (391)..(993): 831254mologous to Mus musculus UNC-51-like kinase (ULK) 2,accession number AB019577,Smith-Waterman Score=858.
atgggaaacctacagccagggcttctgaggggccctgggtggctagaggttattgctccacttcctctggaaaatttcagtgaagatgaagatgagttgataaactttggagctaaaccaaagatgactgatttagatctgcagtggtacgaaggtccaacaccagccccatgggcttcctccggccgggatcatgctccccagtaccagcagacacagcacagacagttggacgaaggctctccactgggtcttctaggccttactcaccttcccctttggttggtaccattcctgagcaattcagtcagtgctgctgtgggcatcctcagggccatgactccaggagtagaaactcctcaggttaatgttacatttgttttcttgttaggttctccagtgccacaagctcagtccccacagtctctcttatcgggtgctagactgcagagcgcccccaccctcactgacatctatcagaacaagcagaagctcagaaaacagcactctgaccccgtgtgcccatcccatactggggctgggtacagctactcgcctcagcccagtcggcctggcagccttggaacttctcccaccaagcacttggggtcctctccacggagttctgactggttctttaaaactcctttgccaacaatcattggctctcctactaaggtttgtttattaaacccttttgtagaccacagctcctttcaaatccctaaaactcaagcatcttccaacctgttagccttggttactcgtcatgggcctgctgaagaacagtcgaaagatgggaatgagccacgggaatgtgcccatgccctcttagtgcaaggaagtgagaggcagcgggccgagcagcagagcaaggcagtgtttggcagatctgtcagtaccgggaagttatcagatcaacaaggaaagactcctatatgtcgacatcagggcagcacagacagtttaaatacagaacgaccaatggatatagtagagacaaggagacacattttatccatggacccaaaactccagtgccggtcacggactcgggaggacagtcttcccttgtggctgaagactgacactgcccgatcgccttggaagcctacaggaccatcacagacgctttgggtgacttacagtggaggttcgaagccttcttcgcatcctccccttgtatctccccaccttaatccacaagtatgggacacctctactccctccttggtgaccgatcatgcacgccttaccatcccattaaaacctaatcacccttactccaatcaacgccaatatcccatcccatggcatgctttaaaaggattaaagcctgttatcactcgcctgctacagcatggtcttctaaagcctataaactctccttacaattcccccattttacctgtccaaaaaccagacaagtcttacagttcccataactttcaaaatctattttcctcctcacacttgacacatatactttctgccccccagctccttcagctatgctcagtctttgttgagtctcccacaattacaattgttcctggcccagacttcaatccgaactcccacattattatggatatcagaactgacccccatgactgtatctctctgatccacctgacagtcaccacatttccccatatttccgtctttcctgtttctcaccatgatcacacttggtttattgatggcagttccaccaggcctaatcaccactcaccagcaaaggcaggctatgctatagtatcctccacatctatcattgaggctactgctctgcccgcctccactacctctcagcaagccaaactcattgccttaacttgggccctcactcttgcaaagggactacacgtcaatatttatactgactctaaatatgccttccgtatcctgcaccaccatgctgttacatgggcagaaagaaatttcctcactacacaagagtcctccatcattattgcctccttaataaaaacgcttcttaaagtcgctttacttccaaaggaagctggagtcattcactgcaagggccatcaaaaggcatcagatgtcatcgctcagggcaacgcttatgctgataagcagtcactaaacatcatcatctccatttctacagatggcacagaggcccagagaggtgaaggaaagcctaaggtcctacagccaggatgtggcacaatttggaactga

SEQ ID NO: 6823 - DNA, 2082 bp, Homo sapiens; identical to SEQ ID NO: 5262
  SIMILAR (7)..(636): 991254mologous to Escherichia coli IS5 39.3kDa protein,accession number U70214,Smith-Waterman Score=1081.

SEQ ID NO: 6824 - DNA, 1614 bp, Homo sapiens
  SIMILAR (963)..(1031): 471254mologous to Murine leukemia virus reverse transcriptase,accession number M87550,Smith-Waterman Score=60.
atgggcctcgtgcatctgcagagacagtcatattggacagtgcagaggagctccataaatcacttcctaggctgcaacccacatactgggaaagataaaacgctttacatgagatggacaaaaagctttaggaaagtagaagatccacctacgacctcaggtcctcagaccgaccagcccaagaaacatctcaccaagtttaaatccgagacaaaggagacacgttttatccatggacccaaaactccggcgccggtcatggactgggaaggcagccttcccttggtgtttaatcattgcagggacgcctctctgattatacactcacatttcaagggtgtcagaccacgcagggatgcctgccttggtccttcacccttagcggcaagtcccgcttttctggggaaaaggcaacacgctttaaaaagattaaagcctgttatcactcacctgctacagcatggccttttaaagcctaaaaactctccttacaattcccccattttacctgtcctaaaaccagacaagccttacaagtttgttcaggatctgtgccttatcaaccaaattgttttgcctatccaccccatgctgtactcactctttgttgagtctcccacaattaccattgtttctggcccggacttcaatccggcctcccacattattccggataccacacctgaccctcatgactgcatctctctgatccacctgatgctctccccatttccccacatttccttcttccccatttctcaccctgatcacacttggtttattgatggcagttccaccaggcctaatcgccactcaccagcaaaggcaggctatgctataatatcttccacatctatcgttgaggctaccactctgcctccctccactacctctcagcaagccaaactagttgccttaactcaagccctcactcttgcaaaaggactacgcgtcaatatcttactgattctaaatatgcctttcatattcggcaccaccatgcagtcatatgggctgaaagagggattgttcaggtctcctccctttcctacacatcaagctaggggatttgcccctgcccaggactggcaaattgactttactcacatgcctcgagtcagaaaactaaaatatctcttagtctgggtagacgctttcactggatgggtagaggccttccccacagggtctgagaaggccactgcggtcatttcttcccttctgtcagacataatccctcggtttggccttcccgcctctacacagtctgataacggaccggcctttactagccaaatcacccaagcagtttctcaggctcttggtattcagtggaaccttcatatcatttaccgtcctcaatcttcaggaaaggtagaacggactaatggtcttttaaagacacacctcaccaagctcagcctccaacttaaaaaggattggacagtacttttaactcttgctcttctcagaatcagagcctgtcctcgagatgctacagggtacagtccatttgaactcttatatggacacactttcttgcttggccccaacctcatcccagacaccagccctctaggcaactatcttccagtcctccaacaggctagatag

SEQ ID NO: 6825 - DNA, 2070 bp, Homo sapiens
  SIMILAR (1)..(906): 561254mologous to Homo sapiens zinc finger protein,accession number U68536,Smith-Waterman Score=818.
atgtctgcaaaattgggaaagtcatcatcactcctaacacaaacttcagaggagtgtaatgggattctgacagagaagatggaagaggaagagcagacctgtgatccagactctagcctccactggagcagcagctacagcccagagaccttccgccagcaattcaggcagtttggctaccaggattcacctgggccccatgaggctctgagccggctctgggaactttgtcatctctggctgaggccggaagtgcacaccaaggagcagatcctggagctgctggtgctggagcagttcctggccatcctcccaaaagagcttcaggcctgggtgcagaagcatcatccagagaatggagaggaaactgtgactatgctggaggatgtggagagagagcttgatggaccaaagcagatcttttttggacgaaggaaggacatgattgcagagaagctagcaccttcagaaatcactgaggaattgccaagtagccagctcatgcccgtgaagaagcagctccagggagcatcatgggagcttcagtccttaagaccacatgatgaagacatcaaaactacaaatgtgaaatctgcttcaaggcaaaagacttctttaggcatagaactgcattgcaatgtttccaatatccttcatatgaatggctcccagagttccacatatagaggaacctatgaacaagatggtaggtttgaaaagagacaaggaaacccttcttggaaaaaacaacagaaatgtgatgaatgtggcaaaatctttagtcagagctcagcccttattttacatcagagaatccacagtggaaagaaaccttatgcatgtgacgagtgtgcaaaggcattcagccgaagcgcaattctgattcagcatcgacgaacccatactgactcagcccgcctgcacccaggtgaaataaacagtcttgttgctcacacaaagcctgtttggtggtctcttcacatggacgcgcatgaaatttggtgccgtgactcggattgggggacctcccttgggagatcaatcccctgtcctcctgctctttgctccatgagaaagatccacctacgacctcgggtcctcagaccgaccagcccaaggaacatctcaccaatttcaaatccgatgaagactgaccctacccaatcgccttggaagcctacaggaccatcacagacactctgggtaactatcacagtggaggttcaaaacctccttcacatcctccccttgtatctccccaccttaacccacaagtatgatacctctactccctccttggtgaccgatcatgcaccccttaccatcccattaaaacctaatcaaccttaccccgatgaatgccaatatcccatcccacagcacactttaaaaggattaaagcctgttatcactcacctgttacagcatggccttttaaagcctagaaactctccttacaattcccccattttacctgtcctagaaccaaacaagccttactggttagttcaggatctgcgccttatcaaccaaattgttttgcctatccaccccatgctccttcagctgtactcactctttgttgagtctcccacagttaccatttttcctggcccggacttcagtccggcctcccacattattcctgatgctacacctgacccccataactgtatctctctgatccaactgacattcaccccatttccccatatttccttctttcctgttcctcaccctgatcacacttggtttattgatggcagttccaccaggcctaatcgctacacaccaacaaaggcaggctatgctataagcatcctggaggctggaggcttgctcctcagtggcttcaggagcagaggcctctcctatgtcctaggagtctgccatgggggcttcttccagggcttctttgcccaggaccaaaaaaatcttcatcgaattggacagtatgaagatccttggtcccctttcctagaactgtttacagggaaggctttgagtgaacgtgaagattgcaatcagctgatgactaaattagaggagcagaaaggaggcattaagtag

SEQ ID NO: 6826 - DNA, 1155 bp, Homo sapiens
  SIMILAR (1)..(246): 701254mologous to Homo sapiens putative p150,accession number U93568,Smith-Waterman Score=282.
atgggagactttaacaccccactgtcaatattagacagatcaacaagagagaaaatcaacaaggatattcaggacttgaactcagctctggaccaagtggacctaatagacatctacagaactctccacctccaatcaacagaatatacattcttctcagcacgacatcacactttttctaaaattaaccacatgattagaaggaaccaaaaaagagcccgtatagccaaggcactcctaagcaaaaagaacaaagctggaggcatcatgctacctgacttcaaactacactacaaggctatggtaaccaaaacagcatgtgacatggatgaagctggaaaccatcattctcagcaaactaacacagaaacagaaacccaaacaccacgtgttctcactcataagtgggaattggacaatgagatcacatggacacagggaggggaacatcacacaccagggcctgtgccacagttgcatggctgtgcactatatcactcctggggattaccatccatttggactgcagaatcagaggagactctagagttgtacgccgtgctggcatctcacaggcaggctctggggtattactgcagtgagacaaaagagacacgttttatccgtggacccaaaactccggcaccagtcacggactgggaaggcagccttcccttggtgtttaatcattgcagggacgcctctctgattatacacccacgtttcaagggtgtcagaccacgcagggatgcctgccttggtccttcaccctttgcagcaagtcccgcttttctggggaaggggaaacacgctttaaaaggattaaagcctgttatcactcgcctgctacagcatggccttttaaagcctataaactctccttacaattcccccattttacctgtcgtaaaaccagacaagccttacaagttagttcagaatctgcgccttatcaaccaaattgttttgcctatccaccccatggtgccaaacccatatactctcctatcctcaatacctgcctctacaacccattattctgttctagatctcaaacgtgctttctttactattcctttgcacccttcatcccagcctctcttcgctttcacttggactgaccctgacacccatcaagctcagcaaattacctag

SEQ ID NO: 6827 - DNA, 801 bp, Homo sapiens; identical to SEQ ID NO: 600
  SIMILAR (349)..(798): 451254mologous to Sus scrofa polyprotein,accession number U77599,Smith-Waterman Score=339.

SEQ ID NO: 6828 - DNA, 788 bp, Homo sapiens
  SIMILAR (353)..(724): 421254mologous to Friend murine leukemia virus RNA-dependent DNA polymerase,accession number Z11128,Smith-Waterman Score=257.
ttttctcaaattcaaagcttccttcacatcctcccctggtatctcccactttaatccacaagtatgggacacttttactccttccctggtgaccaatcatgcaccccttaccatcccattaaagcgtaatcacccttaccccgctcaatgccaatatcccatcccacagcatgctttaaaaggattaaagcctgttatcgctcgcctgttacagcatggccttttaaagcctataaactctccttacaattcccccattttaccatccaaaaaccggacaagtcttacaggttacacgctgctagcccgcctcttagaatctctcatttcctttccatcgtggaaatctattctcaaggaaataacttctcagtgttccatctgctattctacgactcctgagggattgttcaggccccctctcttccctacacatcaagctcggggatttgcccctgtccaggactggcaaattgactttactcacatgccccgagtcaggaaactaaaatacctcttggtctgggtagacactttcactggatgggtagaggcctttcccacagggcctgaaaaggccactgtggtcatttcttcccttccgtcagacataattcctgggtttggccttcccacctctataatacagtctgataacggattggcctttattagtcaaatcgcccaagcagtttctcaggctcttggtattcagtggctcctggttttacctcaaaccaccacccttaagtctctcttaaagtggataaaagatcttcagtggcaag

SEQ ID NO: 6829 - DNA, 765 bp, Homo sapiens
  SIMILAR (3)..(341): 721254mologous to Homo sapiens F-box protein Fbx7,accession number AF129537,Smith-Waterman Score=385.
tatacaaagatcttcagaaactctctcgcctctttaaagaccagctggtgtatcctcttctggcttttacccgacaaggtaagagatgaaatactgtatttgggttggtcgtcctcccattggaactgaaactacggatcttccgacttctggatgttcgttccgtcttgtctttgtctgcggtttgtcgtgacctctttactgcttcaaatgacccactcctgtggaggtttttatatctgcgtgattttcgaggtgatttccgtaatgacatctattcctggacaacaaaggatttcgaatattacataaatttagttgacaaaacagaagcaaggtttgagaaggttgactctgattttgaaagttttactgtgggtaaaatgccatcaaacagcatcgcatgtacagagaaatctttcatgaaaggaagagtgagtcaatgtgacaaaaagcctgttatcactcgcctgctacagcatggccttttaaagcctataaactctccttacaattcccctattttacctgtcctaaaaccagacaagccttacaagttagttcaggatctgcaccgtatcaaccaaattgttttgcctatccacccctgtggtgcccaaccccatacactcttttgtcctcaataccttcctccacaactcactattcccgtgcctgatcttaaagatgcttttttcactattcccctgcaaccctcgtcccaagcctctctttgctttcacttagactgaccctgacacccat

SEQ ID NO: 6830 - DNA, 2471 bp, Homo sapiens
  SIMILAR (2233)..(2469): 751254mologous to Homo sapiens reverse transcriptase homolog= pol {retroviral element},accession number S61070,Smith-Waterman Score=293.
atgggcacttattaccagaaacaccagacagccagagatctgctggccctggggggcaatcctttcctttctttgcttggtaaagggtgggtccagttgatgaagacggtctggtcctctcttccaggcaaagagaggacggagattgggctggggccaggtatctgggagctgggtctgctctcctgggtggagctttcccaggccagtggtgcagaccaatggggactgaagttggagatcctggtaagacagctccagggatacccaaaggaaaaaaccaagctaatggaggcagccagaaaacaggacacaccgcagaacaaaagatggatcaccaagtggaaaaatgaagcagaggagatcggaggagggctccacagttttacaagtaaagaagataattatactctagttgttgacatgaactgcttggatgttcagggttgtggtgatgacgtgaacaacagacttcttcactctgcaagttacccaacagcaagctgggtggatgaagccatgccaacagcatctggcaggagccagcaccaagcacaccttacacagcttcgacagagctgcacggagaacacatatgcttgctccctctgtctctcatacaaagtaccttatagtgtgagctccagacacacagacactgccatcctgcctacaaagaaaggaatgcagacacagccaacgtcagcattcggggtgggaccacagtggaacgcatacatcctttcacagctgccaaggccttctgggaagtccaatgcctgcccccacatctctcagagccaaacatcttcttctgcactttccacaagttacaattatgtatttacctgtgtgcttactgccctaacctcctacttatggactgatgtttatgtccctccaaagttcacatgcactgctgttaggatcaaagtgaccatccatgatgcacagagcacgtaccagggtaaagttccagctgggacgcaggcatcagcaattgtagaatttgggttctcccttcctcagatccctgactgtccttggtcattcaagaaagattcactgtccctaggccaagagtcaggagcaaaacaggaacaccaagggtatggtctgaggatgttgtcagcagggagcaacgaccaagcaggacactgggagctgctgtcccgtctgcaggcgggactccatgaaggcccctgtctgcccttccagcctttgccacaaaccctcgaacgctggctgcacactggaatcacttggggagcttttaaaagatacggaggcctgggtctgactcccgcccaggacctcagaaagggcctgccccgcgcgaatccccagtcgctgggacttacttggccaccaggtttacagacttcgcagccgctgagagctagagaagagcccggagagcgccatggtccggggacgccggggccgggaagcgccgtggcccgggaggacgctgctcccgcagtagcgcgagggaggggcaggaccggggcggctgcctcgcgggcccggaacgggaactggctgcgactacagccgcagccgcgcccctctgttggcgcgcccaagagcctgccggctgctgggagaggccgccgaagggcgggggcggtcaaggcagggtcccacggtgctgccattcgcccgggtgaaataaacagctttattgctcacgcaaagccttttggtggtctcttcacacggacacgtgtgacatttggtgccgaagacccgggacaggaggactccttcaggagaccagtcccctgtcctcaccctcactctgtgaggagatccacctatgacctcgggtcctcagaccaaacagcccaaggaacatctcaccaatttcaaatcggatcttctcggactgacgctgcccgatcgcctcagaagcctcctggaccatcacagatgctttgggtaactcttacagtggaggcatggccttttaaatcctataaactctccttacaattcccccattttacctgtccaaaaaccggacaagccttacaggttagttcaggctttgttgagtctcccacagttaccattgttcctggcctggacatcaatctggcctcccacactattccggataacactcctgaaccccatgactgtatctctctgatccacctgacattcactccatttccccatgtttccttctttcctgttcctcaccctgatcacacttggtttattgatggcagttccactaggcctaattgccactcaccagcaaagacgggctatgctatagtatcttccacacttatcattgacgctactgctcttcccccctccactacctctcagcaagccgaactcattgccttaactcgagccctcactcttgcaaagggactacccatcaatattcatactgactctaaatatgccttccatatcctgcaccaccatgctgttatataggcagaaagagg

SEQ ID NO: 6831 - DNA, 1289 bp, Homo sapiens
  SIMILAR (362)..(583): 1001254mologous to Cloning vector pCMVLacI lac repressor,accession number U64448,Smith-Waterman Score=354.
atggaggctgagaagttccatcagatgccatctgtgagccggagaaccaggaaagccagtggtgtaattcagtccaaatctgagaacctgagaaccaggggagccaatagtcacgctttaaaaagattaaagcctgttatcactcgcctgctacagcatggccttttaaagcctataaactctccttacaattcccccattttacctgtcctaaaaccagacaagccttacaaacggtttctcgccttttacggttggagtccacgttctttaatagtggactcttgttccaaactggaacaacactcaaccctatctcgggttattcttgtgatttataagggattttgccgatttcggaaccaccatcaaacaggattttcgcctgctggggcaaaccagcgtggaccgcttgctgcaactctctcagggccaggcggtgaagggcaatcagctgttgcctgtctcactggtgaaaagaaaaaccaccctggcgcccaatacgcaaaccgcctctccccgcgcgttggccgattcattaatgcagctggcacgacaggtttcccgactggaaagcgggcagtgagcgcaacgcaattaatggattttgccgatttcggaaccaccatcacacaggattttcgcctgctggggcaaaccagcgtggaccgcttgctgcaactctctcagggccaggcggtgaagggcaatcagctgttgcctgtctcactggtgaaaagaaaaaccaccctggcgcccaatacgcaaaccgcctctccccgcgcgttggccgattcattaatgcagctggcacgacaggtttcccgactggaaagcgggcaatcttctcagcttagcagcttaagactgacactgcccgatcgcctcagaagccccctagaccatcacggacgccgagcttcaggtaactctcacagtggacagatggccttttaaagcctatgaactctccttacaattcccccattttacctgtcctgaaaccagacaagccttacaagttaagttcaggatctgcgccttatcaaccaaattgttttgcctatccaccccgtggtggccaaacccatatactctcctatcctcaatacctccctctactacccattattctgttctagatctcaaacttgctttctttactatccctttgcacccttcatcccagcctttcttcgctttcacttggactgaccctgacacccatcaagctcagcaaattacttaggctgtactgcctcaaagcttctcagacagcccccacgaaa

SEQ ID NO: 6832 - DNA, 474 bp, Homo sapiens
  SIMILAR (347)..(51): 941254mologous to Homo sapiens ribosomal protein S10,accession number U14972,Smith-Waterman Score=506.
  misc_feature (1)...(474): n = a,t,c or g
aatccacggctgtaagtttattcaatgcaaaagaatcctctccaattttactgaggtggctgaccacgtacacgaccaaatccgcctctaaactggaattcggttgctgacccagccccagcctcggctttcttgtcggcaccaggtggcacagcactccgtctgtaggtatctctgtcagcttcccctcttgtgagactcgcaggtcgctcaccctccagacctttaggccgaggcctgccagtctctggacggctacggcgtatggtggcaggcacaatctccggcggcagatgaaggtaatcacggagatactgcataccctcattggtaagggaccagtagaaactgttccttcacgacgcctcgggacttgagagactgcatggccttcatgacatgaaggttgggcacattctttgctgccagctcccggatgcttaagcatgtgnacattcttcttggccaccatga

SEQ ID NO: 6833 - DNA, 1441 bp, Homo sapiens
  SIMILAR (341)..(1360): 921254mologous to Homo sapiens putative p150,accession number U93574,Smith-Waterman Score=1612.
actaaaccaggaggaaggtgaatctctgaatagaccaataacaggctctgaaattgaggcaataattaatagcttaccaaccaaaaagagtccaggaccagatggaatcacagccgaattctaccagaggtacaaggaggaactggtaccattccttgtaaaactattccaatcaacagaaaaagagggaatcctccctaactcattttatgaggccagcatcatcctgataccaaagcctggcagagacacaacaaaaaaagagaattttagaccaatatccctgatgaacatcgatgcaaaaatcctcaataaaatactggcaaaccgaatccagcagcacatcaaaaagcttatccacaatggtcaacatataaacagaaccaacgacaaaagccatataattatctcaatagatgcagaaaagacctttggcaaaattcaacagcccttcatgctaaaaactctcaataaattaggtattgatgggacatatctcaaaataataagagctatttatgacaaacccacagccaatatcatactgactgggcaaaaactggaagcattccctatgaaaactggcacaagagagggatgccctctctcaccactcttattcaacatagtgttggaagttctggccagggcaattaggcaggagaaagaaataaagggtattcaattaggaaaagaggaagtcaaattgtccctgtttgcagatgacatgattgtatacctagaaaaccccatcgtctcagcccaaaatctccttaggcttataagcacctttagcaaagtctctggatacaaaatcaatgtgcaaaaatcacaagcattcttatacaccaataacagacaaacagagagccaaatcctgagtgaactcccattcacaattgcttcaaagagaataaaatacctaggaatccaacttacaagggatgtgaaggacctcttcaaggagaactacaaagcactgctcaatgaaataaaagaggatataaacaaatggaaaaacattccatgctcatgggtaggaagaatcaatatcgtgaaaatggccatactgcccaaggtaatttatagattcaatgccatccccatcaagctaccaatgactttcttcacagaattggaaaaaactactttaaagtttatatggaaccaaaaaagtgcccgcatcgccaagtcaatcctaagccaaaagaacaaagctggaggcatcatgctacctgacttcaaactatactacaaggctacagtaaccaaaacagcatggtactggtaccaaaacagagatatagatcaatggaacacaacagagccctcagaaataatgttgcatatctacaactatcgatctttaacaaacctgagaaaaacaagaaatggggaaaggattccctatttaacaaatggtgctgggaaaactggctag

SEQ ID NO: 6834 - DNA, 2418 bp, Homo sapiens
  SIMILAR (208)..(2415): 901254mologous to Homo sapiens putative p150,accession number U93574,Smith-Waterman Score=3432.
cagcctaaatgggaggcaccccccagtaggggcggacagacacctcacacggccaggtactcctctaagacaaaacttccagaggaacgatcaggcagcagcgtttgcggttcaccaatatccgctgttctgcagccactgctgctgatatccaggcaaacagggtctggagaggacctccagcaaactccaacagacctgcagctgagggtcctgactgttagaaggaaaactaacaaacagaaaggacatccacaccaaaaacccatctgtacatcaccatcatcaaacaccaaagaaatacaaactaccatcagagaatactataaacacctctatgcaaataaactagaaaatgcagaagaaagagataaattcctcaacatatacaccctcccaagactaaaccagaaagaagttgaatctctgaatagaccaataacaggctctgaaattgaggcaataattaagagcttaccaaccaaaaaaagtccaggaccagatggattcacagccaaattctaccagaggtacaaggaggagctggtaccattccttctgaaactattccaatcaatagaaaaagagggaatcctccctaactcattttatgaggccagcatcatcctgataccaaagcctggcagagacacaaccaaaaaagagaattttagaccaatatccttgatgaacattgatgcaagaatcctcaataaaatactggcaaacctaatccagcagcacatcaaaaagcttatccaccatgatcaagtgggcttcatccctgggatgcaaggctggttcaacatatgcaaatcaataaacataatccagcatatgaacagaaccaaagacaaaaaccacatgattatctcaatagatgcagaaaagccctttgacaaaattcaacaacctttcatgctaaaaactctcaataaattagatattgatgggacgtatctcaaaatagtaagagctaaatatgacaaacccacagccaatatcatactgaatgggcaaaaactggaagcattccctttgaaaacgggcacaagacagggatgccctctctcaccactcctattcaacatagtgttggaagttctggccagggaaatcaggcaggagaaggaaataaagggcattcaattaggaaaagaggaagttaaattgtccctgtttgtagatgacatgattatatatttagaaaaccccattgtctcagcccaaaatctccttaagctgataagcaacttcagcaaagtctcaggatacaaaatcagtgtgcaaaaatcacaagcattcttatacaccaataacagacaaacagagagccaaaccatgagtgaactcccattcacaattgcttcaaagagaataaaatacctaggaatccaacttacaagggatgtgaaggaccgcttcaaggagaactacaaatcactgctcagtgaaataaaagaggatacaaacaaatggaagaacattccatgctcatgggtaggaagaatcaatatcgtgaaaatggccatactgcccaaggtaatttatagattcaatgccattcccatcaagctaccaatgactttcttcacagaattggaaaaaactactttaaagttcatacggaaccaaaaaagagcccgcatcgccaagtcaatcctaagccaaaagaacaaagctggaggcatcacactacttgacttcaaactatactacaaggctacagtaaccaaaacagcatggtactggtaccaaaacagacatgtagaccaatggaacagaacagagccctcagaaataatgctgcatatctacaactatctgatctttgagaaacctgacataaacaagcaatggggaaaggattccctatttaataaatggtgctgggaaaactggctagccatatgtagaaagttgaaactggatcccttccttacatcttatacaaaaattaattcaagatggattaaagacttaaatgttagacctaaaaccataaaaaccctagaagaaaacctaggcaataccattcaggacataggcatgggcaaggacttcatgtctaaaacaccaaaagcaatggcaacaaaagccaaacttgacaaatgggatctaattaaactaaagagcttctgcacagcaaaagaaactaccatcagagtgaacaggcaacctacaggatgggagaaaatttttgcaacctactcatctgacaaagggctaatatccagaatctacaatgaacacaaacaaatttacaagaaaaaaacaaacaaccccatcaaaaagtgggcaaaggatatgaacggacacttctcaaaagaagacatttatgcagccaacagacacatgaaaaaatgctcatcatcactggccatcagagaaatgcaaatgaaaaccacaatgagatag

SEQ ID NO: 6835 - DNA, 2361 bp, Homo sapiens; identical to SEQ ID NO: 6252
  SIMILAR (1402)..(2358): 891254mologous to Homo sapiens putative p150,accession number U93568,Smith-Waterman Score=1439.

SEQ ID NO: 6836 - DNA, 1443 bp, Homo sapiens
  SIMILAR (442)..(1440): 781254mologous to Homo sapiens putative p150,accession number U93572,Smith-Waterman Score=1386.
atggataaattcctcgacacatacaccctcccaagactaaaccaggaagaatttgaatctctgaatagacaaatagcaggctctgaaattgaggcaataatcaatagcttaccaaccaaaaaaagcccaggaccagatggattcacagccgaattctaccagaggtacaaggaggagctggtaccattccttctgaaactattccaatcaacagaaaaagagggaatgctccctaactcattttatgaggccagcatcatcctgataccaaagcctggcagagacacaacaaaaaaagagaattttagaccaatatccctgatgaacattgatgcaaaaatcctcaataaaatactggcaaaccgaatccagcagcacatcaaaaagcttatccaccatgatcaagtgggcttcatccctgggatgcaaggctggttcaacatatgcaaatcaataaacgtaatccagcttataaacagaaccaaagacaaaaaccacatgattatctcaatagatgcagaaaaggcctttgacaaaattcaacaacccttcatgctaaaaactctcaataaattagctgcttcaaagagaataaaatacctaggaatccaacttagaagggacgtgaaggaccttttcaaggagaactacaaaccactgctcaatgaaataaaagaggatacatacaaatggaagaacattccatgctcatgggtaggaagaatcaatatcgtgaaaatggccatactgcccacggtaatttatagattcagtgccatcctcatcaagctaccaatgactttcttcacagaattggaaaaaactactttaaagttcacatggaaccaaaaaagagcccgcattgcgaagtcaatcctgagccaaaagaacaaagctggaggcatcacattacctgacttcaaactatactacaaggcaacagtaaccaaaacagcatggtactggtaccaaaacagaaatatagaccaatggaacagaacagagccctcagaaataatgccacatatctacaactatctgatctatgacaaacctgacaaaataaagcaatggggaaaggattccctatttaataaatggtgctgggaaaactggctagccatatgtagaaagccgaaactggatcccttccttacacctaatacaaaaattaattcaagatggattaaagacttaaatgttagacttataactgtaaaaaccctagaagaaaacctaggcaataccattcaggacataggcatgggcaaggacttcaggtctaaaacaccaaaagcaatggcaacaaaagccaaaattgacaaatgggatctaattaaactaaagagcttctgcacagcaaaagaaactaccatcagagtgaataggcaacctacagaatgggagaaatttttgcaatctactcatttgacaaagggctaa

SEQ ID NO: 6837 - DNA, 2916 bp, Homo sapiens
  SIMILAR (946)..(2913): 871254mologous to Homo sapiens putative p150,accession number U93572,Smith-Waterman Score=2979.
atgttgattgaaccagccttgcatcccagggatgaagccgacttgatcgtggaggataagctttttgacgtgctgctggattcggtttgccagtattttattgaggattttcgaattgagtcaggatcctctgctgcaggtctcctggagtttgctggaggtccactccagaccctgtttgcctgggtatcaccagcagatgctgcagaacagcaaagtttgttgcctgttccttcctctggaagcttcatcccagaggggcacctgcagatgccagccatagctctcctgtatgaggtgtctgtcagctcctactgggagggggcatccagtacagcagtgacacacagtaaaggcttgcaaacatttgccaaatgcaaaaaattagtaacatttcaagaaggcatgagatgtccagaacagagctatccaaaggtgcagcaagttttagaaaatggggttagcaagagagtggattctgaggttccttgttttaattcttcaggaaatacgatcaatgagacagaaagagaacaaggatatccaggacttgaactcagctctgcaccaagcagacctaatagacatctacagaactctccaccccaaatcaacagaatatacattcttctcagcaccacattgcattgcacttattccaaaattgaccacacacttggaagtaaagcactcctcagcaaatgtaaaataacagaaattataacagactctcagaccacagtgctatcagaactcaggattaagaaactcactcaaaaaccgctcagctacatggaaactgaacagctcctgaatgactactgggtacataatgaaatgaaggcagaaataaagatgttctttgaaaccaatgagaacaaagacacaacataccagaatctctgggatacatttaaagcagtgtgtagagggaaatttatagcactaaatgcccacaagagaaagcaggaaagatctaaaattgacaccctaatgtcacaattaaaagagctagagaagcaagagcaaacacattcaaaagttagcagaagaccaataccaagttctgaaattgaggcaataattaatagcttaccaaccaaaaaaagtccaggaccagatggattcacagccgaattctaccagaggtacaaggaggagctggtaccattccttctgaaactattccaatcaatagaaaaagagggaatccttcctaactcattttatgaggccagcatcattctgataccaaagcctggcagagacacaacagaaaaagagaattttagaccaatatccctgatgaacatcgatgcaaaaatcctcaataaaatactggcaaaccgaatccagcagcacatcaagaagcttctccaccatgatcaagtgggcttcatccctgggatgcaaggctggttcaacatatgcaaatcaataaatgtaattcagcatataaacagaaccagtgacaaaaaccatacgattatctcaatagatgcggaaaaggccttcaacaaaattcaacagctgttcatgctaaaaactctcaataaactaggtaccaatgggatgtatctcaaaatagtaagagctatttatgacaaacccacagccaatatcatactgaatgggcaaaaactggaagcattccctttgaaaactggcacaagacagggatgccctctctcaccactcctattcaacatagtattggaagttctggccagggcaatcaggcaggagaaagaaatacagggtattcaattaggaaaagaggaagtcaaattgtccctgtttgcagatgacatgattgtatacttagaaaaccccattgtctcagcccaaaacctccttaagctgataagcaacttcagcaaagtctcaggatacaaaatcaatctgcaaaaatcacaagcattcttatacaccaataacagacaaacagagagtcaaatcatgagtgaactcccattcacaactgcttcaaagagaataaaatacctaggaatccaacttacaagggatgtgaaggacctcttcaaggagaactacaaaccactgctcaatgaaataaaagaggacacaaacaaatggaggaacattccatgctcatgggtaggaagaatcaatatcgtgaaaatggccatactgcccaaggtaacttatagattcaatgccatccccatcaagctaccaatgactttcttcacagaattggaaaaaactattttaaagttcagatggaaccaaaaaagagcccacattgccaagacaatcctaagtcaaaagaacaaagctggaggcatcagactacctgacttcaaactattttacaaggctacagtaacaaaaacagcacggtactggtacgaaaacagagatatagaccaatggaacagaacagagcccctggaaataatgccacacatctacaaccatctgatctttgacaaacctgacaaaaacaagcaatggggaaaggattccctatttaataaatggtgctgggaaaactggctagccatatgtagaaagctgaaactggaccccttccttacatcttatacaaaaattaattcaagatggattgaagacttaaatgttagacctaaaaccatagaaaccctagaagaaaacctaggcaataccattcaggacataggcatgggcgaagactttatgactgaaacaccaaaagcaatggcaacaaaagcccaaattgacaaatgggatctaattaaactaaagagcttgtgcactgcaaaagaaactaccatcagagtgaacaggcaacctacagaatgggagaaactttttatagtctacccatctgacaaaggcctaatatccagaatctacaaagaacttaaacaaatttacaagaaaaaatcaaaccaccccatcgaaaagtag

SEQ ID NO: 6838 - DNA, 1680 bp, Homo sapiens
  SIMILAR (427)..(1677): 921254mologous to Homo sapiens putative p150,accession number U93569,Smith-Waterman Score=1964.
atggcacgagaactacgtgatgactgcacaagcttcagtagccgattcgatcaactggaagaaagggtatcagtgactggagatcaaatgaatgaaatgaagccagaagagaagtttagagaaaaaagagtaaaaagaaacgaacaaagcctccaagaaatatgggactatgtgaaaagaccaaatctacgtctgattggtgtacctgaaagtgactgggagaatggaaccaagttggaaaacactctgcagggtattatccaggagagcttccccaatctagcaaggcaggccaacattcacattcaggaaatacagagaatgccacaaagatacacctcgagaagagccactccaagacacataattgtcagattcaccaaagttgaaatgaaggaaaaaatattaagggtagccagagagaaagacagatcaacgagacagaaagttaacaaggatatccaggaattgaactcagctctgcaccaagcggacctaatagacatctacagaagtctccaccctaaatcagcagaacatacattcttctcagcacatcacacttattccaaaattgaccacacagttggaagtaaagcactcctcagcaaatgtaaaagaacagaaattgtaacaaactgtctctcagaccacagtgcaatcaaactagaacttaggattaagaaactcactcaaaaccgctcaactacatggaaactgaacaacctgctcctgactgactactgggtacataacaaaatgaaggcagaaataaagatgttctttgaaacctatgagaacaaagacacaacataccagaatctctgggacacatttaaagcagtgtgtagagggaaatttatagcattaaatgcccacaagagaatgcaggaaagatctaaaattgacaccctaatatcacaattaaaagaacttgagaagcaagagcaaacacattcaaaagctggcagaaggcaagaaataactaagatcagagcagaactgaaggagatagagatacaaaaaacccttcaaaaaatcaatgaatccaggagctggttttttgaaaagatcaacaaaattgatagactgctagcaacactaataaagaagaaaagagagaagaatcaaatagacgcaataaaaaatgataaagcggatatcaccaccgatcccacagaaatacaaactaccatcagagaatactataaacacctctacgcaaataaactagaaaatctagaagaaatggataaattcctggacacatacacactcccaagactaaaccaggaagaagttgaatccctgaatagaccaataacgggctctgaaattgaggcaataattaatagcttaccaaccaaaaaaagtccaggaccagatggattcacagccgaattctaccagaggtacaaggaggagctggtaccattacttccgaaactattccaatcaatagaaaaagagggaatcctccctaactcattttatgaggccagcatcatcctgataccaaagcctggcagagacacaacaaaaaagaattttagaccaatatccctgatgaacattgatgcaaaaatcctcaataaaatactggcaaaccgaatccagcagcacatcaaaaagcttatccgccatgatcaagtgggcttcatctctgggatgcaaggctga

SEQ ID NO: 6839 - DNA, 2403 bp, Homo sapiens
  SIMILAR (433)..(2400): 871254mologous to Homo sapiens putative p150,accession number U93572,Smith-Waterman Score=2979.
atcaatgagacagaaagagaacaaggatatccaggacttgaactcagctctgcaccaagcagacctaatagacatctacagaactctccaccccaaatcaacagaatatacattcttctcagcaccacattgcattgcacttattccaaaattgaccacacacttggaagtaaagcactcctcagcaaatgtaaaataacagaaattataacagactctcagaccacagtgctatcagaactcaggattaagaaactcactcaaaaaccgctcagctacatggaaactgaacagctcctgaatgactactgggtacataatgaaatgaaggcagaaataaagatgttctttgaaaccaatgagaacaaagacacaacataccagaatctctgggatacatttaaagcagtgtgtagagggaaatttatagcactaaatgcccacaagagaaagcaggaaagatctaaaattgacaccctaatgtcacaattaaaagagctagagaagcaagagcaaacacattcaaaagttagcagaagaccaataccaagttctgaaattgaggcaataattaatagcttaccaaccaaaaaaagtccaggaccagatggattcacagccgaattctaccagaggtacaaggaggagctggtaccattccttctgaaactattccaatcaatagaaaaagagggaatccttcctaactcattttatgaggccagcatcattctgataccaaagcctggcagagacacaacagaaaaagagaattttagaccaatatccctgatgaacatcgatgcaaaaatcctcaataaaatactggcaaaccgaatccagcagcacatcaagaagcttctccaccatgatcaagtgggcttcatccctgggatgcaaggctggttcaacatatgcaaatcaataaatgtaattcagcatataaacagaaccagtgacaaaaaccatacgattatctcaatagatgcggaaaaggccttcaacaaaattcaacagctgttcatgctaaaaactctcaataaactaggtaccaatgggatgtatctcaaaatagtaagagctatttatgacaaacccacagccaatatcatactgaatgggcaaaaactggaagcattccctttgaaaactggcacaagacagggatgccctctctcaccactcctattcaacatagtattggaagttctggccagggcaatcaggcaggagaaagaaatacagggtattcaattaggaaaagaggaagtcaaattgtccctgtttgcagatgacatgattgtatacttagaaaaccccattgtctcagcccaaaacctccttaagctgataagcaacttcagcaaagtctcaggatacaaaatcaatctgcaaaaatcacaagcattcttatacaccaataacagacaaacagagagtcaaatcatgagtgaactcccattcacaactgcttcaaagagaataaaatacctaggaatccaacttacaagggatgtgaaggacctcttcaaggagaactacaaaccactgctcaatgaaataaaagaggacacaaacaaatggaggaacattccatgctcatgggtaggaagaatcaatatcgtgaaaatggccatactgcccaaggtaacttatagattcaatgccatccccatcaagctaccaatgactttcttcacagaattggaaaaaactattttaaagttcagatggaaccaaaaaagagcccacattgccaagacaatcctaagtcaaaagaacaaagctggaggcatcagactacctgacttcaaactattttacaaggctacagtaacaaaaacagcacggtactggtacgaaaacagagatatagaccaatggaacagaacagagcccctggaaataatgccacacatctacaaccatctgatctttgacaaacctgacaaaaacaagcaatggggaaaggattccctatttaataaatggtgctgggaaaactggctagccatatgtagaaagctgaaactggaccccttccttacatcttatacaaaaattaattcaagatggattgaagacttaaatgttagacctaaaaccatagaaaccctagaagaaaacctaggcaataccattcaggacataggcatgggcgaagactttatgactgaaacaccaaaagcaatggcaacaaaagcccaaattgacaaatgggatctaattaaactaaagagcttgtgcactgcaaaagaaactaccatcagagtgaacaggcaacctacagaatgggagaaactttttatagtctacccatctgacaaaggcctaatatccagaatctacaaagaacttaaacaaatttacaagaaaaaatcaaaccaccccatcgaaaagtag

SEQ ID NO: 6840 - DNA, 1518 bp, Homo sapiens
  SIMILAR (181)..(1503): 811254mologous to Homo sapiens putative p150,accession number U93569,Smith-Waterman Score=1787.
atggtcagggaaggcttccctgaggaagtgacatttgagctgaagaatgagttagaaattagcaagggacagcaaatgggcaaaaacattccagacactggagcatctagcgcaaaggctctaggagagagagagctgggtaccttggataaaatgaaaaacagcccaagtgatggaagcaaaaaggatattcgaacccatcgcaaggaagctaaaaaccttgaaaaaagattagacgaatggctaactagaataaacagtgtagagaagaccttaaatgacctgatgcagctgaaaaccatggcacgagaacttcatgatgcatgcacaagcttcaatagccaattcgatcaagtggaagaaaggatcaacaaaatagatgtacggctagcaagactaataaagaagaaaagagagaagaatcaaatagatgcaataaaaaatgataaaggggatatcagcaccgatcccacagaaatacaaactaccatcagagaatactataaacacctctacgcaaataaactagaaaatctagaagaaatggataaattcctggacacatacaccctcccaagactaaaccaggaagaatttgaatctctgaatagaccaataataggctctgaaattgaggcagtaagtaatagcctaccaaccaaaaaaagtccaggaccagatggattcacagctgaattctaccagaggtacaaagaggagctggtaccattccttctgaaactattccaatcaatagaaaaagagggaatcctccctaacgcattttatgaggccagcatcatcctgataccaaagcctggcagagacacaacaaaaaaagagaatttcagaccagtatccctgatgaacattgatgcaaaaatcctcaataaaatactggcaaaccgaatccagcagcacatcaaaaagtttatccaccatgatcaagtcagcttcatccctaggatgcaaggctggttcaacatatgcaaatcaataaacataatccatcacataaacagaactaatgacaaaaaccacatgattatctcaatagatgcagaaaaggccttcgacagaattcaacagcccttcatgctaaacactctcaataaactaggtattgatggaatgtatctcaaaataataagaactatttatgacaaacccacagccaatatcatactgaatgggcaaaaactggaagcattccctttgaaaaccggcacaagacaaggatgccctctgtcaccactcctgttcaacatagtgttggaagttctgaccagggcagtcaggcaagagaaagaaataaagggtattcaattagaaaatgaggaagtcaaattgtctctgtttgcagatgacatgattgtatatttagaaaaccccatcgtctcagcccaaaatctccttaaactgataagcaaattcaggaaagtctcaggatacaaaatcaatgtgcaaaaatcacaagcattcctatactccattaacagacagagagccaaatcatga

SEQ ID NO: 6841 - DNA, 1431 bp, Homo sapiens
  SIMILAR (1)..(1080): 911254mologous to Homo sapiens putative p150,accession number U93569,Smith-Waterman Score=1694.
atgttctttgaaaccaatgagaacaaagacacaacataccagaatctctggggcacctttaaagcagtgtgtagagggaaatttatagcactaaatgcccacaaaagaaagcaggaaagatctaaaatcgacaccctaacatcacaattaaaagaactagagaagcaagagcaaacacattcaaaagctagcagaaggcaggaaataactaagatcaaagcagaactgaagaagatagagacacaaaaaacccttcaaaaaatcaatgaatccaggagctggttttttgaaaagatcaacaaaattgatagactactagcaagactaataaagaagaaaagagagaagaatcaaatagatgcaataaaaaatgttaaaggggatatcaccacctatcccacagaaatacaaactaacatcagagaatactataaacacctctatgcaaataaactagaaaacctagaagaaatggataaattcctggacacatacaccctcccaagactaaaccaggaagaagttcaatctctgaatagaccaataacaggagctgaaattgaggcaataattaatagcttaccaaccaaaaaaagtccaggaccagatggattcacagctgaattctaccagaggtacaaagaggagctgctaccatcccttctgaaactattccaatcaatagaaatagagggaatcctccctaactcattttatgaggccagcagcatcatgataccaaagcctggcagagacacaacaaaaaaagagaattttagaccaatatccctgatgaacattgatgcaaaaatcctcaataaaatactggcaaaccgaatccagcaacacatcaaaaagctaatccaccatgatgaggtgggcttcatccctgggatgcaaggctggttcaacatacgcaaatcaataaatgtaatccagcatataaacagaaccaacgacaaaaaccatatgattatctcaatagatgaagaaaaggcctttgacaaaattcaacagcacttcatactaaaaactctcaataaattaagtattgatgggacgtatctgaaaatagtaagagagaataaatacctaggaatccaacttacaagggatgtgaaggacctcttcaaggagaactacaagccactgctcaacgaaataaaagaggatacaaacaaatggaagaacattccatgctcatgggaaggaagaatcaatatcgtgaaaatggccatactgcccaaggtgattttcactactgtcaatgtgagatccactggtgttgaccttatcctgaagtctatcatggttactgtccagcgaacttgctcactgccatcccacgcagaaagggcttccaggaaacagctgctctatgaggtaaagtttattgccctcattttacagaaggagacactcaggttctga

SEQ ID NO: 6842 - DNA, 1923 bp, Homo sapiens
  SIMILAR (745)..(1914): 571254mologous to Mus musculus reverse transcriptase,accession number D84391,Smith-Waterman Score=1138.
atggaacaaagctggacagagaatgactttgacaagttgagaaaagaaggcttcagacgatcaaactactccaagctaaaggaggaagttcaaacccatggcaaagaagttaaaaaccttaaaaacaaattagacaaatggctaactagaattaccagtgcagagaagtccttaaaggacctgatggagctgaaaaccatggcacgagaactacgtgacgaatgcacaagcctcagcagccaattcagtcaactggaagaaagggtatcagggatggaagatcaaacgaatgaaacgaaagacacacataggctcaaaataaaaggatggaggaagatctaccaagcaaatggaaaacaaaaaaaggcagaggcagcaatcctagtcttggataaaacagattttaaaccaacaaagatcaaaggagacaaacaaggccattacataatggtaaaaggatcaattcaacaaggacagctaactatcctaaatatatatgcacccaacacaggagcatccagattgataaagcaagtccttagagacctacaaagggacttagactcccacacaataataatgggagactttaacacccgactgtcaacattagacagatcaacaagacagagacttaacaaggatatccaggaattgaactcagctctgcaccaagtggacctaatagacatctacagaattctccacaccaaatcaacagaatatacattcttttcagcaccacaccacacctattccaaaattgaccacacagttggaagtaaagcactcctcagcaaaggtaaaagaacagaaattataacaaaccgtctctcagaccacagtgcaatcaaactagaactcaggattaaggaactcactcaaaaccgctcaactacatggaaactgaacaacctgctcctgaatgactactggaatctctgggacacattcaaagcagtgtgtagagggaaatttatagcactaaatatccagaagagaaagcaggaaaggtctaaaattgacaccctaacatcacaattcaaagaactagagaagcaagagcaaacacattcaaaagctagcagaaggcaagaaataactaagatcagagcagaactgaaggaaagggagacacaaaaatcccttcaaaaaatcagtgaatccaggagctggttttttgaaaagatcaacaacattgatacaccgctagcaagactaataaagaagaaaagagagaagaatcaaatagacacaataaaaaatgataaaggggatatcaccactgatcccacagaaatacaaactaccatcagacaatactataaacacctctatgcaaataaacaagaaaatctagaagaaatgaataaattcctggacacatacaccctcccaagactaaactgggaagaagctgaatctctgaatagaccaataacaggctctgaatttgaggcaataattaacagcttaccaatcaaaaaaagtccaggaccagatggattcacagccaaattctaccagagctacaaggaggagctggtaccattccttctgaaactattccaatccatagaaaaagagggaatcctccctaactcattctatgaggccagcatcatcctgataccaaagcctggcagagacacaacaaaaaaagataattttagaccaatatccctgatgaacatcgatgcaaaaatcctcaataaaatactggcaaacaaaatccagcagcacagcaaaaagcttatccaccataaccaagtgggcttcatccctgggatgcaaggctggttcaacacatgcaaatcaataaatataatccagcatataaacagaaccaaagacaaaaaccacatgattatctcaatagatgcagaaaaggcctttgacaaaattcaacaaccttcatgctaa

SEQ ID NO: 6843 - DNA, 1797 bp, Homo sapiens; identical to SEQ ID NO: 6267
  SIMILAR (187)..(1422): 591254mologous to Homo sapiens putative p150,accession number U93563,Smith-Waterman Score=1135.

SEQ ID NO: 6844 - DNA, 1931 bp, Homo sapiens
  SIMILAR (2)..(487): 931254mologous to Homo sapiens putative p150,accession number U93570,Smith-Waterman Score=784.
tgcacccaatacaggagcacccagattcataaagcaagtcctgagtgacctacaaagagacttagactcccacacaataataatgggagactttaacaccccactgtcaacattagacagatcaatgagacagaaagttaacaaggatatccaggaattgaactcagctctgcaccaagcggacctaatagacatctacagaactctccaccccaaatcaacagaatatacattcttttcagcaacacaccacacctattccaaaattgaccacatagttggaagtaaagctctcctcagcaaatgtaaaagaacagaaattataacaaactgtctctcagaccacagtgcaatcaaactagaactcaggattaagaaactcactgaaaaccgctcaactacatggaaactgaacaacctgctcctgaatgactactgggtacataacgaaatgaaggcagaaataaagatggtctttgaaaccaatgacactctcccaagactaaaccaggaagaagttgaatctctgaatagaccaaaaacaggctctgaaattgaggcaataattaatagcctaccaaccaaaaaaagtccaggaccagatggattcacagctgaattctaccagaggtacaaggaggagctggtaccattccttctgaaactattccaatcaatagaaaaagagagaatcctccctaactcattttatgaggccagcatcatcctgataccaaagcctggcagagacacaacaaaaaaaaagagaattttagaccaatatccctgatgaacattgatgcaaaaatcctcaataaaatactggcaaaccgaatccagcagcacatcaaaaagcttatccaccatgatcaactgggcttcatccctggtatgcaaggctggttcaacatatgcaaatcaatgaacgtaatccagcatataaacagtcccaaagacaaaaaccacatgattatctcagtagatgcagaaaaggcctttgacaaaattcaacagcccttcatgctaaaaactctcaataaattaggtattgatgggacttatctcaaaataataagagctatctatgacaaacccacagccagtatcatactgaatggacaaaaactggaagcattcactttgaaaactggcacaagacagggatgccctctctcaccactcctattcaacatagtgttggaagttctggccagggcaatcaggcaggagaaggaaataaagggcattcaattaggaaaagaggaagtcaagttgtccttgtttgcagatgacatgattgtatatctagaaaaccccatcatctcagcccaaaatctccttaagctgataggcaacttcagcaaagtctcaggatacacaatcaatgtgcaaaaatcacaagcattcttatacaccaataacagacaaacagagagccaaatcatgagtgaactcccattcacaattgcttcaaagagaataaaatacctaggaatccagcttacaagggatgtgaaggacttcttcaaagagaactacaaaccactgctcaatgaaataaaagaggataaaaacaaatggaagaacattccatgctcatgggtaggaagaatcaatattgtgaaaatggccatacctcccaaggtaatttatagattcaatgccatccccatcaagctaccaatgactttctttggcatgatctttctatcccagaaatatggccatgtcactctgctgtttagactccttcagtggctcctcaacgttgccaggaacaacaacaaagtattttacaagatctataaagttggtcataaactgtcttctgcttatgtcctgtgtcttacctgttcacacttttctgtaagcttcctttagtccacctatgcttgctttcttcctggtctttacattcttttctctggcta

SEQ ID NO: 6845 - DNA, 1506 bp, Homo sapiens
  SIMILAR (1177)..(1485): 921254mologous to Homo sapiens NAG13,accession number AF194537,Smith-Waterman Score=478.
atgagttgggagatggagcaagacgaagtgtacaaagaaatgagcataaatcataaaaatgagggaactagggttgaaaaacccaacaggtaccggattattcacatccaacctgatgcaattaaccacgtctcaagaaaaaaggacgttccgtccgcctcgggcgccggccacagcagaagcagcaccggcagcaggcccggggtccgccgcctgtggcccctgctcctccgctctgcgccctcggggccactgaacaacgctgtccccgccccaggcaagggacccgggcgatggggcggcagccccagcctctcccggagcggcggaaaggcaagcacgagggtcgcacccggcctgtctgcacacagtcaagccgcaagcggggtcccagaaccagctgaaccccaacaccaacggacgaaggccagtgggtctcggcggcgaagcctgcgggttgttccagaagccccgaagcccagaacgaggacggcgcgggaagggaaaggcgcaggcgcgggacacactggaggggcccaggagcagagacggcgcaggcgctgggcctgccggggtctgcggggacgcccgggcgcggtcagcccgggcggcgctgaggcgataaaccaactcgccagcgaacactgcgggaacccggctgctgctcttcatcgctgcatcgcatcgctccctcgcaatctcctggtttgggctgggcgaatgctgatgcctaagaaaaaccggattgccatttatgaactcctttttaaagaggaagtcacggtggtcaagaaggatgtccacatgcctaagcacctggagttggcagacaagaattcccgaggctactacgtgaaggaacagtttgcctggagacatgtctactggtaccttaccaatgaggatatccagtatctccgtgattaccttcatctgcccctggagattgtgcctgccaccctacgccgcagccgtccagggactggcaggcctcggtctaaaggtctggaggctttccctgtcctcttctccaacggcatctgtgactcccaccacccgaagccgaataagagaagaaaggaaagaccctctctcagcattggccagagaatatggaggatcaaagaggaacgccttgctgaagtggtgtcagaagaaaacagaaggctatcaggaagtagaccaataacaggctctgaaattgaggcaataattaatagcttaccaaccaaaaaaagtccaagaccagatggattcacggccgaattctaccagaggtacaaggaggagctggtaccattcattccgaaattattccaatcaatagaaaaagagggaatactccctaactcgttttatgaggccagcatcatcctgataccaaagcctggcagagacacaacaaaaaaagagaattttagatcaatatccctgatgaacattgatgcaaaaatcctcaataaaatactggcaaacgaaatccagctgctgctggatccaccatga

SEQ ID NO: 6846 - DNA, 6637 bp, Homo sapiens
  SIMILAR (946)..(2808): 951254mologous to Homo sapiens zinc finger protein ZFP- 95,accession number AF170025,Smith-Waterman Score=3218.
atgactcctgaatcaagggatactacagatttgtctccagggggtacccaggagatggaaggcatcgtgatagtgaaggtggaggaggaagatgaagaagaccattttcaaaaggaaagaaacaaagtagagtcatcgccacaagttctcagtcgctctacaactatgaatgagagagccttattgtcatcgtatttagttgcatatagagtggcaaaagagaaaatggctcacacagcggctgaaaaaattatccttccagcatgtatggacatggtacggacaatttttgatgacaaatcagctgataaactaagaactatacctcttagtgataatacaatatctcgtcgaatctgtacgattgcaaaacatttggaagcaatgcttattacacggctgcagtccggtatagactttgcaatccaactcgatgagagcactgatattgcaagttgtcccacactcttggtttatgtcagatatatcccgctgaaattacgcttaggaggacttcttcaaccagaaaaacccattgttctaaaggttgagtcaagggatgggaccattcagtacaactctcaacagcacataaatctttcagcagcttggctgaagactgctgtgcagggcagggaagctccaggcaaacagcccagcaaacagcagcactcagctaaaaggaagactcacagaacacagttgaagaaggaaagtggcgatggacctcatcccaaatttggcggtggaaacctggcttctcctggctgtcagcctggtgctcctctatctagatacttcacgtacagaggcagtgaactgactgctttctggttgaccaccttgaaaaagatgagtgtgcctggcactgtgcttctcagatatgggacccgtacacatggactttttaagagactgggaattccagggcccacacctctgcctttgttgggaaatgttttgtcctatcgtcagaagttggtgaaaattgaagaggtggctgatgtggctgtatccttcatcctggaggaatgggggcatttggaccagtcccagaagtccctttatagggatgacaggaaggagaactatgggagtattacttccatgggttatgagtccagggacaatatggagctcatagtgaagcagatttctgatgactctgaatcacactgggtggcgccagaacacaccgaaaggagcgttcctcaggatccagactttgcagaagtcagtgaccttaaaggcatggtacaaaggtggcaggtcaaccccactgtggggaaatcaaggcagaatccttcccagaaaagggatctggatgcaatcacagacatcagccctaagcaaagcacacatggcgagagagggcacagatgcagcgattgtggcaaattcttcctccaagcctcaaactttattcagcatcggcgcatccacactggagaaaaaccgtttaagtgcggagaatgtgggaagagctacaatcagcgggtgcacctcacccagcaccagcgcgtccacacaggggagaaaccctacaaatgtcaggtgtgcggaaaggctttccgggtgagttcccacctggttcagcaccacagtgtccacagcggagagaggccctatggctgcaatgagtgtgggaagaacttcggtcgccattcgcatctgatcgaacacctaaaacgccacttcagggagaaatcccagagatgcagtgacaaaagaagtaagaacacaaaattaagtgttaagaagaaaatttcagaatattcagaagcagacatggaactatctggaaaaacccaaagaaatgtttctcaagttcaagattttggagaaggctgtgagtttcaaggcaagctggatagaaagcagggaattcccatgaaagagatactaggacaaccatcttcaaagaggatgaactacagtgaagtcccatatgtccacaaaaaatcctccactggagagagaccacataaatgtaacgagtgtgggaaaagcttcattcagagtgcacatcttattcaacatcaaagaatacacactggggagaaaccattcaggtgtgaggaatgtgggaaaagctacaaccaacgcgtgcacctaactcagcatcagcgcgtccacacaggtgagaagccctacacctgtcccttatgtgggaaagccttcagagtgaggtcccaccttgttcagcatcagagcgtgcacagtggggagagacccttcaagtgtaacgaatgtgggaaaggctttgggaggcgttcccacctggctggacatcttcgactccactcccgagagaaatcccatcagtgtcgtgaatgtggggaaatcttttttcagtacgttagcctaattgaacatcaggtgctccacatgggtcagaaaaatgaaaaaaatggcatctgtgaggaagcatatagttggaacttgacagtgattgaagacaagaagattgagttacaagagcagccttatcagtgtgatatctgtggaaaagcctttggttatagctcagacctcattcagcattacagaactcatacagcagagaagccctatcaatgtgatatatgtagagaaaatgttggccagtgttcccacaccaaacaacatcaaaaaatctactccagcacaaaatcccatcaatgtcatgaatgtggcagaggcttcactctgaagtcacatcttaatcaacatcagagaatccatactgatcgcgactgtggccgaggcaggggcaccagcaaccagtggcgctcagtgaagggcaggctgggtctgttccgccatttgccggaccggggtggccgagccgaggacctggaggagaagcgccctgcgccctcgacatctctgaatagcttccttcaactgccagtgaaagatagcaggcctgatttcattggacgcaactgttttcagccccaattagagggtctctggaaatttgacacagagtgctataaaaagtatggaaaaatgtggggaacgtatgaaggtcaactccctgtgctggccatcacagatcccgacgtgatcagaacagtgctagtgaaagaatgttattctgtcttcacaaatcgaaggatgttccccatcattgcccagtatggagatgtattggtgagaaacttgaggcgggaagcagagaaaggcaagcctgtcaccttgaaagacatctttggggcctacagcatggatgtgattactggcacatcatttggagtgaacatcgactctctcaacaatccacaagacccctttgtggagagcactaagaagttcctaaaatttggtttcttagatccattatttctctcaataatactctttccattccttaccccagtttttgaagcattaaatgtctctctgtttccaaaagataccataaattttttaagtaaatctgtaaacagaatgaagaaaagtcgcctcaacgacaaacaaaagaggccagccgaaggatgtctgcaggtcagggagacaggaccaggtaacccagctgtcactgaagattatatagagtttgagaatgttggaatatttgaaaatgctcccccaaaaaagctgctgatgagttctggaaatgtcaggagattaatctatacggacactgctgaagaaaaagctctgtctgatctggagctcgcagcccagtcaataatcttcatttttgctggctatgaaaccaccagcagtgttctttccttcactttatatgaactggccactcaccctgatgtccagcagaaactgcaaaaggagattgatgcagttttgcccaataaggaacgcagctccgcaccagcaacggaaagctggatggagaatgactttgacgagttgagagaagaaggcttcagacgatcaaactactccgagctaaaggaggaagttcgaacccatggcaaagaagttaaaaaccttgaaaaaagattagacaaatggctaactagaataatcaatgcagagaagtccttaaaggacctgatggagctgaagaccatggcacgagaactacgtgatgaatgcacaagcctcagtagccaattcaatcaactggaagaaagggtatcagtgatggaagatcaaatgaatgaaatgaagaaagaagagaagtttagaagaaaaagaataaaaagaaaggaacaaagcctccaagaaatatgggactatgtgaaaagaccaaatctacgtctgattggtgtacctgaaagtgacggggagaatagaacgaagttggaaaacactctgcaggatattatccaggagaacttccccaatctagcaaggcaggccaacattcaaattcaggaaatacagagaacgccacaaagatactcctcgagaagagcaactccaagacacataattgtcagattcaccaaagttgaaatgaaggaaaaaatgttaagggcagccagagagaaagaaatacaaactaccatcagagaatactataaacacctctatgcaaataaactagaaaatctagaagaaatggataaattcctcgacacatacactctcccaagactaaaccaggaagaagttgaaactctgaatagaccaataacaggttctgaaattgaggcaataattaatagcttaccaaccaaaaaaagtccaggaccagatggattcaccgccgaattctaccagaggtacaaggaggacctggtaccattctttctgaaactattccaatcaatagaaaaagagggaatcctccctaactcattttatgaggccagcatcatcctgataccaaagcctggcagagacacaaccaaaaaagagaattttagaccaatatccctgatgaacagtgatacaaaaatcctcaataaaatactggcaaaccgaatccagcagcacatcaaaaagcttatccaccatgatcaagtgggcttcatccctgggatgcaaggctggttcaacatacgcaaatcaataaacataatccagcatataaacagaaccaacgacaaaacccacatgattatctcaatagatgcagaaaaggcctttaacaaaattcaacagcccttcatgctaaaaactctgaataaattagtgttggaagttctggccagggcaatcaggcaagagaaagaaataaagggtattcaattaggaaaagaggaagtcaaattgtccctgtttgcagatgacatgattgtatatctagaaaaccccatcgtctcagcccaaaatctccttaagctgataaacaacttcagcaaagtatcaggatacaaaatcaatgtgcaaaaatcacaaatattcttatacaccaataacagacaaacagagagccaaatcatgagtgaactcccattcacaattgcttcaaagacaataaaatacctaggaattcaacttacaagggatgtgaaggacctcttcaaggagaattacaaaccactgctcaatgaaataaaagaagatacaaacaaatggaacaacattccatgctcatgggtaggaagaatcaatatcatgaaaatggccatactgcccaaggtaatttatagattcagtgccatcgccatcaagctaccaatgactttcttcacagaactggaaaaaactactttaaagttcatatggaaccaaaaaagagcccgcattgccaagtcaatcctaagccaaaagaacaaagccggaggcatcatgctacctgacttcaaactatactacaaggctacagtaaccaaaacagcatggtactggtaccaaaacagagatattgatcaatggagcagaacagagccctcagaagtaatgccacacatctacaactatctgatctttgataaacttgacaaaaacaagaaatggggaaaggattccctatttaataagtggtgctgggaaaattggctagccatatgtagaaagctgaaactggatcccttccttacaccttatacaaaaattaattcaagatggattaagtacttaaatgttagacctaaaaccagaaaaaccctagaagaaaacctaggcaataccattcaggacataggcatgggcaaggacttcatgtctgaaacaccaaaagcaatggcaacaaaagccaaaattgacaaatgggatctaattaaactaaagagcttctgcacagcaaaagaaactatcatcagagtgaacaggcaacctacagaatgggagaaaatttttgcaacctactcatctgacaaagggctaatatccagaatctacaatgaactccaacaaatttataagaaaaaaacaaacaaccccatcaaaaagtgggccaaggatatgaacagacacttcttaaaagaagacacttatgcagccaaaaaacacgtggaaaaaacgctcatcatcactggccatcagagaaatgcaaatcaaatccacaatgagataccatctcacaccagttagaatggtgatcattaaaaagtcaggaaatgacaggtgctggagaggatatggagaaataggaacacttttacactgttggtgggactgtcaactagttcaaccattgtggaagtcagtgtggcgattcctcagggatctagaactagaaataccatttgacctagcaatcccattactggatatatacccaaagcattaa

SEQ ID NO: 6847 - DNA, 3045 bp, Homo sapiens
  SIMILAR (832)..(2844): 941254mologous to Homo sapiens putative p150,accession number U93569,Smith-Waterman Score=3249.
atggggaaaaaacagagcagaaaaactggaaactctaaaaatcagagcgcctctcctcctccaaaggaacgcagctcctcaccagcaatggaacaaagctggatggagaatgactttgatgacttgagagaagaaggcttcagacaatcaaactactctgagctaaaggaggaagttcgaacccatggcaaagaagttaaaaaccttgaaaaaaaattagacgaatggctaactagaataaccaatgcagagaagtccttaaaggacctgatggagctgaaaaccacagcccgagaactacatgatgaatgcacaagcctcaaaagggtatcagtgacggaagatcaaatgaatgaaatgaagcgagaagagaagtttagagaaaaaagaataaaaagaaatgaacaaagcctccaagaaatatgggactatgtgaaaagaccaaatctacacctgattggtgtacctgaaagtgacagggagaatggaaccaagttggaaaacactctgcaggatattatccaagagaacttccccaatctagtaaggcaggccaacattcaaattcaggaaatacagagaacgccacaaagatactcctcgagaagagcaactccaagacacataattgtcagattcaccaaagttgaaatgaaggaaaaaatgttaagggcagccagagagaaaggtcgggttacccacaaagggaagcccatcagactaacagctgatctcttggcagaaactctacaagccagaagagagtgggggccaatattcaacattcttaaagaaaagaattttcaacccagaatttcatatccagccaaactaagcttcatagacagatcaacgagacagaaagttaacaaggatacccaggaattgaactcagctctgcaccaagcggacctaatagacatctacagaactctccaccccaaatcaacagaatatacattcttttcagcaccacaccacacctattccaaaattgaccacatagttggaagtaaagcactcctcagcaaatgtaaaagaacagaaattataacaaactgtctctcagaccacagcgcaatcaaactagaactcaggattaagaaactcactcgaaaccactcaactacatggaaactgaacaacctgcttctgaatgactactgggtacataatgaaatgaaggcagaaataaagatgttctttgaaaccaacgagaacaaagacaaaacataccagaatctctgggacacattcaaaacagtgtgtagagggaaatttatagcactaaatgcccacaagagaaagcaggaaagatctaaaattgacaccctaacatcacaattaaaaggacttgagaagcaagagcaaacacattcaaaagctagcagaaggcaagaaataactaagatcagagcagaactgaaggaaatagagacacaaaaaacccttcaaaaaatcaacgaatccaggagctggttttttgaaaagatcaacaaaattgatagaccgctagcaagactaataaagaataaaagagaggagaatcaaatagacgcaataaaaaatgataaaggggatatcaccactgatcccacagaaatacaaactgccatcagcgaatactataaacacctctacgcaaataaactggaaaatctagaagaaatggataaattcctcgacacctacaccctcccaagactaaaccaggaagaagttgaatctctgaatagaccaataacaggctctgaaattgaggcaataattaatagcttaccaaccaaaaaaagtccaggaccagatggattcatggccgaattctaccagagggacaaggaggagctggtaccattccttctgaaactgttccaatcaatagaaaaagagggaatcctccctaactcattttatgaggccagcatcatgctgataccaaagcctggcagagacacaacaaaaaaagagaattttagaccaatatccctgatgaacatcgatgcaaaaatcctcaataaaatactggcaaaccgaatccagcagcacatcaaaaagcttatccaccatgatcaagtgggcttcatccctgggatgcaaggctggttcaacttacgcaaatcactaaacgtaatccagcatataaacagaaccaatgacaaaaaccacatgattatctcaatagatgcagaaaaggcctttgacaaaattcaacagcccttcatgctaaaaactctcaataaattaggtattgatgggatgtatctcaaaataataagagctatctatgacagacccacagccaatatcatactgaatgggcaaaaactggaagcattccctttgaaaactggcacaagacagggatgccctctctcaccactcctattcaatatagtgttggaagttctggccagggcaatcaggcaggagaaggaaataaagggtattcaattaggaaaagaggaagtcaaattgtccctgtttgcagatgacatgactgtatatttagaaaacgccatcgtctcagccccaaatctccttaagctgataggcaacttcagcaaagtctcaggatacaaaatcaatgtgcaaaaatcacaagcattcttatacactaataacagacaaacagagagccaaatcatgagtgaactcccattcagaattgcttcaaagagaataaaatacctaggaatccaacttacaagggatgtgaaggacctcttcaagcagaactacaaaccactgctcaatgaaataaaagaggatacaaacaaatggaagaacattccatgctcatgggtaggaagaatcaatatcgtgaaaatggccatactgcccaaggggacccagaggccctatgccaaggttagagttcaactgaacagtggagaggaattgcacttcttaggccttttagataccagtacacaggtgactgtgatccccacaaacccttgcatcaagatgaggagaaaacagatcgtgttctctgactttgggctcctactaacctccgttgtcatggcccccactactgaatga

SEQ ID NO: 6848 - DNA, 2764 bp, Homo sapiens
  SIMILAR (1397)..(2692): 931254mologous to Homo sapiens putative p150,accession number U93564,Smith-Waterman Score=2183.
atggcacgagaactacatgacaaatgcacaagcttcagtagccgattcgatcaactggaagaaagtttatcagcgatggaagatcaaatgaatgaaatgatgcgagaagagaagtttagagaaaaaagaagaaaaagaaatgaacaaagcctccaagaaatatgggactatgtgaaaagaccaaatctacatctgattggtgtacctgaaagtgacagggagaatggacccaagttggaaaacactctgcaggatattatccaggagaacttccccaatctagcaaggcagggcaacattcaaattcaggaaatacagagaatgccacaaagatactcctcgagaagagcaactccaagacacataattgtcagattcaccaaagttgaaatgaaggaaaaaatgttaagggcagccagagagaaagaaatacaaactaccatcagagaatactataaacacttctatgcaaatgaacttgaaaatctagaagaaatggataaattctttgaaacatacaccctcccaagactaaaccaggaagaagttgaatctctgaatagaccaataacaggctctgcaattgaggcaataattaatagcttaccaaccaaaaaaagtccaggaccagatggattcacagccgaattctaccagaggtacaaggaggagctggtaccattccttctgaaactattccaatcaatagaaaaagagggaatcctccctaactcatttcatgaggccagcatcatcctgataccaaagcctggcagagacacaacaaaaaaagagaattttataccaatatccctgatgaacatcgatgcaaaaatcctcaataaaatactggcaaacagaatccagcagcaccatcaaaaagcttatccaccatgatcaagtgagcttcatccctggggatgcaaggctcctttcaatatacacaaatcaataaatgtaatccagcatataaacgggaaccaaagacaaaaaccacatggttatcttcaataggatgcaggaaaagggccttttgacaaaattcaacagcccttcatgctaaaaactctcaataaattagttattgatgggacatatctcaaaataataagagctatctatgacaaacccacagccaatatcatactgaatgggcaaaaactggaagcattccctttgaaaactggcacaagacagggatgccctctctcaccactcctattcaacatagtgttggaagttctggccagggcaatcaggcaggagaaggaaataaagggtattcaattaggaaatgaggaagtcaatttgtccctgtttgcagatgacaagattgtatatctagaaaaccccattgtctcagcccaaaatctccttaagctgataagcaacttcagcaaagtctcaggatacaaaaatcaatgtgcaaaattcacaagcattcttatacaccaataacagacaaacagagagtcaaatcatgagtgaactcccattcacaattgcttcaaagagaataaaatacctaggaatccaacttacaagggatgtgaaggacctcttcaaggagaactacataccactgctgaatgaaataaaggaggatacaaagaaatggaagaatattccatggtcctgggtaggaagaatcaatatcatgaaaatggccatactgcccaaggtaatttatagattcaatgccatccccatcaagctaccaatgactttcttcacagaattggaaaaaagtactttaaagttcatatggaaccaaaaaagagcccgcatcgccaagtcaatcctaagccaaaagaacaaagctggaggcatcacactacctgacttcaaactatactacaaggctacagtaaccaaaacagcatggtactggtaccaaaacagagatatagatcaatggaacagaacagagccctcagaaataacgctgcatgtctacaactatctgatctttgacaaacctgacaaaaacaagcaatggggaaaggattccctatttaataaatggtactgggaaaactggctagctatatgtagaaagctgaaactggatcccttccttacaccttatacaaaaattaattcaagatggcttaaagacttaaatgttagacctaaaaccataaaaaccctagaagaaaacctaggcattaccattcaggacataggcatgggcaaggacttcatgtctaaaacaccaaaagcaatggcaacaaaagccaaaattgacaaatgggatctaattaaactaaagagcttctgcacagcaaaagaaactaccatcagagtgaacaggcaacctacaatatgggagaaaattttcgcaacctactcatctgacaaagggctaatatccagaatctacaatgaactcaaacaaatttacaagaaaaaatcaaacaaccccatcaaaaagtgggtgaaggatatgaacagacacttctcaaaagaagacatttatgcagctaaaaaacacatgaaaaaatgctcatcatcactggccatcagagaaatgcaaatcaaaaccacaatgagataccatctcacaccagttagaatggcgatcattaaaaagtcaggaaacgacaggtgctgtagaggatgtggagaaataggaacacttttacactgttggtgggactgtaaactagttcaaccattgtggaagtcgctgtgccaagcaggatctagaatattctttgtcagtgaagtagaagctgttgaagtaacttctgcaataggacag

SEQ ID NO: 6849 - DNA, 3549 bp, Homo sapiens
  SIMILAR (145)..(1098): 881254mologous to Homo sapiens putative p150,accession number U93563,Smith-Waterman Score=1393.
atgcagctggagatccgagaatgcacagactgcctcctcaagtggcctccactgctgatactcaggcaaacagggtctggagtagacctccagcaaactccaacagacctgcagctgagggtcctgactgttagaaggaaaactaacaaacagaaaagacatccacaccaaaaccccatctgtacgtcaccatcatcaaagaccaaagaactagagaagcaagagcaaacacattcaaaagctagcagaaggcaagaaataactaagatcagagcagaactgaaggatatagagacacaaaaaacccttcaaaaaatccatgaatccaggagctggttttctgaaaagatcaacaaaattgatagaccgctagcaagactaataaagaagaaagagaagaatcaaatagatgcaatacaaaatgataaaggggatatcaccaccgatcccacagaaatacaaaccaccatcagagaatactataaacacctctatgcaaataaactagaaaatctagaagaaatggatacattcttcgacacatacaccctcccaagtctaaaccaggaagaagttgaatctctgaatagaccaacaacaggctctgaaattgaggcaataattaatagcttaccaaccaaaaaaagtccaggaccagatggattcacagccgaattctaccagaggtacaaggaggagctggtaccattccttctgaaactattccaatcaatagaaaaagagggaatcctccctaacacattttatgaggccagcatcatcctgatactaaagcctggcagagacacaacaaaaaaagagaattttagaccaatatccctgatgaacatcgacgcaaaaatcctcaataaaatactggcaaaacaaatccagcaacacatcaaaaagcttatcgaccatgatcaagtggacttcatccctgggatgcaaggctcgttcaatacatgcaaatcaataaacgtaatccagcatataaacagaatcaaagacaaaaaccacatgattatctcaatagatgcagaaaaggcctttgacaaaattcaacaagtcttcctgctaaaaactctcagtaaattagcctctgctagtgataccccagcaaacagggtccggggtggacctctagcagactccaacagatctgcagacagatcaacgagacagatggttaacaaggatatccaggacttgaactcagctctgcaccaagcagacctaatagacatctacagaactctccatcccaaatcaacagaatatacattcttctcagcaccacatcatacttattccaaaattgaccacatagttggaagtaaggcactcctcagcaaatgtaaaagaacagaaatcacaacaaactgtctctcagacaacagtgcaatcaaattagaacccaggattaagaaactcattcaaaaccgcacaactacatggaaactgaacaacctgctcctgaatgactactgggtaaataatgaagtgaaggcagaaataaagatgttctttgaaactaatgagaacaaagacacaacataccagaatctctgggacacattcaaagcagtgtgtagagggaaatttatagcactaaatgcccacaagagaaagcaggaaagatctaaaattgacaccctaacatcacaattaaaagaactagagaagcaagagcaaacacattcaaaagctagcagaaggcaagaaataactaagatcagagcaggactgaaggaaatagagacacaaaaaaaccttcaaaaaatcaatgaatccaggagctggtttttgtgaaaagatcaaccaaatttgatagaccgctagcaagactaataaagaagaaaagagagaagaatcaaatagacacaataaaaaatgataaaggggagatcaccactgatcccacagaaatacaaactgccatcagagaatacctataaacaccctctacgcaaataaattagaatatcctagaagaaatgggataaattccctggacacatacactcttccaagactaaccccaggaagaagttgaatcccttcagtagactaataacaggctctgaaattgaggcaataattaatagcttaccaacccaaaaaaagtccaggaccagatggattcgacgagccgaattctaccagaggtacaaggaggagctggtatcattccttctgaaactattccaatcaatagaaaaagagggaatcctccctaactcattttatgaggccagcagcatcctgataccaaagcctggcagagacacaacaaaaaaaagagaattttagaccaatatccctgatgaacatcgatgcaaaaatcctcaataaaatactggcaaaccgaatccagcagcacatccaaaagcttatccaccatgatcaagtgggcttcatccctgggatgcaaggctggttcaacatacgaaaatcaataaatataatccagcatataaacagaaccaacgacaaaaaccatatgattatctcaatagatgaagaaaaggcctttgacaaaattcaacaacgcttcatgctaaaaactctcaatgaattaggtattgatgggacgtatctcaaaataataagagctatctatgacaaacccacagccaatatcatactgaatgggcaaaaactggaagcattccctttgaaaactggcacaagacagggatgccctctctcacctcaccactcctattcaacatagtgttggaagttctggccagggcaatcaggcaggagaaggaaataaagggcattcaattaggaaaagaggaagtcaaattgtccctatttgcagatgacatgattgtatatctagaaaaccccatcgtctcaccccaaaatcttcttaagctgataggcaacttcagcaaagtctcaggatacaaaatcaatgtgcaaaaatcacaagcattcttatacaccaataacagacaaacagagagccaaatcatgagtgaactcccattcacaattgcttcaaagagaataaaatacctaggaatccaacttacaagggatgtgaaggacctcttcaaggagaactacaaaccactgctcaaggaaataaaagaggatacaaacaaatggaagaacattccatgctcatgggtaggaagaatcaatatcgtgaaaatggccatactgcccaagctaatttatggattcaatgccatccccatcaagctaccaatgactttcttcacagaattggaaaaaactactttaaaattcatatggaaccaaaaaagagcccccattgccaagacaatcccatgccaaaagaacaaagctggaggcatcaccctacctgacttcaaactatactacaaggctacagtaaccaaaacagcatggtactggtaccaaaacagagatatagaccaatggaacagaacagaagcctcagaaataatgccacatatctacaactatctgatctttgacaaacctgacaaaaacaagaaatggggaaggattccctatttaataaatggtgctgggaaaactggctag

SEQ ID NO: 6850 - DNA, 653 bp, Homo sapiens
  SIMILAR (651)..(163): 391254mologous to Homo sapiens ribosomal protein S10,accession number U14972,Smith-Waterman Score=201.
gcgccccttaaaacctttaattcttaaggacgggccccccccaaataggtcttttcttgcattcccccccagcttttatgagagctcaaccattctcactttggttgttgtggctgtaaagtttatttcaatgcaaaagaatctctctccaatttttactgaaggtggctgacaccgtccacgaccbaaatccgcctctaaactggaatttcgggttgcttgacccaagccccagcctcggctttcttgtcaggcaccaggtggcacaggyactcccgtcttgtaggtatctcttgtcagcttcccctcttgtgagtctcgcaggtcgctcaccctcccagacctttaggccgaggcctgccagtctctggacggctacggcgtaggtgtggcaggcacaatctccgggggcagatgaaggtaatcacggagatactgggataccctcattgggtaaggtaccagtagaaaatgtctccaggcaaacttgttcctttcacgtaggcctcggggactttgagagacttgcatgggcttcatgaccatgaaggttgggcacatttctgttctgccagctcggggtgcgtaggcatgtggacatcctttctgggcaccatgactccctcccttaaaaggagtttcataaagggaat

SEQ ID NO: 6851 - DNA, 629 bp, Homo sapiens
  SIMILAR (103)..(486): 921254mologous to Homo sapiens ribonucleotide reductase,accession number AB036063,Smith-Waterman Score=620.
gaatccccacgagctgggtgctgtcgtagttggaggtggcctgaggagctcagttccctcagcgcccgtatcttcggcggagtctgcgcgatgggcgacccggaaaggccggaagcggccgggctggatcaggatgaggtcgacttatcaaaggatctccctcactggaacaagcttaaagcagatgagaagtacttcatctctcacatcttagccttttttgcagccagtgatggaattgtaaatgaaaatttggtggagcgctttagtcaggaggtgcaggttccagaggctcgctgtttctatggctttcaaattctcatcgagaatgttcactcagagatgtacagtttgctgatagacacttacatcagagatcccaagaaaagggaatttttatttaatgcaattgaaaccatgccctatgttaagaaaaaagcagattgggccttgcgatggatagcagatagaaaatctacttttggtctcctgggtctgtggatctctcagggactcttggaccacactgaagaaccagtgatatagtgcgtatatgggccagcatgtagtataccagggatgaagcagatatgtttgcctccttgccttcagttcatttcaagaatgag

SEQ ID NO: 6852 - DNA, 400 bp, Homo sapiens
  SIMILAR (120)..(209): 731254mologous to Trypanosoma brucei possible (hhv-6) u1102, variant a dna, complete virion genome,accession number AL359782,Smith-Waterman Score=141.
aaagtataaagtgttttggaaaaaaaggaaaaaaatctatataaaaatctcttcacatataaaatcctgaagaaggtgcaaggtgagacccagtgcgaggggcgtgctcagatatgcagtgtgtgtgtgtgtgtgtgtgtgtgtgtatccgtgtgtacatgtgtgcacgtgtgtgcgtatgtgtctgtgtgtctgtgtgtgtgtgtgtgaagctcagtggagattcactgtgggggtcagggatgtgcacgctgcatttgcctccagccccaagaaggggggtgcactgagcaggctgtggctctgcactgtgccgcccagctctggaggaacaggcttaagctgatgaagcagcctgtggcccgggtctgatgggatctctgcaacaaccccgtgttgc

SEQ ID NO: 6853 - DNA, 741 bp, Homo sapiens
  SIMILAR (1)..(738): 461254mologous to Homo sapiens Neuroblastoma,accession number D89016,Smith-Waterman Score=516.
aagatggaaaggactgagatgattttctcaattaactcccagctggaatttaagaggaagccttttcctttaggctcctcttcccggcggttggtaaaaagaggtgaattgacagcctatgttgaagacactgtgcttttctcaagaaggacatccaaacagcaagtctacttctttctctttaacgatgtgctcattatcaccaagaagaagagtgaagaaagttacaacgtcaatgattattccttaagagatcagctattggtggaatcttgtgacaatgaagagcttaattcttctccagggaagaacagctccacaatgctctattcaagacagagctctgccagtcacctctttactctgacagtccttagtaaccacgcgaatgagaaagtggagatgctactaggagctgagacgcagagcgagcgagcccgctggataactgccctgggacacagcagcgggaagccgcctgcagaccgaacctcactgacccaggtggaaatcgttaggtcatttactgctaagcagccagatgaactctccctgcaggtggctgacgtcgtcctcatctatcaacgtgtcagcgatggctggtatgagggggaacgactacgagatggagaaagaggctggtttcctatggaatgtgccaaggagataacatgtcaagctacaattgataagaatgtggagagaatgggacgcttgctaggactggagaccaacgtgtag

SEQ ID NO: 6854 - DNA, 570 bp, Homo sapiens
  SIMILAR (16)..(366): 511254mologous to Homo sapiens Neuroblastoma,accession number D89016,Smith-Waterman Score=264.
atgcaagacaaagcccttcccattttttcctctcgtcttctcaagcagaaggaaggggtctcttttggagccccagctgtgcttgccagcactcacttggctgccacagctggtgtctcattggttcgactatgcaatgagggcgcccggaagatggaaaggactgagatgatgtacacaattaactcccagctggaatttaaaattaagccttttcctttagtctcctcttcccggtggttggtaaaaagaggtgaattgacagcctatgttgaagacactgtgcttttctcaagaaggacatccaaacagcaagtctacttctttctctttaacgatgtgctcattatcaccaagaagaagagtttcttacagctgctgtatcaaagtgccacaaacaaatgctactgggggggaatgtcagagccattaaattcctcagagggatttaatgcacgacagtctagaagaggatcttggagagtgtccccaaagaagaatgacttagaaatgtcacagaaggcattagaagatagagtttcaggattcacagttgctcagtgtcactag

SEQ ID NO: 6855 - DNA, 1416 bp, Homo sapiens
  SIMILAR (184)..(1404): 721254mologous to Mus musculus CYLN2,accession number AF289664,Smith-Waterman Score=1433.
atgatcgaaacagtcagctatgagtgtggggaagtggtaggttcctcgtactacgtgagcgactgtagcgtcagctacgggtcgaccgacgcacatcagtatagcgccgcgcgggtatggtgtgtgagtgtagtagacgaggagaggtgggagagtacctggaggcgatgcagactcttggtaatagggtcgctggagagcaagtgtaagtcaggcgagaagaaggtggacgccctcctgaaggagaagcggcgcctggaggcagagctggagaccgtgtcccggaagacccatgacgcctcgggccagctagtcctcatcagccaggagctgctgcggaaggagcgacaaggtctcactcagttgcccaagctgggagtgcagtggtatgatcaaagctcactgcagcctcaatcttccaaactccagctgaccacagtggccgagaagtcgcgcgtgctgcagctggaggaggagctcaccctgcgccgaggtgaaatcgaggagctccagcagtgcctgttgcactcgggtcccccacttcgggaccacccagacgccgccgagatcctgcggctacgggagcggctgctctcggccagcaaggaacaccagagggagagtggggtgctgcgggataaatacgagaaggccctgaaggcctaccaggcggaggtggacaagctccgcgcggccaacgagaagtacgcacaggaggtggcgggcctgaaggacaaggttcagcaggccaccagcgagaacatggggctaatggacaactggaaatccaagctggactcgctggcctcggaccaccagaagtccctggaggacctcaaagccaccctgaactcgggcccaggcgcccagcagaaggagatcggcgagctgaaggcagtgatggagggcatcaagatggagcaccagctggagctgggtaacttgcaggccaagcatgacctggagaccgccatgcacgtgaaggagaaggaggccctgcgagagaagctgcaggaggcccaggaggagctggctgggctgcagcggcactggcgggcccagctggaggtgcaagccagccagcaccggctggagctgcaggaggcccaggaccagcgccgggatgccgagctgcgtgtgcacgagctggaaaaactggacgtggagtaccggggccaggcgcaggctatcgagttcctcaaggagcagatctcgctggccgagaagaagatgttggactacgagcggctgcagcgggcagaagcccagggcaaacaggaggtcgagagtttgcgggagaagctcctggtggctgagaacagactccaggcggtcgaggccctgtgctcctcccagcacacacacatgattgagtcgaatgacttttcagaggagacgatcaggaccctcgtccaa

SEQ ID NO: 6856 - DNA, 1268 bp, Homo sapiens
  SIMILAR (756)..(1181): 731254mologous to Homo sapiens KIAA1304 protein,accession number AB037725,Smith-Waterman Score=486.
gcacctatactgtgccaggcttgcataccggcaaagaagaaacaataactaatgaaacaagatctctgccctcaataaggcggctgcagctagaggcaccactgtcatcatgggaactacagaacattaaagctggaagtggtgaaagcgtaagtgcaaggggctccttattcgtggacataaataatagactgaaagtcatgagtcccattctcagtgaggaagcagaggcaacacagacagataatgagagggggcgactttcacagcctcaagtacactcctctctgttaaatttccctgtgtcttggaaaagaggcggaagtagtaaagagatgaaaacagaagaccctggactgatggtctggggaaagggggaagagttgactggccaggattatcctgaagacacaacactctgcccaaatccaatgaaacacttcacgttgttcagcagtcctgacagggttgaaacggtagccacttacagacttaagacctgcctcccttatactgtggcctgtccttgtactgatcaggccagcccgtccacagatagagatggcatccttatgtttataccgggaagctacactaagagagatgacccttcattgtctgtggactttttctggtctcatatgacacccggagctgctgcacaagaggaaccagtagacaagtgtagacagtacagtgaagacatagagggcaccagagtcatcaataccattgttcagccagcgtgtcatgtggaaacagcacactgtgtccagaagcgccccgtggcacggttggcctggaatctccaacatctccccacacagcagcaggcagccctggatgaccaggtcagccaaaaagttaagaaaacgactgaagccaccttgcagacgatacaagatatggtcaccatcgaggactatgatgtttctgaatgcttccagcacagtcgttccacagaatcagtgaagtccactgtctctgaaacctacctgagtaaacccagcatcgccaagagaagagccaaccagcaggaaactgaacagttctacttcatgaaactcagagaatatttggaaggcagtaatctcatcacaaaacttcaagccaaacatgacttgctgcagaggaccctgggagaagcaaagcagatgagttatggccttggagcccatggagaattcccggaggaatcttatatccctggcatagcacagtggactccttgctgtctcaggtcaacagaaccagaaggagataattag

SEQ ID NO: 6857 - DNA, 552 bp, Homo sapiens
  SIMILAR (1)..(276): 581254mologous to Mus musculus formin,accession number X53599,Smith-Waterman Score=233.
aatgctctccctggtagaaagagccgtgtcttctctgggtgcgtctctgctgacacctggaagccaccatcctctgcaaaggtcacggagaccaaaggagccagcccggccttcctcagagcaggccaacctcggttggtgcctggggaaactttggaaaagagcttggggccagggaaagacccacaagttgagccccagcacccagttcacctcccaggtatctcctctgagggctttccctgggacggcttcaatgagcagacacctaaagactcttcccaacagagatggaggcgcgtgggttctgggctacagagcgggaccagcctgtccatttttgcttcatgaggaaagggagaagtcaaacaggagcgaattgtacttggatctccatcctgaccacagcctgactgagcaggatgacaggactcctggcagacttcaagctgtctggccacccccaaagacaaaagacacagaagaaaaagtgggactgaagtacactgaagcagaataccaagctgctattttacacttgaagagggagca

SEQ ID NO: 6858 - DNA, 564 bp, Homo sapiens
  SIMILAR (109)..(282): 771254mologous to Mus musculus formin,accession number X53599,Smith-Waterman Score=253.
atgcataatgattctgttcccagaaatgaagatgaacaaggcacagttcctgccctggagaacacacacattagtgacttggctcagatgacgctgtttaggaactgtatctcctctgagggctttccctgggacggcttcaatgagcagacacctaaagaccttcccaacagagatggaggcgcgtgggttctgggctacagagcgggaccagcctgtccatttttgcttcatgaggaaagggagaagtcaaacaggagcgaattgtacttggatctccatgtagaagcaaggtgttgtctccatttcaaagatgtggaaaatgagtataacgaagatgctgatcaggaagaaggcctaaggttggtcagtgggctccttgacatgaattcaaacaacttcagtgaagtaattaaacaggatgagtgttgccatgtatttgtaacacaggggccccacgttgaacactgtgcattggattcctggtgctccacctcagagccagcttccatggccacgtcagttctttcatctgtgactccttccagacggtcttacagctga

SEQ ID NO: 6859 - DNA, 2658 bp, Homo sapiens
  SIMILAR (1397)..(2398): 311254mologous to Homo sapiens Human secreted protein (clone ya1-1),accession number Y17227,Smith-Waterman Score=482.
gttcccgctgggattccccatctccaaccccgcaggcaaggacgccgtgaccttgcaaggcatccctgagggagcctttgatgaagtgacctcatgcctggtgaaggtgccagagaagacagaaggtggcaacaacatggctctggttgagaatgtcaccacccttcagaagagccaggatctgctggaggcagaaggagaaaagaagaccatgataaagaagattatgccacacccagcccaccctgggcatgcgggagaggtcggagctggtgaacgtgtgtgtgcacagcgtgttctccctgccctccgtgcaggcgatgcaggagaaggacgaggccaaggctgagaccatccaggctctttaccatcagaccctggaggccctgcagacactgctcaaagccctctttatcgaggaccccactcctgctgggctgaagagcatcttggaggccctggggccttggatgaactctgggaaggcccatgagcgagcacgggctgtgaacaccaatgtctctgtgttgaaccacatgcttctaactctgcctttctttatgcccttggggttcccggcgctggggcttctgctggggagactcatccttcacattggggatcctgatgaggagattggctgtgaggctctggacggcatcatcatcctctacactattctggagctccaaaaacgagccagagataaggaagagaccaacaaaaaggagctatatgagagcaacaagcatttcctggggccctacaaccctgtgagcccgtgccagaacattctgcgggtgatcgaggaatttggagacttcctggggccccagcagataaaggacctgctgctggccgccctggaagggctgaaaggcagctcagaggctccagggaaggactccagggagatgatgcagctggcctcggaggtcatgctcagctcggtgctggagtggtaccgccacagggcgctggaggtgatcccagaaatcatgcaaggcatctacatgcagctgagccacatccaggagcctcgggcccgccaggtggccctgctgcccgtctccctcctggctagctccttcatgaccgaggttgtggtggccctgctcatgtgccccctcccactgaacaggcagccagcggcctgtgcgagctcctgtccgtcaacagctgcatgggccgtgtgaggcgcatctaccctcagctgctcctggccctgctcattcaggtccattaccacatcggcctcaacctgcctggctgcgtggctcctcccaaggacaccaagaagggtgcacagccctctcccttcgtacctgtgcgctgggtggtgaaagtggtgaaaaccctgctactgaggatgggctgctcttatgagaccacgtttctggaggaccagggtggctgggagctcatggagcaggtggagagccaccaccgcggagtggccttgctggcaagggccatggtgcagtactcctgccaggagctgtgccgcatcctctacctgctcatcccgctcctggagcgaggcgacgagaagcacaggatcacggccaccgccttcttcgtggagatggagcaggtgcgccggatccccgaggaatactctctggggcggatggcagaaggcctgagccaccacgaccccatcatgaaggtgctgtccattcgaggcctggtcatcctggcccgcaggtctgagaagaccgccaaggtgaaggccctcctgccctccatggtgaagggcctgaagaacatggatgggatgctggtggtggaagcggtccacaacctcaaggctgtcttcaaggggcgggaccagaagctgatggacagtgcggtctatgtggagatgctgcagatcctgctgccgcacttcagcgacgcacgagaggacgtgcgctcctcctgcatcaacctgtatgggaaggtggtccagaagcttcgggcaccacgcactcaggccatggaggagcagctggtcagcaccttggtgcccctactgctgaccatgcaggagggcaactccaaggtaagccagaagtgtgtgaagaccctgttacgctgttcttacttcatggcttgggagttgccaaaaagagcttatagccggaagccctgggacaaccaacagcagacagtggccaaaatttgcaagtgccttgtgaacacccaccgagacagcgccttcatattcctcagccagagcctggagtatgccaagaactcacgggcctccctccggaagtgctcagtcatgttcatagggtccctggtcccctgcatggagagcataatgacagaagatcgtctgaatgaagtgaaagctgctctggataacttgagacatgacccagaagcatcagtgtgcatctacgcagcccaggtccaggaccacatcctggccagctgctggcagaactcctggctgccgcacgggaactcatgggtgtgttactcagccaccacccaccgctggagccccagctgtgagaacctgcccacttcccaccagcggcgctcctggatcatgcaggcactgggctcctggaagatgtccttgaagaagtgacgtccctgagccccaaaccctcctcagggtggttgagttccagccatgctccctataaatgtcatgtggcttac

SEQ ID NO: 6860 - DNA, 731 bp, Homo sapiens
  SIMILAR (75)..(569): 301254mologous to Saccharomyces cerevisiae a-agglutinin core subunit,accession number M60590,Smith-Waterman Score=121.
ctaggcatgaattaaacccatttataaggcaccgttccagagaaggtctggttctgggccactgcatctctaggccaagctcaaaagcactccttattccaacctcaaactcttctctggaccttgactccaatccattgctcaacatgggctcaagaaacacctccaagctgaacctcaatgtagctccagattctcatgggaccctaatcccagacacaaatgagaccatcactttggcttcacataatatctctgagtctgtttcaaaaggagcctttagtaccacctggagcacaagttcaaaggaaaccatgaatgtggcttccagcggccactccagatctgatttgagcgtgaccatcactcaagcctcgtatgtgaccctgattcctggctccagctatggtatcagcctgcactccagcacccatgggcccaactccaccatctctccaccctcatgcatgactctaatcctgggttccaatgagactctgagcctggactccagcctcctgttcagcgacacctccaccttgacgctgagcagtcagcaggatgatgccaaggacaacagcatccacactgtgcccctggaggagaatctggagagttggagtgagatggccagcattaaggtgggccagttcccgctgggattccccatctccaaccccgcaggcaaggacgccgtgaccttgcaaggcatccctgaggggctcaagtga

SEQ ID NO: 6861 - DNA, 1221 bp, Homo sapiens
  SIMILAR (2)..(340): 861254mologous to Mus musculus VPS10 domain receptor protein SORCS,accession number AF137367,Smith-Waterman Score=535.
ggagcggaagtgtatgcaaggaaaatatgcaggagctatggaatctgaaccctgtgtctgcactgaggctgattttgattgcgactatggttatgagcgacacagcaatggccagtgcctgccggcattttggttcaatccatcctctctgtcaaaggattgcagcttgggacagagttacctcaatagtactgggtacaggaaggtggtttccaataattgcactgatggcgtaagggaacagtacactgccaaaccgcagaagtgcccagggaaagccccgcgggggctgcgggatagtcacggctgatggaaagctgacagcgggaacaaggacacaacgtcactctcatggtgcaattagaagagggtgatgttcagcggacactcatccaagtggactttggcgatggtatcgcggtgtcttacgtcaatctcagctccatggaagatgggatcaaacacgtctatcagaacgtgggcattttccgtgtgaccgtgcaggcacttgtccggctgcccccccacatctcacagtgtgacgaagtcttccggttcttcgaggctcgacccgaggatgtcaaccctccaaaagaccaggctctcctgcttggggaactgggtccggccgtggagctgtgtctgaaggaggagcgctttgctgatgccattatcctggcccaggctgggggtacagatctgctgaagcaaacacaggagcgctacttggccaagaagaaaaccaaaatctcctcgcttctagcctgtgttgtgcaaaagaattggaaggatgtggtgtgtacctgtagcctgaagaactggagagaggcactggctttgctactgacatactcaggcacagagaaatttcccgagctctgtgacatgctgggaactcgcatggaacaggagggcagcagggcactaacctccgaagccagactctgttatgtgtgctcagggagtgtggagcggctggtggagtgctgggcaaaatgccaccaggctttgtcccccatggctctgcaggacatgcatgttatcagcaccgatgagaatcaggtgttcgcagcggtccaagaatggaaccagaatgacacgtacaacctctacatctcagacacacgtggtgtctacttcaccctggccttggagaatgtccagagcagcagaggccctgagggcaacatcatgatcgacctctatgaggtcaccatctag

SEQ ID NO: 6862 - DNA, 1662 bp, Homo sapiens
  SIMILAR (319)..(1494): 961254mologous to Mus musculus VPS10 domain receptor protein SORCS,accession number AF137367,Smith-Waterman Score=2045.
atgcctgaaaaaggagatgaggaaggaagaatagaggactctaatttaattttggaggtggcttcaccaggactagacaggttaaagcacttgagagctatccccatcttcggaaatggcagtggggtgaaggaagatgattcacattatctaacttgccgaatgcagaactgtacagaggccaacaggaatcagccttttccaggctacattgacccagactctttgattgttcaggatcattatgtgtttgttcagtgtaacaccatcaaactggaattcagtgcccagagattagctcgagcttcttacagtcttgtttttatgatccagctgacatcaggagggcggccacattactacgtgtcctaccgaaggaatgcatttgcccaaatgaagcttccgaaatatgctttgcccaaggacatgcatgttatcagcaccgatgagaatcaggtgttcgcagcggtccaagaatggaaccagaatgacacgtacaacctctacatctcagacacacgtggtgtctacttcaccctggccttggagaatgtccagagcagcagaggccctgagggcaacatcatgatcgacctctatgaggtagcagggataaagggaatgttcttggctaacaagaagattgacaaccaagtgaagactttcatcacatataacaaaggcagagactggcgtttgctgcaggcgccggacacggatctaaggggggaccccgtgcactgcttgctgccctattgctcactacaccttcacctgaaggtctctgagaatccctacacatcagggatcattgccagcaaagacacagctccaagcatcatagtggcatcaggtaatataggttctgaattgtcagacactgacatcagcatgtttgtctcttcagatgcagggaacacctggagacagatctttgaagaagagcacagtgttttgtacctggatcaaggtggagtcctggttgctatgaaacacacatctctcccaattcgacatctttggttgagttttgatgaagggagatcttggagcaaatacagtttcacatctattccactttttgtggatggggttctgggtgagcctggagaagagactctcatcatgacagtgtttggacacttcagccaccgctctgaatggcagctggtcaaagtagattacaagtccatttttgatagacggtgtgccgaagaggactacagaccttggcagctgcacagccagggggaagcatgtatcatgggagcaaaaaggatatataagaagcgaaaatcagagcggaagtgtatgcaaggaaaatatgcaggagctatggaatctgaaccctgtgtctgcactgaggctgattttgattgcgactatggttatgagcgacacagcaatggccagtgcctgccggcattttggttcaatccatcctctctgtcaaaggattgcagcttgggacagagttacctcaatagtactggtccaaaggccagcagacctgagacccaggaagagcctatctttcggttcaagaccgaaggcaggaaaagaggccagtgttccaatatgaatgccatcaggcagaaggaattctctcttactttgggaactgtcaacctgctgaattcaggccttcagctgattggatga

SEQ ID NO: 6863 - DNA, 826 bp, Homo sapiens
  SIMILAR (631)..(825): 591254mologous to Homo sapiens p40,accession number U93570,Smith-Waterman Score=169.
ctcccagcgtgagcgacgaagaagacgggtgatttcagcatttccatctgaggtaccgggttcatctcaccagggagtgccagacagcgggtgcaggtcagtgggtgcgcaccccgtgcgcgagccgaagcagggcgaggcattgcctcactcaggaagcccaagggaaggaaaactaacaaacagaaaggacatccacaccaaaaacccatctgtacatcaccatcatcaaagaccaaaagtagataaaaccacaaagattgggaaaaaacagaacagaaaaactggaaactctaaaacgcagagcgcctctcctcctccaaaggaatgtagttcctcaccagcaacggaacaaagctggatggagaatgactttgatgagctgagagaagaaggcttcagacaatcaaattactctgagctacggaaggacattcaaaccaaaggcaaagaagttgaaaactttgaaaaaaatttagaagaatgtaaaactagaataaccaatacagagaagtgcttaaaggagctgatggagctgaaaaccaaggctcgagaactatgtgaagaatgcagaagcctcaggagccgatgcaatcaactggaagaaagggtatcagtgatggaagatgaaatgaatgaaatgaagcgagaagggaagtttagagaaaaaagaataaaaagaaatgagcaaagcctccaagaaatatgggactatgtgaaagaccaaatctacgtccgattggtgtacctgaaagtgacggggagaatggaaccaagttggaaaacactctgcaggatactatccaggagaacttccccaatctag

SEQ ID NO: 6864 - DNA, 942 bp, Homo sapiens
  SIMILAR (589)..(939): 811254mologous to Homo sapiens ORF1; putative,accession number M19503,Smith-Waterman Score=497.
atgaccgtttgcaatcttaaggtagagaagaaagagttgacaaaagaagtagaaataagtggctggagaagtatcgagagaacatcagaagtgtatcatatcataaatgccaaaagaagagaatgttttacagaggaatttatcaacagaagaaagggaaagagaaaacttagtcctacttcaaaaaagaagaaaagaaagaaagaaagaaagaaagaaagattgaagacaggcttcatgatcagcacaaacatcatgaaagcacttagagataatgggttaagtgtaactgaatcagaaacataccgatttggcagtaatctcattcataaaatgttggagtgcttcttagtattcagcactgagctagatacagatgaaaaactaggatggaggaggagccaagatggccaaacaggaacagctctggtctacagctcccagcgtgagcgacgtagaagacgggtgatttctgcatttccatctgagggcacagacaaacaaaaagacagcagtaacttctgcagacttaaatgtccctgtctgacagctttgaagagagcagtggttctcccagcacgcagatggagatctgagaacgggcagactgcctcctcaagaacgcagttcctcaccagcaagggaacaagctggatggagaatgactttgatgagctgagagaagaagtcttcagacgatcaaattactctgagctacgggaggacattcaaaccaaaggcaaagaagttgaaaactttgaaaaaaatttagaagaatgtataactagaataaccaatacagagaagtgcttaaaggagctgatggagctgaaaaccaaggctcgagaactacgtgaagaatgtagaagcctcaggagccaatgcgatcaactggaagaaagggtatcagcaatggaagatgaaatgaatgaaatgaagtga

SEQ ID NO: 6865 - DNA, 477 bp, Homo sapiens
  SIMILAR (318)..(178): 771254mologous to Homo sapiens Human secreted protein sequence encoded by gene 2 SEQ ID NO:125,accession number Y91452,Smith-Waterman Score=169.
tcagcaataactaacttttggattagtcatcatcaagtaaaatacaaatactccaatagaaatatagatatcattttctggcaggggaggagccaagatggccgaataggaacagctccggtctccagctcccagcaagagcgacacagaagatgggtgatttctgcatttccatctgagctttgaagagagcagtggttctcccagtacgcagctggagatctgagaacgggcagactgcctcctcaagtgggtccctgactcctgacccccgaggagcctaacaggtcttttcccagttggaagggcggatagccttgggcaagtttcaaaggccttcttctcttcccactgggaaatggactcaaagatgttggtggggggcccagtgggaataagattgactctttggtttgcatggatggtgggtgaggcctgtgattgctggttttccgtgacttctctgacaacctgcat

SEQ ID NO: 6866 - DNA, 356 bp, Homo sapiens
  SIMILAR (354)..(256): 691254mologous to Homo sapiens Human secreted protein, SEQ ID NO: 6908,accession number G02827,Smith-Waterman Score=125.
gggcagcactcaggagaggcacttcttctgatggaagaaaactgaatgggacatttgcagtaaggggtgctggtgggtactacatgtggggccacactcgagctgccttctcagtcaacccctttggcagcttgggccaagtctctttgaagaggaagactgtgatatctgaactcaaacaggcagtgcccagagagagaagcacaggtccacgcaggcagccaaagccatcttcttggttgaaagatactcttttcggggggaggagccaagatggccgagtaggaacagctccggtctacagctcccagcgtgagcgacaaagaagacgggtgatttctgcatttgcatctgag

SEQ ID NO: 6867 - DNA, 461 bp, Homo sapiens
  SIMILAR (3)..(146): 791254mologous to Homo sapiens Human secreted protein sequence encoded by gene 2 SEQ ID NO:250,accession number Y91577,Smith-Waterman Score=182.
ttgaggaggcagtctgcccgttctcagatctccatctgcgtgctgggagaaccactgctctcttcaaagctgtcagacagggacatttaagtctgcagaagttactgctgtctttttgtttgtctgtgccctcagatggaaatgcagaaatcacccgtcttctacgtcgctcacgctgggagctgtagaccagagctgttcctgtttggccatcttggctcctcctccatcctagtttttcatctgtatctagctcagtgctgaatactaagaagcactccaacattttatgaatgagattactgccaaatcggtatgtttctgattcagttacacttaacccattatctctaagtgctttcatgatgtttgtgctgatcatgaagcctgtcttcaatctttctttctttctttctttctttcttttcttcttttttgaagtaggactaagttttctcttt

SEQ ID NO: 6868 - DNA, 255 bp, Homo sapiens
  SIMILAR (151)..(183): 541254mologous to Homo sapiens Human secreted protein, SEQ ID NO: 7214,accession number G03133,Smith-Waterman Score=41.
gttgattccatgtcctgctactgtgaataatgtttcagatatcatgggaatgtacatgaaagagtgctcagcatcactgatcaccagggaaatgcaaatcagaaccaccatcatgaggcaccatctcacctcgattggaaccgagatgatcagaaagacaaaaataatgaatgctggagtggtagggagtgccagacagtgggcgcaggccagtgtgtgcgcgcaccgtgcgcgagccgaagcagggcgaggcat

SEQ ID NO: 6869 - DNA, 527 bp, Homo sapiens
  SIMILAR (525)..(4): 861254mologous to Homo sapiens Spir-1 protein,accession number AJ277587,Smith-Waterman Score=715.
  misc_feature (1)...(527): n = a,t,c or g
gtggctgctggtcgacttgtgcagcgtttcttcctcagactcagagctgtccagttcggccagagttggggctctgaggagcttcttccgctgtgcaggcacctgctgtgaggtacttaacccgttttcttttgtttgtgatgtcaaacctccattcaccatagatgactccacaagattctttgtagattcaggggtagtcacatctaatctgctacgtctaatctcctctggtgatacaggccgcagctttctttctgctttaatttcttctaatattctttcatgggaggctccgtggccgtggtgggagttggtttcagttttctgggctgagactgggattttaaagggaggtctggatctgatgaagtccgagggatggatttcatgaggcactctttttttnaaccgagggggaatatcaccattcaccatcacttttcgcaaggtgtatcttttgcagcgaatgtcatccattaacatctcataaggggtgagctgatattcaatgggcaaagggttgt

SEQ ID NO: 6870 - DNA, 648 bp, Homo sapiens; identical to SEQ ID NO: 6497
  SIMILAR (322)..(474): 721254mologous to Homo sapiens Human secreted protein, SEQ ID NO: 6908,accession number G02827,Smith-Waterman Score=204.

SEQ ID NO: 6871 - DNA, 405 bp, Homo sapiens
  SIMILAR (394)..(215): 591254mologous to Homo sapiens Human secreted protein sequence encoded by gene 2 SEQ ID NO:125,accession number Y91452,Smith-Waterman Score=153.
atgcctcgccctgcttcggctcgagcacggtgcgcacaaccactgacctgcgcccactgtctggcactccctgatgaacccagtacctcagatggaaatgcagaaatcaccgtcttctgcgtcgctcatgctgggagctgtagaccagagctgttcctattcggccatcttggctccaaaatcgatatcaaggcaccagtagattctgtgtctgctttgaagagagcagtggtacccccagcacgcagctggagatctgagaatgggcagactgcctcctcaagtgggtccctgacccctgaccccgagcagcctaactgggaggcaccccccagcaggggcacactgacacctcacatggcagggtactccaacggacctgcagctgagggtcctgtctgttag

SEQ ID NO: 6872 - DNA, 497 bp, Homo sapiens
  SIMILAR (126)..(37): 1001254mologous to Homo sapiens CDA08,accession number AF212247,Smith-Waterman Score=160.
tttgttcttcatgaaaaatgtctgggaccttttatatggacggggaataccaacgtagagatggtcaagaaaatttgcgctccgacctaaaccaagcacgttgtatggtagttggagagctaaatgtgggaggagccaagatggccgaataggaaaagctccggtctacagctcccagcgtgagcaacgcagaagacgggtgatttctgcatttccatctgagggtgtactcccatctacttttaaaaacaaaaagttcactgtaaaacagcctcaggtaggccgttcagtaggtattccagaagaaggtattgtcatcataggagatggacagctccaagggtgtttattgcccctgaagactttctagtggaacaagatgtggaggtggaagacactgatgttggtgatcctgactcagtgcaggcctaagctaatgtgggtgtttgtgtcttagtttttaactaaaggtttaaaaagtaaaaataaaacattaa

SEQ ID NO: 6873 - DNA, 557 bp, Homo sapiens
  SIMILAR (362)..(237): 731254mologous to Homo sapiens Human secreted protein, SEQ ID NO: 6908,accession number G02827,Smith-Waterman Score=167.
tccttaaggaaatgcaaatcaataccacaatgagataccactcccacaccttctagaacgtcctaaaataaaaaagacagataataacaagttttggatgaggatgacagagaaattggaaacctcatactgctggtgggaatgtgaaacgatgcagccacgttggaaagtaagcttgcagtaccttctgcctctgatatgaagacctctagttattcttcataggctgttgtgggctggggggaggagacaagatggccgaataggaacagctccggtctacagctcccagcctgagcgacgcagaagacgggtgatttctgcatttccatctgaggtaccgggttcatctcacttgaaaatcgggtcactcccacccgaatactgcgcttttccgaccggcttaaaaaacggcgcaccaggagattatatcccgcacctggctctgagggtcctacgcccacggagtctccctgatttgttagacacagcagtctgagatcaaacaggctggcggtgagcgagggcgccgactggcccagggcctggctgcgcat

SEQ ID NO: 6874 - DNA, 2067 bp, Homo sapiens; identical to SEQ ID NO: 6498
  SIMILAR (1051)..(2064): 981254mologous to Homo sapiens p40,accession number U93564,Smith-Waterman Score=1712.

SEQ ID NO: 6875 - DNA, 754 bp, Homo sapiens
  SIMILAR (482)..(733): 911254mologous to Homo sapiens NAG13,accession number AF194537,Smith-Waterman Score=409.
tcatgcttctggagcaaaactaccacgttttggaactggaagagacctagaaatcacagaatcagctcctctcatcaaagggagaatacgctgatggccagcaagatcaagtgtccattccagcacccagtccgtacaccctgagcgggcctcagactcagagctgtccagttcggccagagttggggctctgaggagcttcttccgctgtgcaggcacctgctgtgaggtacttaacccgttttcttttgtttgtgatgtcaaacctccattcaccatagatgactccacaagattcccaaagctatatacagatccaatagaatccccaagaaaatcctggggaggagccaagatggccgaacaggaacagctccggtctacagctcccagcgtgagcgacgcagaagatgggtgctttctgcatttccatctgaggtaccgggttcatctcactagggagtgccagacagtgggcgcagaaatacaaactaccatcagagaatactacaaacacatctacgcaaatgaactagaaaatctagaagaaatggataaattcctcgacacatacaccctcccaagactaaaccaggaagaagttgactctctgaatagaccaataacaggctctgaaattgtggcaataatcaacagcttaccccccaaaaagagtccaggaccagatggattcacagccgaattctaccagaggtacaaggaggagctgatttttcaaggtggaatcaattag

SEQ ID NO: 6876 - DNA, 5074 bp, Homo sapiens
  SIMILAR (2264)..(5071): 961254mologous to Homo sapiens putative p150,accession number U93569,Smith-Waterman Score=4681.
tttttttagagacaggtactcactatgttgttcaggctggtctcaaactcctggcctcaggcaatcctctcatgtagctggaattacagtcctgagccaccgcacccagctagctgtggtcccctgcaaccaggtgcctccaaaatggggctggcgttgacaataaccatttcccagcttttagaaagaggtgacggagctctgttgtagtgtctgagccacaactcaagaaggtaatgagaataaggagccaagatggccgaataggaacagctcctgtctacagctccggtctacagctcccagcgtgagcgacgcagaagacgggtgatttctgcatttccatcgtgagggaccgggttcatctcacatagggagtgccagaccagtgggcgcaggcaagtggggtgcgcgcaccgtgcgcgggccgaagcagggcgaaggcattgcctcaccctgggaagccgcaaagggggtcagggagttccctttccgagtcaaagaaaggggtgacggacggcacctgggaaaatcgggtcactcccacccgaatactgcgcttttctgacaggcttaaaaaacgggcacacaacgagattattattcccgcacctggccttcggagggtcctacgccccacggaatcgccgcttgattgcttagcacagcagtcttgagattcaaacttgcaaggcggcaacgaggctgggggaggggcgcccgccattgcccaggcttgcttaggtaaacaaagcagccggggaagctcgaactgggtgcagcccaccacagctcaaggaggcctgcctgcctctgtaggctccacctctgggggcagggcacagacaaacaaaaagacagcagtaacctctgcagacttaaatgtccctgtctgacagctttgaagagagcagtggttctcccagcacgcagctggagatctgagaacgggcagactgcctcctcaagtgggtccctgacccctgacccccgagcagcctaactgggaggcaccccccagcaggggcacactgacacctcacacggcagggtattccaacagacctgcagctgagggtcctgtctgttagaaggaaaactaacaaacagaaaggacatccacaccgaaaacgcatctgtacatcaccatcatcaaagaccaaaagtagataaaaccacaaagatggggaaaaaacagaacagaaaaactggaaactctaaaacgcagagcacctctcctcctccaaaggaacgcagttcctcaccagcaacggaccaaagctggatggagaatgattttgacgagctgagagaagaaggcttcagacgctcaaattactctgagctacgggaggacattcaaaccaaaggcaaagaagttgaaaactttgaaaaaaatttagaagaatgtataactagaataaccaatacagagaagtgcttaaaggagctgatggagctgaaaaccaaggctcgagaactacgtgaagaatgcagaagcctcaggagccaatgcgatcaactggaagaaagggtatcagcaatggaagatgaaatgaatgaaatgaagcaagaagggaagtttagagaaaaaagaataaaaagaaacgagcaaagcctccaagaaatatgggactatgtgaaaagaccaaatctacgtctgattggtgtacctgaaagtgatgcggagaatggaaccaagttggaaaacactctgcaggatattatccaggagactttccccaatctagcaaggcaggccaacgttcagattcaggaaatacagagaacgccacaaagatactcctcgagaagagcaactccaagacacataattgtcagattcaccaaagttgaaatgaaggaaaaaatgttaagggcagccagagagaaaggtcgagttaccctcaaagggaagcccatcagactaacagcggatctctcggcagaaaccctacaagccagaagagagtgggggccaatattgaacattcttaaagaaaagaattttcaacccagaatttcatatccagccaaactaagcttcataagtgaaggagaaataaaatactttacagacaagcaaatgctgaccgattttgtcaccagcaggcctgccctaaaagagctcctgaaggaagcgctaaacatggaaaggaacaaccggtaccagccactgcaaaatcatgccaaaatgtaaagaccatcgagactaggaagaaactgcatcaactaacgagcaaaatcaccagctaacatcataatgacaggatcaaattcacacataacaatattaactttaaatgtaaatggactaaattctccaattaaaagacacagactggcaagttggataaagagtcaagacccatcagtgtgctgtattcaggaaacccatctcatgtgcagagacacacataggctcaaaataaaaggatggaggaagatctaccaagcaaatggaaaacaaaaaaaggcaggggttgcaatcctagtctctgataaaacagactttaaaccaacaaagatcaaaagagacaaagaaggccattacatgatggtaaagggatcaattcaacaagaggagctaactatcctaaatatgtatgcacccaatacaggagcacccagattcataaagcaagtcctgagtgacctacaaagagacttagactcccacacattaataatgggagactttaacaccccactgtcaacattagacagatcaacgagacagaaagtcaacaaggatacccaggaattgaactcagctctgcaccaagcagacctaatagacatctacagaactctccaccccaaatcaacagaatatacatttttttcagcaccacaccacagctattccaaaattgaccacatacttggaagtgaagctctcctcagcaaatgtaaaagaacagaaattataacaaactatctctcagaccacagtgcaatcaaactagaactcaggattaagaatctcactcaaagccgctcaactacatggaaactgaacaacctgctcctgaatgactactgggtacataacgaaatgaaggcagaaataaagatgttctttgaaaccaacgagaacaaagacacaacataccagaatctctaggacgcattcaaagcagtgtgtagagggaaatttatagcactaaatgcccacaagagaaagcaggaaagatccaaaattgacaccctaacatcacaattaaaagaactagaaaagcaagagcaaacacattcaaaagctagcagaaggcaagaaataactaaaatcagagcagaactgaaggaaatagagacacaaaaaacccttcaaaaaatcaatgaatccaggagctggttttttgaaaggatcaacaaaattgatagaccgctagcaagactaataaagaaaaaaagagagaagaatcaaatagacacaataaaaaatgataaaggggatatcaccaccgatcccacagaaatacaaactaccatcagagaatactacaaacacctctacgcaaataaactagaaaatctagaagaaatggatacattccttgacacatacactctcccaagactaaaccaggaagaagttgaatctctgaatagaccaataacaggagctgaaattgtggcaataatcaatagtttatcaaccaaaaagagtccaggaccagatggattcacagccgaattctaccagaggtacaaggaggaactggtaccattctttctgaaactattccaatcaatagaaaaagagggaatcctccctaactcattttatgaggccagcatcattctgataccaaagccgggcagagacacaaccaaaaaagagaattttagaccaatatccttgatgaacattgatgcaaaaatcctcaataaaatactggcaaaccaaatccagcagcacatcaaaaagcttatccaccatgatcaagtgggcttcatccctgggatgcaaggctggttcaatatacgcaaatcaataaatgtaatccagcatataaacagagccaaagacaaaaaccacatgattgtctcaatagatgcagaaaaagcctttgacaaaattcaacaacccttcatgctaaaaactatcaataaaataggtattgatgggatgtatttcaaaataataagagctatctatgacaaaaccacagccaatatcatactgaatgggcaaaaactggaagcattccctttgaaaaccggcacaagacagggatgccctctctcaccgctcctattcaacatagtgttggaatttctggccagggcaatcaggcaggagaaggaaataaagggtattcaattaggaaaagaggaagtcaaattgtccctgtttgcagatgacatgattgttgatctagaaaaccccatcgtctcagcccaaaatctccttaagctgataagcaacttcagcaaagtctcaggatacaaaatcaatgtacaaaactcacaagcattccaatacaccaataacagacaaacagagagccaaatcatgagtgaactcccattcacaattgcttcaaagagaataaaatacctaggaatccaacttacaagggatgtgaaggacctcttcaaggagaactacaaaccactgctcaaggaaataaaagaggatacaaaaaaatggaagaacattccatgctcatgggtaggaggaatcaatatcgtgaaaatggccatactgcccaaggtaatttatagattcaatgccatccccatcaagctaccaatgccttccttcacagaattggaaaaaagtactttaaagttcatatggaaccaaaaaagagcccgcattgccaagtcaatcctaagccaaaagaacaaagctggaggcatcatgctacctgacttcaaattatactacaaggctacagtaaccaaaacagcatggtactggcaccaaaacagagatatagatcaatggaacagaacggagccctcagaaataacgccgcatatctacaactatctgatctttgacaaacctgagaaaaacaagcaatggggaaaggattccctatttaataaatggtgctga

SEQ ID NO: 6877 - DNA, 332 bp, Homo sapiens
  SIMILAR (3)..(179): 761254mologous to Homo sapiens apolipoprotein L-IV splice variant a,accession number AY014914,Smith-Waterman Score=215.
aaaagaaacgcttcactgaagaagtcattgaatacttccagaagaaagttagcccagtgcatctgaaaatcctgctgactagcgatgaagcctggaagagattcgtgcgtgtggctgaattgcccaggaggaggccccgcagcgacatggagggagctgctttgctgaaagtctttgtcctctgcatctgggcggcccggtattttcagaatgggctccataaccaggtgcgtgatgtggagctcggtgtaaccacgcaacacggatccctcctcaaggctgagcacttggcatcgtccagtgaatctcaaccccggaagtcacagccttag

SEQ ID NO: 6878 - DNA, 853 bp, Homo sapiens
  SIMILAR (400)..(852): 931254mologous to Homo sapiens apolipoprotein L-IV splice variant a,accession number AY014914,Smith-Waterman Score=733.
gagcatgccaccggcttgagttcacgggtccacccacgcgtccgcggacgcgtgggcttggggactggaggacctgtctggttattatacagacgcataactggaggtgggatcctcacagctcagaacagctggatcttgctcagtctctgccaggggaagattccttggaggaggccccgcaacgacaaggagggagctgctttgctgaagttctttgtcccttgcctccggaacccaaatccacttcccggaattgcccaactggtagactcgcctagaggggaagcattgtgtcctagttgaggctaacagtcagtatccagcctcaacattcagcagaggccccagatcagcgtttgagccaggccaacaatgaccaaggaggatcgggaggggtgggtgcggctcatcacaagcgtcggggcgcaccaaaaccatccaggctggacagtggctggacagttccaagaaaagaaacgcttcactgaagaagtcattgaatacttccagaagaaagctagcccagcgcatctgaaaatcctgctgactagcgatgaaacctggaagagattcgtgcgtgtggctgaattgcccagggaagaggcagatgctctctatgaagctctgaagaatcttacaccatatgtgggtattgaggacaaagacatgcagcaaaaagaacagcaggttatggagtggcttttgaaagagtttcctcaaatcagatggaagattcaggagtccatagaaaggcttcgtgtcattgcaaatgagattgaaaaggtccacagaggctgcgtcatcgccaatgtggtgtctggctccactggcatcctgtctgtcattggcg

SEQ ID NO: 6879 - DNA, 531 bp, Homo sapiens
  SIMILAR (204)..(524): 931254mologous to Homo sapiens Human endometrium tumour EST encoded protein 380,accession number Y60320,Smith-Waterman Score= 497.
acgcccacgcgtccgagaactcgtgggtggcagcgcaatacaagctctaaaagaatggaatacgactggaaaactgaggatcaatcattgaaaaagatgcgggtccacgcagcatcatggcagcaaatatgctacagacaaggaggagaggcctgatgtcatgtcccctgcagccgcagccaccacagattcaaaacggccccatgaatggctgcgagaaggacagctcgtccacagattctgctaacgaaaaaccagcccttatccctcgtgagaaaaagatctcgatacttgaggaaccttcaaaggcacttcgtggggtcacaggcccaaatattgagaaatcggcgaaggatttgcaacgctgcaccgtttctctaactagatatcgcgtcatgattaaggaagaagtggatagttccgtgaagaagatcacagctgcctttgctgaattacacaactgcatcattgacaaagaagcttcattaatggcagaaatgggtacagttaacgaacaagccatgcgatgcg

SEQ ID NO: 6880 - DNA, 456 bp, Homo sapiens
  SIMILAR (38)..(454): 911254mologous to Homo sapiens hypothetical protein,accession number AL110124,Smith-Waterman Score=630.
atctcgatacttgaggaaccttcaaaggcacttcgtgggggtcacagaaggcaacagactactgcaacagaaactatccttagatgggaaccccaaacctatacatggaacaacagagaggtcagatggcctacagtggtcagctgagcagccttgtaacccaagcaagcctaaggcaaaaacatctcctgttaagtccaatacccctgcagctcatcttgaaataaagccagatgagttggcaaagaaaagaggcccaaatattgagaaatcagtgaaggatttgcaacgctgcaccgtttctctaactagatatcgcgtcatgattaaaggagaagtggatagttccgtgaagaatatcaaagctgcctgtgctgagttccccatttgcatcattgacaaagaagtttcattaatggcagaaatgggataaagttaaaggaaggaagccatgga

SEQ ID NO: 6881 - DNA, 965 bp, Homo sapiens
  SIMILAR (817)..(527): 571254mologous to Homo sapiens Human endometrium tumour EST encoded protein 382,accession number Y60322,Smith-Waterman Score= 246.
taaattatattaaagaaatttttaaatgtagaaatccacaatactgaaaaaaatgagaaaagggttcagtttctacaagaaaggaagtagatggaaggggctttattgatgaatcagatgctgcagcatagaatacagagggaggagctttggtggggaggaagatgattgccctgcagaaactgggggagccctgggttcagagtcagcacatgggatggaaggcaagctcaagaagaggagtataaagcagaggaattaaatgaaggtattttaaggaacagtgcactatccccttatcatctcttccatcccccaacttgttcttttagctgcctaacatttatcctcaaggcaaaaagggaggaagagagtgggcagtgatctgcaagtacattagtcacccgttagaacaaaagtcaaaaccctttaaaggaaaagaagaagatctagagtttctcaatgcatcatccaaaatgccctgctggcttttaaccacgcaaagtggtgtttatagagagagccagcagcacaaatggtctttagacgtatcagattctaaggcactgcagtttgtgatagaatataatgatgacagcctccttccaaagagtgcaggagacaagcgtaccccagatggcccagtcagagaccccactggtgaaatcataacagcctcaggcccaaatattgagaaatcagtgaaggatttgcaacgctgcaccgtttctctaactagatatcgcgtcatgattaaggaagaagtggatagttccgtgaagaagatcaaagctgcctttgctgaattacacaactgtctatttcctttgggtcaggggtctcttcagtatcatcccttcatggtttgccaagaagatgttattggaaagcgtcctgatccagaccccaagagagggttcttggatctcacacaagaaagaattcaaggcaaatccttaaagtaa

SEQ ID NO: 6882 - DNA, 692 bp, Homo sapiens
  SIMILAR (360)..(521): 961254mologous to Homo sapiens Sp140 protein,accession number U63420,Smith-Waterman Score=254.
ggcaaaatgatttatattccccctgggtatatacacagtaatgggattgccaaggtcaaatgggagttctgtttttagctctttgaggaattgccatactgcttttcacaatggttgaactaatttacactcccaccaacagtatataagcgttccctttctctgcaaccttgccagtatctgttatttttatgactttttaatcatagccattctgactggtgtgagatggtacttaaactaaacagctgctctgcacagcaaaagaaactatcaacagagtacacagacaacctacagaatgggagacaatatttgcaaactatgcatctgacagaagtctaatatccagcatctataatagcaaagccgacggccaggtggtctccagtgaaaagaaggcgaacgtgaatctgaaagacctttccaagattagggggagaaagagaggcaaacctggaacccgcttcactcagagtgacagagctgcacagaaaagagtccgatcaagagttctgagatacacgtgtagaatgtgcaggttctacaacccatcatctacattaggtatttctcctaatgctatccttcccctaacccccaaatcccgacaggccccggtgtgtgatgttctgtccctgtgtccatgtgtccttattgttcgacttccacttatgagtgagagcatgtga

SEQ ID NO: 6883 - DNA, 2298 bp, Homo sapiens
  SIMILAR (424)..(1215): 321254mologous to Homo sapiens Human PRO351 protein sequence,accession number Y41704,Smith-Waterman Score=298.
atgcccatgcattgtgaagaccctgtttctctagctgtgcagctgcaagacgaacccacagaaacgagagggagcaggaggggcatcagcacacccaaccgaccagacacgaaaagaccaggacccacggggaaaccacacccacagccaaacaccccccagccccgaagccgggacgcctaccagccacccacccccaacgaccaccccctgccaaccacaaccacaaccacccacaaagaaccaccacaaccaaaccaccacaccggggaggggagggccacaacagacggcaacccgcgcgcgaagctaagcgagcagaagaacaacacaggacaaaaaagaaaaaggataagcaaacagaaacgggcgacaccgacaaaaacgaggcccgccagcccaaacaaagaagaaggaagaacagcaggaatcaccagctttggctttggctgtggacggagaaaccgccctggagttttcactgctgtggctacctatgaggcatggatacgggagcaggtgatgggttcagagcctgggcctgcctttcccacccagccccagaagacccagtcagatccccaggagcccagggaggagaactgcaccattgccctgcctgagtgcgggaaggccccgcggccaggggcctggccctgggaggcccaggtgatggtgccaggatccagaccctgccatggggcgctggtgtctgaaagctgggtcttggcacctgccagctgctttctggacccgaacagctccgacagcccaccccgcgacctcgacgcctggcgcgtgctgctgccctcgcgcccgcgcgcggagcgggtggcgcgcctggtgcagcacgagaacgcttcgtgggacaacgcctcggacctggcgctgctgcagctgcgcacgcccgtgaacctgagcgcggcttcgcggcccgtgtgcctaccccacccggaacactacttcctgcccgggagccgctgccgcctggcccgctggggccgcggggaacccgcgcttggcccaggcgcgctgctggaggcggagctgttaggcggctggtggtgccactgcctgtacggccgccagggggcggcagtaccgctgcccggagacccgccgcacgcgctctgccctgcctaccaggaaaaggaggaggtgggcagctgctggactcatggcccatggatcagccatgtgactcggggagcctacctggaggaccagctagcctgggattggggccctgatggggaggagactgagacacagacttgtcccccacacacagagcatggtgcctgtggcctgcggctggaggctgctccagtgggggtcctgtggccctggctggcagaggtgcatgtggctggtgatcgagtctgcactgggatcctcctggccccaggctgggtcctggcagccactcactgtgtcctcaggccaggctctacaacagtgccttacattgaagtgtatctgggccgggcaggggccagctccctcccacagggccaccaggtatcccgcttggtcatcagcatccggctgccccagcacctgggactcaggccccccctggccctcctggagctgagctcccgggtggagccctccccatcagccctgcccatctgtctccacccggcgggtatccccccgggggccagctgctgggtgttgggctggaaagaaccccaggaccgagtccctgtggctgctgctgtctccatcttgacacaacgaatctgtgactgcctctatcagggcatcctgccccctggaaccctctgtgtcctgtatgcagaggggcaggagaacaggtgtgagatgacggaagggtcctggatcctcgtgggcatggctgttcaagggagccgggagctgtttgctgccattggtcctgaagaggcctggatctcccagacagtgggagaggccaacttcctgccccccagtggctccccacactggcccactggaggcagcaatctctgccccccagaactggccaagggctcgggatccccgcatgcagtctacttcctgctcctgctgactctcctgatccagagctgaggggctagggtcccagcaccacttcccccttctccaccctctacttcccgcccagtggggctggaatgtggcccagccggctggaacctcaagggccccacccaccgagattgcagcggctctggctaattgggcctcagtgcccgggctattttgaacccaggaatccttgggggtggtgggaggagcggacaataaaggtgtaaacccagaaaaaaa

SEQ ID NO: 6884 - DNA, 485 bp, Homo sapiens
  SIMILAR (14)..(415): 811254mologous to Homo sapiens RNA polymerase II elongation factor ELL2,accession number U88629,Smith-Waterman Score=536.
  misc_feature (1)...(485): n = a,t,c or g
ccgngnaanananagacggtcattggagtcagtgctctctagaaaactaaatccgttttagaaagctacaggcaccagccgttcagaatcggctgtatgggctattatagatgctgtatcgtctcctcagaaacggcttttggattcagagtttattgatcctttaatgaataaaaaagcccgaatatctcacctgacgaacagagtaccaccaacactaaatggtcatttgaatcccaccagtgaaaaatcggctgcaggcctcccactgccccctgcggctgctgccatccccacccctccaccgctgccttcaacctatctgcccatctcacatcctcctcagattgcggattcacattcgccagccgccccagttcaagggattcagccgttcctaactgctgaccaatactggctagaaaatcgctatcccagccagcacctttcacgcgttaccgcttccagagcgcgccatcagacag

SEQ ID NO: 6885 - DNA, 841 bp, Homo sapiens
  SIMILAR (603)..(647): 401254mologous to Homo sapiens RNA polymerase II elongation factor ELL2,accession number U88629,Smith-Waterman Score=45.
atgctgccctgcttgcgcgctttgtgttgccgccttgccgggcgggtgtttgaaacaccaccccccccagaggacaccaacaatgacactccacatacactgacgttatatgggccagccggggcaccgatcatcatgagtattaacaaccgaaccaggccggaacaatgcaacgtggcgaaaacgagagcgctgccggggtaccgaaatgcagacaacgcgatagtgatgcgcaattggcaaatatgcgcaaccgcgttaccgcggctgcgtaagcatataaacggaataagtacgccgagagcagctgcacctcctcctactgcggctttggctgctctcctctgcaccgctagcgcttccgctcctcctcctcctcctgtttccccgcaaaggcgacccccccccgtgcccccttactcccgccgctgctctagaccctacatcactcgaaaaaagaaaatagatggattgtgtttattccacctcaagaaatctgggaaaactaatccgtctcagaatgctgcaggcaccagccgttcagaatctcctgtatgttctagtagagatgctgtatcttctcctcaggaaatctggtggctgtacctgcaaaatacatcccgatcacccattttcccgatctgatcataggctaaaatccggtccggacttcaaccttttgcccatcggtcaacttttgcgaaaatccaagaatgtgttaaccaaagggcacacaaaaattcggcatcgggggaagaaaataagacaacaacagaaacggcttttggattcagagtttattgatcctttaagaataaaaaagcccgaatatctcacctga

SEQ ID NO: 6886 - DNA, 408 bp, Homo sapiens
  SIMILAR (163)..(246): 1001254mologous to Rattus norvegicus 5'-AMP-activated protein kinase alpha-1 catalytic subunit,accession number U40819,Smith- Waterman Score=148.
atggccctaactctcttcaattctatgaaggttgagagaggtaagaaaactgcagaaaagttcaaaactagcagaggttggttcatgtcatttaaagaaaaagccatctccggaggtgggagtcaaggtgaaacagcaaatgctaatggagaagctgtagcgaggcatatggttgttcatcgagacctgaaaccagagaatgtcctgttggatgcacacatgaatgccaagatagccgatttcggtgggcatctgggagttgtggaagtcactaaagaaactcccaaactaggggtctctaagacaagttccatctcggaaggagaatatgaagaagtccagtactccacgaaagaaggggaaggaacattccaatccttcaccaaaagaatgggaaaagaactttaa

SEQ ID NO: 6887 - DNA, 199 bp, Homo sapiens
  SIMILAR (33)..(149): 841254mologous to Homo sapiens Human secreted protein HCHPF68, SEQ ID NO:163,accession number Y86248,Smith-Waterman Score =168.
atctcagggcctgagagtagagtacaacacacccctcagttcacgagaagaagaagaagaagaagaagaagaagaagaagaagaagaagaagaagaagaagaagaagaagaagaagaagaagaagaagaagaagaagaaagaaagaaagaatgctctaaggcccaatgtaaacatttccccctctcagaagttctctag

SEQ ID NO: 6888 - DNA, 299 bp, Homo sapiens
  SIMILAR (179)..(30): 501254mologous to Plasmodium falciparum serine repeat antigen,accession number AB021826,Smith-Waterman Score=87.
ggcatgctgatgcaagaggtgggctcccaaggctttggcagctctgttcctttggctctgcagagtacagtctctttggtgctttcactggctggtgtttagtgcctgtggcttttccaggaagaagaagaagaagaagaagaagaagaagaagaagattaagaagaagaagaagaagaaaagaagaagaagaagaagaagaagaagaagaagaagaagaagaagaagaagaagaagaagaagaagaagaagaagaagaagaagaaaaaatcttcctgggtcacagagttggcatatga

SEQ ID NO: 6889 - DNA, 318 bp, Homo sapiens; identical to SEQ ID NO: 2962
  SIMILAR (102)..(251): 801254mologous to Arabidopsis thaliana putative protein,accession number AL162506,Smith-Waterman Score=202.

SEQ ID NO: 6890 - DNA, 405 bp, Homo sapiens
  SIMILAR (66)..(218): 311254mologous to Arabidopsis thaliana gene_id:F1D9.26~unknown protein,accession number AP002460,Smith- Waterman Score=120.
ttttttttttttttttttataacttaaccgtatattttaaaataacttaaggaatgcaattgtattgtttgcaactcaaagaataaatgcttgaagggatagaagaagaaagaagaagaagaagaagaagaagaagaagaagaagaagaagaagaagaaggaagaagaggaagaggaagaggaagaagaagaagaagaagaagaagaagaaagaagaagtagtcatcatcgtcgttgttgtcatcatcttcactggccccttccaattatgatggatcttagaccacaggcaactgaccagtgtgggtggtccacaaatatgtccctatattgtttatccgagttacacatttgcaagccagtaaatgaattccaattaggtctgcagaaactgcgaactcacta

SEQ ID NO: 6891 - DNA, 1317 bp, Homo sapiens; identical to SEQ ID NO: 6319
  SIMILAR (439)..(729): 791254mologous to synthetic construct Pax3-forkhead fusion protein,accession number AF178854,Smith-Waterman Score=407.

SEQ ID NO: 6892 - DNA, 160 bp, Homo sapiens
  SIMILAR (43)..(156): 861254mologous to Arabidopsis thaliana putative protein,accession number AL162506,Smith-Waterman Score=168.
atgattcagaggaaacgtgccagcattggtgctccctgtgcctgggtccgaaaaaaagaagaagaagaagaagaagaagaagaagaagaagaagaggaagaggaagaggaagaggaagaggaagaggaagaagaagaagaagaagaagaaggagagaaca

SEQ ID NO: 6893 - DNA, 309 bp, Homo sapiens
  SIMILAR (13)..(255): 851254mologous to Homo sapiens Human follicle stimulating hormone GPR N-terminal sequence,accession number W03627,Smith- Waterman Score=338.
atgacaaaacctaagtcagaagaagaagaagaagaagaagaagaggaagaagaagaagaagaagaagaagaagaagaagaggaagaggaagaggaagaggaagaagaagaagaagaagaagaagaagaagaagaagaagaagaagaagaagaagaggaagaagaacaagaagaagaagaaggagaaggagaaggagaaggagaagaggaggaggaggaggaggaggaaggaggagaagaaagagaagaaaaattgtgccagatacttgggaggctgcagtgggagaatcacctgagctcaggaagttga

SEQ ID NO: 6894 - DNA, 936 bp, Homo sapiens
  SIMILAR (643)..(933): 881254mologous to Homo sapiens ribosomal protein S7,accession number Z25749,Smith-Waterman Score=434.
atgtggctggctagagagctagaagaatctctagccgtcagtttgcagggagaacctggactgctggctggagcaggcaggctgcagggcagcccattcagtcaccctatggagcctgggcgacagagcgagactctgtctcaaaaaaaaaaaaaaaaagaagaagaagaagaagaagaagaagaagaggaggaggaggaggaggaggaggaggaggaggaggaggaagaagaagaagaagaagaagaagaagaagaagaagaagaagaagaagaagaagaagaagaagaagaagaagaagaaggagaagaagaagaaggagaagaggaagaagatcaactagacacaatgttatgggactcatcaacaaacctcaccaacacagcgctcagcaaggagaagaccatgttcagttcaagggccaagatcgtgaagcccaatggcgagaagccggatgagtttgaatccggaatctcccaggctcttctggagctggagatgaacttggacctcaaggctcagctctgggagctgaatattacggcagccaaggaaattgaagttggtggtggtcggaaagctatcataatctttgttcccgttcctcaactgaaatctttccagaaaacccaagtccagctaaggagaattctgcctaagccaactcaaaaaagctgtacaaacaataagcaaaagcttcccaggagctgtactctcacagctgtgcatgatgccatccttgaggacttggtcttcccaagcgaaattgtgggcaagagaatccacgtgaaactggatggcagccacctcataaagattcatttggacgaagcacagcagaacaatgtggaacacaaggttgaacccttttctggtgtctataagaagctcatgggcaaggatgttaattttgaattcccagagtttcaattgtaa

SEQ ID NO: 6895 - DNA, 1368 bp, Homo sapiens
  SIMILAR (721)..(963): 651254mologous to Homo sapiens Human follicle stimulating hormone GPR N-terminal sequence,accession number W03627,Smith- Waterman Score=249.
atgaggagtaccagtctgcaggatgttaacgcactgataggctatggacaatatattccacacttacggaagtggggaaactataggtcagacaaagctacaggtggcagggagggtatcgtgggctggactgatcttcagaaggctgcatctgagcagggtgtggaaggatggcagaaggaagaggggagtgaggcactcagggtagacagaagagtcaatccagtgatcccctgcgaaaagaatcctccacttgacctgaatgctctgtattggcaccttctggacaggaatcctatcgggtatttcatcaaagcatcccacagcagttttaagtgtggctccatgagattcatcaataagacaaaagcagaaaagaggtacaaagagaccaacagggaagaaagacgcgaagatgaaaacttcagcagcatgccacgtacagttggcttggatgtaccctgcacaaaagtgtccagcctgtacctcgctgacctagctgttcgccggtacaagattaaggaagtgacagcttttcctaattcactgaaacagagaaagctcagcgagaaggcacggggttgtgaatacagtttcacgatgatttccatggctgccatgaaggctctgatcagctacaaatgggtggatgccaggatgaccctcctgatttcctggtccctcctggacctggatctggatctggatctggtgtccagggaagagcaaagaccaggagaaagagttccacacgaagaagaagaagaagaagaagaacaagaagaagaagaagaagaagaagaagaggaagaggaagaggaagaggaagaagaagaagaagaagaagaagaagaagaagaagaagaagaagaagaagaagaagaagaagaagaaagcctttctgacaagcaccacccaactactagttccatggaggcctggtttcaggtggctgtcatgacagcaccccctgagagcaggcacttgccatgggtgcctttcagaaaagaagctgagaaagagcagacagtgcatgtctgcactgaagtacaactggccaagggccggacatggtctctcttctcttgcttctgtgctgtaaacggctcctctgagcagttccttgagattcgtaagccaaaggcttttgttagattgaaaaatgtctgtggaggggttcaaggacctgcagggatgcagacccgtgattctctgacaggagcatgcgtcagatgtgccagggaagatagggttatgaacgtgaaaggcagaaactgttttgcccatactgcccttccatccaaagccatgaccctctgtctaggtggcactggctacagggaacagaaaacagatgcctgcaactga

SEQ ID NO: 6896 - DNA, 610 bp, Homo sapiens
ttggaaatgacgtgtaggcctaatgaaacagaactttggcagtaacacagaatgaaaggaatgagccaatataaggcaggatcaaagggtgcagagtcgtttcagcttagcaaaataagctcactttgttgttggggaaagccaaagccgattaggattacccaatgactaagcataagtcttccaaactaattacgcagttcaccatgtgaagtataattggaagcctccaaatgcgggctgctttgctttcacaggagttctagaaagcgagaattacctagcgagctcggcactgagctgccctatcattcccgggaacagctgaaaggtgcggaaccgctccatccgggacgaagcggagaattcattaagtttaaaggcctctttttgatctccaaaatcctataagtgagaatttaagaaaccggtacttgaaggaggggcctgaaggggagaaggaggaagcccgtgtgtgtggagtttctttgatccagtgcattttaattaccaggctgggctcttccgggtggctctgccgggagaacagtgcagaacaggccgcctcgtcgccagggtctacacgggcatatctggagcatcatttacc

SEQ ID NO: 6897 - DNA, 849 bp, Homo sapiens
  SIMILAR (259)..(459): 551254mologous to Homo sapiens Human RNA-associated protein- 13 (RNAAP-13),accession number Y70232,Smith-Waterman Score=171.
atgtcctccctgtggcctctgccagtgggcgtgacttgccttgcttgggtgggtgtgatgccctcttcccccataattgatagagtttccatgtggactgtggctctgctgtcaccaaaaaaagtagccatggagatggcaaggaaaccgagagaagaatgtgtgactctagggttctctgcctctcgtgtccctcaccagaatgcaaattgtggagcaggccacagtccatttggcagtcatgctggcagcattctcaaaatggtcacaagaacaaagaaaatatttgtaggcgggttatctgcgaacacagtagtggaagatgtaaagcaatatttcgagcagtttggcaagctgaaccctcccctgtcaaatgcccaaggagactcggaaaccatgcgaggcctgtacctgtcagcattctctgacctgaatgtctgtgagacagcagtaaaattaccccctgggctctgcttctggaacaggctgggaccaacccaagagccccacagcagccaggaaacagagtgtgagaaggatgaaagcagccatcaccagcaggattttggagatcaaaaagaggcctttaaacttaatgaattctccgcttcgtcccggatggagccgttccgcacctttcagctgttcccgggaatgatagggcagctcagtgccgagctcgctaggccctgggctgactatggcgatagagcggtgagcaagtgtcttccattggccaagcccaaccggaaaccaggagaccattctagggaggtcagtcttgcaaggcacaagcagggaggaaaagagcagatgatggttctggagggtcaagcagaaagtaactag

SEQ ID NO: 6898 - DNA, 647 bp, Homo sapiens
  SIMILAR (406)..(612): 821254mologous to Homo sapiens CDP-diacylglycerol synthase,accession number U65887,Smith-Waterman Score=300.
  misc_feature (1)...(647): n = a,t,c or g
cccatgtgacattgctgattgttgtaacacagtcacatcttgttatccacaacctatttgaaggaatgatctggttcattgtccccatatcttgtgtgatctgtaatgacatcatggcctatatgtttggctttttctttggtcggaccccactcatcaagctgtccccgaagaagacctgggaaggcttcattgggggcttctttgctactgtggggtttggccttctgctgtcctatgtgatgtccgggtacagatgctttgtctgccctgtggagtacaacaatgacaccaacagcttcactgtggactgtgagccctcggacctgtttcgcctgcaggagtacaacattcctggggtgatccagtcagccgattggctgggaaaacggtccggatgtacccccttccagattcacagcatcgctcctctccacctttgcctcgctcattggcccctttggaggattcttcgcaagtggattcaaacgagcctttaaaatcaaagactttgccaataccattcctggccatggaggcatcatggatcgctttgactgccagtatctgatggccacatttgtcaatgtatacatcgcctgtgtattgcggccgctgtagagtatcctaacntaagtagcatgtaa

SEQ ID NO: 6899 - DNA, 556 bp, Homo sapiens
  SIMILAR (278)..(430): 1001254mologous to Homo sapiens CDP-diacylglycerol synthase 2,accession number AF069532,Smith-Waterman Score=283.
atggtactggtgtttttcccaggtccccggttcacactcaagaacataggccaaagtcttgaaaatgcccattccaaagcatccatgggaaaggaaaagaagaatgagaaagtttttcttgacatctccccacctcgctgtgccccagaggagcaaactgatgaatgtgttcagcatgtaccacctttcttgtgggaaggagcatgggttccaggtccctgcctgcttccagaccctctgtggaagctgccgctggcactcaacttccttttccgggctgtcttatgtgatgtccgggtacagatgctttgtctgccctgtggagtacaacaatgacaccaacagcttcactgtggactgtgagccctcggacctgtttcgcctgcaggagtacaacattcctggggtgatccagtcagtcattggctggccgggggggttgtctatttccggttctccgcctcttgacgccctcgtccgcatggtccctcttacccagcagtttccgtaccaatctgcgtatcttgttttgtcccgctctttaaacaaggcataa

SEQ ID NO: 6900 - DNA, 1030 bp, Homo sapiens
  SIMILAR (4)..(39): 911254mologous to Homo sapiens putative p150,accession number U93563,Smith-Waterman Score=64.
cacacaacataccagaatctctgggacacatttaaagccagtgtatagagggaaatttatagcactaaatgcccacaagagaaagcaggaaagagctaaaattgacaccctaacatcacaattaaaagaactagagaagcaagagcgggcaaattcaaaagctagcagaaggcaagaaataactaagatcagagcagaactgaaggagatcgagacacaaaaaacccttcaaaaaactaatgaatccaggagctggttttttgaaaggatcaacaaaattgataggccattagcaagactaataaagaagaaaagagagaagaatcaaatacagtcaataaaaaatgataaaggggatatcactaccaatgccacagaaatacaaactaccatcagagaatactataaacacctctaggcaaataaactagaaaatctagaagaaatggataaattcctcgacacaaacaccctcccaagactaaacaaggaagaagctgaatctctgaacagaccaataacaggctctgaaattatggcaacaatcaatagcttaccaaccaaaaagagtccaggaccagatggattcacagccaaattctaccagaggtacaaggtggaactggtaccattccttctgaaactattccaatcaatagaaaaagagggaatcctccctaactcattttatgaggccagcatcatcatcctgataccaaagcctggccagagacacacaaaaaaagagaattttagaccaatatccttgatgaacattgatgcaaaaaatcctcaataaaatactggcaaagcaaatccagcagccatgaaaaaacagctcttctcaaaagaagcatttatcgagccaacagacatatcgagaaatctcatcatcactggtcatcagagaaatcgaaatcaaaccacaatgagataccatctcacactagttagaatggcaatcattaaaaatcaggaaacaacagatgctagagaggtcgcggagaaacagcaacggctttaatgcaat

SEQ ID NO: 6901 - DNA, 2149 bp, Homo sapiens
  SIMILAR (634)..(2148): 951254mologous to Homo sapiens putative p150,accession number U93572,Smith-Waterman Score=2492.
gaatgcagttcctcaccagcaacggaacaaagctggacagagaatgactatgacaagctgagagaagaaggcttcagacgatcaaattactctgagctacaggaggacattcaaaccaaaggcaaagatgttgaaaactttgaaaaaaatttagaagaatgtataactagaataactaatacacagaagtgcttaaaggagctgatggagctgaaaaccaaggctcgagaactacgtgaagaatgcagaagcctcaggagccgatgcgatcaactggaagaaagggtatcagtgatggaagatgaaatgaatgaaatgaagcaagaagggaagtttagagaaaaaagaataaaaagaaatgagcaaagcctccaagaaatatgggactatgtgaaaagaccaaatctacgtctgattggtgtacctgaaagtgatggggagaatggaaccaagttgaaaaacactctgcaggatattatccaggagaacttccccaatctagcaaggcaggccaaagttcagattcaggaaatacagagaatgccacaaagatattccttgacaagagcaactccaagacacataattgtcagattcaccaaagttgaaatgaaggaaaaaatgttaagggcagccagagagaaaggagcacccagattcataaagcaagtcctgagtgacctacaaagagacttagactcccacacattaataatgggagactttaacaccccactgtcaacattagacagatcaacgagacagaaagtcaacaaggatacccaggaattgaactcagctctgcaccaagtggacctaatagacatctacagaactctccaccccaaatcaacagaatacacatttttttcagcaccacaccacacgtattccaaaattgaccacatacttggaagtaaagctctcctcagcaaatgtaaaagaacagaaattataacaaactatctctcagaccacagtgcaatcaaactagaactcaggattaagaatctcactcaaaaccgctcaactacatggaaactgaacaacctgctcctgaatgactactgggtacataacgaaatgaagctagaaataaagatgttctttgaaaccaacgagaacaaagacacaacataccagaatctctgggacgcattcaaagcagtgtatagagggaaatttatagcactaaatgcccacaagagaaagcaggaaagatccaaaattgacaccctaacatcacaattaaaagaactagaaaagcaagagcaaacacattcaaaagctagcagaaggcaagaaataactaaaatcagagcagaactgaaggaaatagagacacaaaaaacccttcaaaaaattaatgaatccaggagctggttttttgaaaggatcaacaaaatagatagactgctagcaagactaataaagagaaaaagagagaagaatcaaatagatgcaataaaaaatgataaaggggacatcaccaccaatcccacagaaatacaaactaccatcagagaatactacaaacacctctacgcaaataaactagaaaatctagaagaaatggataaattcctcgacacatacactctcccaagactaaaccaggaagaagttgaatctctgaatagaccaataacaggatctgaaattgtggcaataatcaatagcttaccaaccaaaaagagtccaggaccagatggattcacagccgaattctaccagaggtacaagaaggaactggtaccattccttctgaaactattccaatcaatagaaaaagagggaatcctccctaactcattttatgaggccagcatcattctgataccaaagccaggcagagacacaaccaaaaaagagaattttagaccaatatccttgatgaacattgatgcaaaaaccctcaataaaatactggcagaccgaatccagcagcacatcaaaaagcttatccaccatgatcaagtgggcttcatccctgggatgcaaggctggttcaatatacacatatcaataaatgtaatccagcatataaacagagccaaagacaaaaaccacatgattatctgcatagatgcagaaagggcctttgacaaaattcaacaacccttcatgctaaaaactcttaataaattag

SEQ ID NO: 6902 - DNA, 1704 bp, Homo sapiens
  SIMILAR (382)..(1704): 961254mologous to Homo sapiens unknown,accession number AF148856,Smith-Waterman Score=2204.
cacaccaaaaacccatctgtacatcaccatcgtcaaagaccaaaagtagataaaaccacaaagatggggaaaaaacagaacagaaaaactggaaagtctaaaacgcagagcgcctttcctcctccaaaggaacgcagttcctcaccagcaatggaacaaagctggatggagaatgactttgacgagctgagagaagaaggcttcagacgatcaaattactctgagctacgggaggacattcaaaccaaaggcaaagaagttgaaaactttgaaaaaaatttagaagaatgtataactagaataaccaatacagagaagtgcttaaaggagctgatggagctgaaaaccaaggctcgagaactacgtgaagaatgcagaagcctcagaaattggataaagagtcaagacccatcactgtgctgtattcaggaaacccatctcatgtgcagagacacacataggctcaaaataaaaggaaggaggaagatctaccaagccaatggaaaacaaaaaaaggcaggggttgcaatcctagtctctgataaaacagactttaaaccaacaaagatcaaaagagacaaagaaggccattacataatggtaaagggatcaattcaacaagaagagctaactatcctaaaaatatatgcacccaatacaggatcaccaagattcatgaagcaagtcctgagtgacctacaaagagacttagactcccacacattaataatgggagactttaacaccccactgtcaacattagacagatcaacgagacagaaagtcaacaaggatacccaggaattgaactcagctctgcaccaagcggacctaatagacatctacagaactctccaccccaaatcaacagaatatacatttttttcagcaccacaccacacctattccaaaattgaccacatactgggaagtaaagctctcctcagcaaatgtaaaagaacagaaattataacaaactatctctcagaccacagtgcaatcaaactagaactcaggattaagaatctcactcaaaacggctcaactacatggaaactgaacaacctgctcctgaatgactactgggtacataacgaaatgaaggcagaaataaagatgttctttgaaaccaacgagaacaaagacacaacataccagaatctctgggacgcattcaaagcagtgtgtagagggaaatttatagcactaaatgcccacaagagaaagcaggaaagatccaaaattgacaccctaacatcacaattaaaagaactagaaaagcaagagcaaacacattcaaaagctagcagaaggcaagaaataactaaaatcagagcagaactgaaggaaatagagacacgaaaaacccttcaaaaaattaatgaatccaggagctggttttttgaaaggatcaacaaaattgatagaccactagcaagactaataaagaaaaaaagagagaagactcaaatagacacaataaaaaatgataaaggggatatcaccaccgatcccacagaaatacaaactaccatcagagaatactacaaacacctctacgcaaataaactagaaaatctagaagaaatggatacattcctcgacatatacactctcccaagactaaaccaggaagaagttgaatctctgaatagaccaataacaggagctgaaattgtggcaataatcaatagtttaccaacc

SEQ ID NO: 6903 - DNA, 1853 bp, Homo sapiens
  SIMILAR (337)..(1851): 941254mologous to Homo sapiens putative p150,accession number U93563,Smith-Waterman Score=2435.
atggggaaaaaacagaacagaaaaactggaaactctaaaatgcagagcgcctctcctcctccaaaggaacgcagttcctcaccagcaacggatcaaagctggatggagaatgactttgacgagctgagagaagaaggtttcagacgatcaaattactctgagctacgggaggacattcaaaccaaaggcaaagaagttgaaaactttgaaaaaaatttagaagaatgtataactagaataaccaatacagagaagtgcttaaaggagctgatggagctgaaaaccaaggctcgagaactacgtgaagaatgcagaagcctcaggagccgatgcgatcaactggaagaaagggtatcagcaatggaagatgaaatgaatgaaatgaagcaagaagggaagatcaaaagagacaaagaaggccattacataatggtaaagggatcaattcaacaagaagagctaactatcctaaatatatatgcacccaatacaggagcacccagattcataaagcaagttctgagtgacctacaaagagacttagactcccacacattaataatgggagactttaacacctcactgttaacattagacagatcaatgagacagaaagtcaacaaggatacccaggaattgaactcatctctgcaccaagcggacctaatagacatctacagaactctccaccccaaatcaatagaatatacatttttttcagcaccacaccacacctattccaaaattgaccacatagttggaagtaaagctctcctcagcaaatgtaaaagaacagaaattataacaaactatctctcagaccacagtgcaatcaaactagaactcaggattaagaatctcactcaaagccgctcaactacatggaaactgaacaacctgctcctgaatgactactgggtacataacgaaatgaaggcagaaataaagatgttctttgaaaccaacgagaacaaagacacaacataccagaatctctgggacgcattcaaagcagtgtgtagagggaaatttatagcactaaatgcccacaagagaaagcaggaaagatccaaaattgacaccctaacatcacaattaaaagaactagaaaagcaagagcaaacacattcaaaagctagcagaaggcaagaaataactaaaatcagagcagaactgaaggaaatagagacacaaaaaacccttcaaaaaatcaatgaatccaggagctggttttttgaaaggatcaacaaaattgatagaccgctagcaagactaataaagaaaaaaagagaggagaatcaaatagacacaataaaaaatgataaaggggatatcaccaccgatcccacagaaatacaaactaccatcagagaatactataaacacctctacgcaaataaaccagaaaatctagaagaaatggataaattcctcgacacatacactctcccaagactaaagcaggaagaagttgaatctctgaatagaccaataacaggagctgaaattgtggcaataatcaatagtttaccaaccaaaaagagtccaggaccagatggattcacagccgaattctaccagaggtacaaggaggaactggtaccattccttctgaaactattccaatcaatagaaaaagagggaatcctccctaactcattttatgaggccagcatcattctgataccaaagccgggcagagacacaaccaaaaaagagaattttagaccaatatccttgatgaacattgatgcaaaaatcctcaataaaatactggcaaaccgaatccagcagcacatcaaaaagcttatccaccatgatcaagtgggcttcatccctgggatgcaaggctg

SEQ ID NO: 6904 - DNA, 1305 bp, Homo sapiens
  SIMILAR (1)..(1113): 901254mologous to Homo sapiens unknown protein,accession number M22333,Smith-Waterman Score=1711.
atggtaaagggatcaattccacaagaagagctaactatcctaaatatatatgcactcaatacaggagcacccagattcataaagcaagttcttagagacctacaaagagacttagactcccacacaataataatgggagactttaacaccccactgtcaacatcagacagatcaacgagacagaaagttaacaaggatatccaggaattgaactcagctctgcaccaagcagacataatagacatctacagaactctccaccccaaatcaacagaatacacattcttctcagcaccacatcacacttattccaaaattgaccacattgttggaagtaaagcactcctcagcaaatgtcaaagaatagaaattataacaaactgtctctcagactacagtgcaatcaaactagaactcaggattcagaaactcactcaaaactgctcaactatttggaaactgaacaacctactcctgaatgactactgggtacataaagaaatgaaggcagaaataaagatgttctttgaaaccaatgagaacaaagacacaacataccaccacctctgggacacatttaaagcagtgtgtagagggaaatttatagcactaaatgcccacaagagaaagcaggaaagatttgaaatggacaccctaacatcacaattaaaagaactcaagaagcaagagcaaacacattcaaaagctagcagaaggcaagaaataactaagatcagagcagaacgtaaggagatagagacacaaaaaacccttcaaaaaatcaacgaatccgggagctggtttgttgaaaagatcaacaaaattgatagaccactagcaagactaataaagaagaaaagagagaagaatcaaatagacgcaataaaaaatgataaaggggttatcaccaccgatcccacagaaatacaaactaccatcagagaatactataaacacctctatgcaaataaactagaaaatctagaagaaatggataaattcctggacacatacaacctccgaagactaaaccagggagaagttgaatccttgaatagaccaataacaggctctgaaattgaggcaataattaatagcctaccaacaaaaaaagtccaggaccaaatggattcacagccaaattctagcagagtattggaagttctggcccgagcaatcaggcaggagaaagaaataaagggtattcagttaggaaaagaggaattcaaattgtccctgtttgcagatgacatgcctgtatatttagaaaaccccattgtttcagcccaaaatctccttaagcta

SEQ ID NO: 6905 - DNA, 1926 bp, Homo sapiens
  SIMILAR (1)..(1737): 911254mologous to Homo sapiens putative p150,accession number U93572,Smith-Waterman Score=2698.
atgggagactttaacaccccactgtcaacattagacagatcaacgagacagaaagccaacaaggatacccaggaattgaactcagctctgcaccaagtggacctaatagacatctacagaactctccaccccaaatcaacagaatatacattcttttcagcaccacaccacacctattccacaactgaccacatacttggaagtaaagctctcctcagcaaatgtagaagaacagaaattataacaaactatctctcagaccacagtgcaatcaaactagaactcagaattaagaatctcactcaaaaccgctcaactacatggaaactgaacaacctcctcctgaatgactacggggtgcataatgaaatgaaggcagaaataaagatgttctttgaaaccaatgagaacaaagacacaacataccagaatctctgggacacattcaaagcagtgtgtagagggaaatttatagcactaaatgcccacaagagaaagcaggaaagatccaaaattgacaccctaacatcacaattaaaagaactagaaaagcaagagcaaacacattcaaaagctagcagaagacaagaaataactaaaatcagagcagaactgaaggaaatagagacacaaaaaacccttcaaaaaattaatgaatccaggagctggttttttgaaaggatcaacaaaatagatagactgctagcaagactaataaagaaaaaaagagagaagaatcaaatagatgcaataaaaaatgataaaggggatatcaccactgatcccacagaaatacaaactaccatcagagaatactacaaacacctctacgcaaataaactagaaaatctagaagaaatggataaattcctgcacacatacactctcccaagactaaaccaggaagaagttgaatctctgaatagaccaataacaggatctgaaattgtggcaataatcaatagcttaccaaccaaaaagagtccaggaccagatggattcacagccgaattcgaccagaggtacaaggaggaactggtaccattccttctgaaactattccaatcaatagaaaaagagggaatcctccctaactcattttatgaggccagcatcatcctgatacgaaagcctggcagagacacaaccaaaaaagagaattttagaccaatatccttgatgaacactgatgcaaaaatcctcaataaaatactggcaaaacgaatccagcagcacatcaaaaagcttatccaccatgatcaagtgggcttcatccctgggatgcaaggctggttcaatatacacaaatcaataaatgtaatccagcatataaacagagccaaagacaaaaaccacatgattatctccatagatgcagaaaaggcctttgacaaaattcaacaacccttcatgctaaaaactctcagtaaattaggtattgacgggacatatttcaaaataataagagctatctatgacaaacccacagccaatatcatactgaatgggcaaaaactggaagcattccctttgaaaactggcacaagacagggatgccctctctcaccactcctattcaacatagtgttggaagttctggccagggcaattaggcaggagaaggaaataaaggggaacttcagcaaagtctcaggatacaaaatcaatgtacaaaaatcacaagcattcttatacaccaacaacagacaagcagagagccaaatcatgagtgaactcccattcacaattgcttcaaagagaataaaatacctaggaatccaacttacaagggatgtgaaggacctcttcgaggagaactacaaaccactgctcaatgaaataaaagaggatacaaacaaatggaagaacattccatgctcatgggtaggaagaatcaatatcgtgaaaatggccatactgcccaag

SEQ ID NO: 6906 - DNA, 1025 bp, Homo sapiens
  SIMILAR (37)..(930): 771254mologous to Homo sapiens ORF2 contains a reverse transcriptase domain.; ORF2,accession number M80341,Smith-Waterman Score=1177.
atggaggaggatctaccaagcaaatggaaaataaaaaaacaaacaaaaaaagcaggggttgtaatcctagtctctgataaaacagactttaaaccaacaaagatcaaaagagacaaagaaggccattacataatggtgaagggatcaattcaacaagaagagttaactgtgctaaatatatatgcacccaatacaggagcacccagattcatgaagcaagtccttagagacctacaaagagacttagacccccacacaacaataatgggagactttaacaccccactgtcaacattagacagatcagcgagacagaaagttaacaaggatatccaggaattgaattcagctctgcaccaagcagacctaataaacatctacagaattctccaccccaaatcaacagaatatacattcatctcagcaccacatcgcacttattccaaaattgaccacatagttggaaggaaagcactcctcagaaaatataaaagaacagaaattataacagactgtctctcagaccacagtgcaatcaaactagaactcaggattaagaaactcactcagaacagctcaactacatggaaactgaacaacctgctcctgaatgactactggatacataacaaaacgaaggcagaaataaagatgtgctttgaaaccagtgagaacaaagacacaacataccagaatctctgggacacatgtaaagcagtgtgtagagagaaatttatagcactaaatgcccacaagagaaagcaggaaagatctaaaattgacaccctaacatcacaattaaaagaactgagaagcaagagcagacacattcaaaagctagcagaagaaaatctagaagaaatggataaatacctggacacatacaccctcccaagactaaaccaggaagaatttgagtccctgaatagaccaataacagggtctgaaattgaggcaataattaatagcttaccaaccaaaaaaagttcaggaccagacggattcacagccaaattctaccagag

SEQ ID NO: 6907 - DNA, 1661 bp, Homo sapiens
  SIMILAR (283)..(1659): 921254mologous to Homo sapiens putative p150,accession number U93569,Smith-Waterman Score=2216.
atggagaatgactttgatgagttgagagaagaaggcttcagacgatcaaactactccgagctacaggaggaaattcaaaccaaaggcaaagaagttgaaaactttgaaaaaaatttagatgaatgtataactagaataaccaatacagagaagtgcttaaaggagctgatggagctgaaagccaaggctcgagaactacgtgaacaatgcagaagcctgaggagcctatgcgatcaactggaagaaagggtatcagtgatggaagatgaaatgaatgaaatgaaacacagactggcaaattggataaagagtcaagacccatcagtgtgctgtattcaggaagcctatctcacatgcagagacacacataggctcaaaataaaaggatggaggaagatctaccaagcaaatggaaaacaaaaaaaggcaggggttgcaatcctagtctctgataaaacagactttaaaccaacaaagatcaaaagagacaaagaaggcctttacataatggtaaagggatcaattccacgagaagagctaactatcctaaatatatatgcacccaatccagaagcacccagattcacaaagcaagtcctgagtgacctacaaagagacgtagactcccacacaataatactgggagactttaacaccccactgtcagcattagacagatcaatgagacagaaagttaacaaggatacccaggaattgaactcagctctgcaccaagcggacctaatagacatctacagaactctccacccaaaatcaacagaatatacatttttttcagcaccacaccacacctattccaaaattgaccacagagttggaagtaaagctcttctcagcaaatgtaaaagatcagaaattataacaaactgtctctcagaccacagtgcaatcaaactagaactcaggattaagaaactcactcaaaactgctcaactacatggaaactgaacaacctgctcctgaatgactactgggtacataacgaaatgaaggcagaaataaagatgttctttgaaaccaatgagaacaaagacacaacataccataatctctgggacacattcaaagcagtgtgtagagggaaatttatagcactaaatgcccacaagagaaagcaggaaagatccaaaattgacaccctaacatcacaattaaaagaactagaaaagcaagagcaaacacattcaaaagctagcagaaggcaagaaataactaaaatcagagcagaactgaaggaaatagagacacaaaaaacccttcaaaaaattaatgaatccaggagctggttttttaaaaagatcaacaaaattgatagaccgctagcaagactcataaagaagaaaagagagaagaatcaattagactcaataaaaaatgataaaggggatatcaccacctatcccacagaaatacaaactacaatcagagaatactacaaacacctctacacaaataaactagaaaatctagaaaaaatggataaattcctcgacacatacaccctcccaagactaaaccaggaagaagttgaatctctgaatagaccaataacaggatctgaaattgtggcactaatcaatagcttaccaaccaaaaagagtccaggaccagatggattcacagccgaattctaccagag

SEQ ID NO: 6908 - DNA, 1635 bp, Homo sapiens
  SIMILAR (2)..(49): 751254mologous to Homo sapiens putative p150,accession number U93572,Smith-Waterman Score=70.
atggaggaagatctaccaagcaaatggaaaaccaaaaaggcaggggttgcaatccgagtctctgataaaacagactttaaaccaacaaagatcaaaagagacaaagaaggccattacttaatggtaaagggatcaattcaacaagaagagctaactatcctaaatatctatgcaaccaatacaggagcacccggattcataaagcaagtcctgagtgacctacaaagagacttagactcccacacaataataatggaggactttaacaccccactgtcaacattagacatatcaatgagacagaaagtcaacaaggatacccaggaattgaactcagctctacaccaagaggacctaatagacatctacagaactctccaccccaaatcaacagaatatacatttttttcagcaccacaccacacctattccaaaattgaccacatacttggaagtaaagctctcctcagcaaatgtaaaagaacagagattataacaaactatctctcagaccacagtgcaatcaaactagaactcaggattaagaatctcactcaaagccgctcaactacatggaaactgaacaacctgctcctgaatgactactgggtacataaggaaatgaaggcagacataaagatgttctttgaaaccaatgagagcaaagacacaacataccagaatctctgggacgcattcaaagcagaagaacttgaatctctgaatagaccaataacagcctctgaaattgtggcaataatcaatagcttaccaagcaaaaagagtccaggaccagatggattcacagccaaattctaccagaggtacaaggaggaactggtaccattccttctgaaactattccaatcaatagaaaaagagggaatcctccctaactcatttgatgaggccagcatcatcctgataccaaagctgggcagagacacaaccaaaaaagagaattttagaccgatatccttgatgaacattgatgcaaaaatcctcaataaaatactggcaaaccaaatccagcagcacatcaaaaagcttatccaccatgatcaagtgggcttcatccctgggatgcaaggctggttcaatatacacaaatcaataaatgtaatccagcatataaacagaaccaaagacaaaaaccacatgattatctcaatagatgcagaaaaggcctttgacaaaattcaacaatccttcatgctaaaaactcgcaataaattaggtattgatgggacgtatctcaaaataataagagctatctatgacaaacccacagccaatatcatactgaatgggcaaaaactggaagcattccctttgaaaactggcacaagacagggatgccctctctcaccactcctattcaacatagtgttggaagtgctggccagggcgatcaggcaggagaaggaaataaagggtattcaattaggaaaagaggacgtcaaattgtccctgtttgcagatgacatgattgtatatttagaaaaccccattgtctcagccccaaatccccttaagctgataagcaacttcagcaaagtctcaggatacaaaatcaatgtgcaaaaatcacaagcattcttatacaccaataacagacagagagccaaatcataa

SEQ ID NO: 6909 - DNA, 2172 bp, Homo sapiens
  SIMILAR (817)..(2169): 871254mologous to Homo sapiens putative p150,accession number U93563,Smith-Waterman Score=2028.
atggggaaaaaacagagcagaaaaactggaaactctaaaaatgagagcacctctcctcctccaaaggaacgcagctcctcacctgcaacggaacaaagctggacggagaatgactttgacgagttgagagaagaaggcttcagacgatcaaactactccgagctaaaggaggaagttcgaacccatggcaaagaagttaaaaaccttaaaaataaattagacgaatggctaactagaataaccaatgcagagaagtccttaaaggacctgatggagctgaaaaccacggcacgagaactacgtgatgaatgcacaagcctcagtagccgattcgatcaacaggaagaaagcgactatgtgaaaagaccaaatctacctcttattggtgtacccgaaagtgacggggataacgcaaccaagttggaaaacactctgcaggatattatccaggagaactgccccaatctagcaaggcaggccaacattcaaattcaggaaatacagagaacgccacaaagatactcttcgagaagagcaactccaagacacataattgtcagattcaccaaagttgaaatgaaggaaaaaatgttaagggcagccagagagaaaggtcgggtcacccacaaagggaagcccatcaggctaacagctgctctctcagcagaaactctacaagccagaagagacaggaggccaatattcaacattcttaaagaaaagaattttcaacccagaatttcatatccagccaaactaagcttcgtaagtgaaggagaaatagaatactttacagacaagcaaatgctgagagattttctcatgaccaggcctgccctaaaagagctcctgaaggaagcactgaacatggaaacaaccggagcacccagattcataaagcaagtccttagagagctacaaagagacttagacacccacacaataataacgggagactttaacaccccactgtcaacatcagacagatcaactagacagaaagttaacaaggatatccaggaactgaactcagctctgcaccaagcggacctaatagacatctgcagaactctccaccccaaatcaatagaatatacattcttttcagcaccacaccacacctattccaaaattgaccacatagttggaagtaaagcactcctgagcaaatgcaaaagaacagaaattataacaaactgtctctcagaccacagtgcaatcaaactagaactcaggattaagaaactcactcaaaaccgctcaactacatggaaactggacaatctgctcctgaatgactactgggtacataacgaaatgaagacagaaataaagatgttctttgaaaccaatgagaacaaagacacaacataccagaatctctgggacacattcaaagcagtgtgcagagggaaatttatagcactaaatgcccacaagagaaagaagacaagatctaaaattgacaccctaacatcacaattaaaagaactagagaagcaagagcaaacacattcaaaagctagcagaaggcaagaaataactaagatcagagaagaactgaaggaaatagagacacaaaaaacccttcaaaaaatcaatgaatccaggagctggttttttgaaaagatcaacaaaattgatagaccactagcaagactagtaaagaagaaaagagagaagaatcaaatagacgtaataaaaaatgataaaggggatatcaccaccgatcccacagaaatactaactaccatcagagaataccataaacacctctacacaaataaactagaaaatctagaagaaatggataaattcctcaacacatacaccctcccaagactaaaccaggaagaagttgaatctctgaatagcccaataacaggctctgaaattgaggcaataattaatagcttatcaatgaaaaaaagtacaggaccagatggattcacagccgaattctaccagaggtacaaggaggaactggtaccattccttctgaaactattccaatcaatagaaaaagagggaatcctccctaactcattttatgaggccagcatcatcctgataccaaagcctggcagagacacaacaaaaaaagagaattttggaccaatattcctgatgaacatcaatgcaaaaatcctcaataaaatactggcaaactga

SEQ ID NO: 6910 - DNA, 1272 bp, Homo sapiens
  SIMILAR (1180)..(1272): 931254mologous to Homo sapiens putative p150,accession number U93572,Smith-Waterman Score=164.
agaagggaagtttagagaaaacagaataaaaagaaatgaacaaagcctccaagaaatatgggactatgtgaaaagaacaaatctacgtctgattggtgtacctgaaagtgattgggagaatggaaccaagttggaaaacactctgcaggatattatccaggagaacttccccaatctagcaaggtaagccaaaattcagaggataaggagtcaagacccatcaacccatctcacgtccagagacacacataggttaaaaataaagggatggaggaagatttaccaagcaaatggaaaacaaaaaaaggcagcggttacaatcctagtctctgataaaacaaactttaaaccaacaaagatcaaaagagacaacgaaggccattacataatggtaaagggatcaaatcaacaagaagagctaactatcctaaatatatatgcacctaatacaggagcacccagattcataaagcaagtccttagagatctacaaagagacttagactcccacacaataataacgggagacattaacatcccgctatcaacattagacagatcaacgaaacagaaagttaacaaggatacccaggaattaaactcagctctgcaccaagtggacctaatagacatctacagaactctccaccccaaatcaatagaatatacatttttttcagcaccacaccacacctattccaaagttgaccacatacttggaagtaaagcactcctcagcaaatgtgaaagaatagaaattataacaaactgtctctcagaccacagtgcaatcaaactagaactcaggattaagaatctcactcaaaaccactcaattacatggaagctgaacaacctgttcctgaatgactactgggtacataacgaaatgaaggcagaaataaagatgttctttgaaaccagtgagaacaaagacacaacataccagaatctctgggacgcattcaaagcagtgtgtagagggaaatttatagcactaaatgcccacaagagaaagcaggaaagatccaaaatttacaccctaacgtcacaattaaaagaactagaaaagcaagagcaaacacattcaaaagctagcagaaggcaagaaataattaaaatcagagcagaactgaaggaaatagagacacaaaaaacccttcaaaaacttaatgaatccatctcccaccagttagaatggcaatcattaaaaagtcagaaaacaacaggtgctggagaggatgtggagaaataggaacacttttacactgt

SEQ ID NO: 6911 - DNA, 1125 bp, Homo sapiens
  SIMILAR (7)..(714): 901254mologous to Homo sapiens putative p150,accession number U93570,Smith-Waterman Score=1110.
atgcctatcctagtctatgatagaacagactttaaaccaacaaagatcaaaagaggcaaagaaggccattacgtaacggtaaagggatcaattcaacaagaagaactaactaccctaaatatatatgcacccaatacaggagcacccaggttcataaagcaagtcctgagtgacctacaaagagacttagactcccacacaataacaatgggagactttaacaccccactgtcaacattagacagatcaacgagacagaaagttaacaaggatatccaggaattgaactcagctctgcaccaagaggacctaatagacatctacagaactctccaccccaaatcaacagaatatacattcttttcagcaccacaccacaccaattccaaaattgaccacatagttggaagtaaagcactcctcagcaaatgtaaaagaacagaaattataacaaactgtctctcagaccacagtgcaatcaaactagaactcaggattaagaaactcactcataaccgctcaactacatggaaactgaacaacctgctcctgaatgactactgggtacataacgaaatgaaggcagaaataaagaggttctttgaaaccaatgagaacaaagacacagcataccagaatctctgggacacattcaaagcagtgtgtagagggaaatttatagcactaaatgcccaaaagacaaagcaggaaagactaaaccaggaagaagctgaatctgtgaatagaccaataacaggctctgaaatggaagcaataattaatagcttaccaaccaaaaaaagtgcaagaccagatggattcacagacgaattctaccagaggtacaaggaggagctggtaccattccttctgaaactgttccaatcaatagaaaaagagggaatcttccctaactcattttatgaggccagcatcatcctgataccaaagcatggcagagacacaaccaaaaaagagaattttataccaatatccttgatgaacattgatgcaaaaatcctcaataaaatactggcaaatcgaatccagcaacacatcaaaaagcttatccaccatgatcaagtgggcttcatccctgggatgcaaggctggttcaacgtatga

SEQ ID NO: 6912 - DNA, 1539 bp, Homo sapiens; identical to SEQ ID NO: 3746
  SIMILAR (658)..(1536): 951254mologous to Homo sapiens putative p150,accession number U93568,Smith-Waterman Score=1457.

SEQ ID NO: 6913 - DNA, 1209 bp, Homo sapiens
  SIMILAR (1185)..(1208): 871254mologous to Homo sapiens ORF2, encodes a reverse transcriptase homolog,accession number U09116,Smith-Waterman Score= 40.
agccagcacaacccttcagaaggacaaatgccttcttgttcaatcaccctggaaaacataggtgccagagaaagagaggagcagaagcagcctccagagtgggtgagaggactcatcaaacatctaaatgtgccctttggtgatggactaaatatgctgcaggaacgcagctcctcaccagcaacagaacaaagctggatggagaatgactttgacgagttgagagaagaaggtttcagacgactggacttccttacaagagcccctgaaggaagcactaaacatggaaaggaaaaaccaggaccagccactgcaaaaacatgccaaattgtaaaggccatcgatgctaggaagaaactgcatcaactaatgagcaaaataaccagtggcaacattagatcaacgaaacagaaagttaacaaggatacccaggaattgaactcagctctgcaccaagcagacctaatagacatctacagaactctccaccccaaatcaacagaatatacattcttctcagcaccacatcacacttattctaaaattgaccacatagtcggaagtaaagcactcctcagcaaatgtaaaagaacagaaattataacgaactgtctctcagaccacagtgcaatcaaactagaactcaggattaagaaactcactcaaaactgctcaaccacatggaaactgaacaacctgttcctgagtgactactgggtacataacgaaatgaaggcagaaataaagatattctttgaaaccaatgagaacaaagacacaacataccggaatctctgggacacatgtaaagcagtgtgtaaagggaaatttatagcactaaataaccacaagagaaagcaggaaagatctaaaattgacaccctaacatcacaattaaaagaactagagaagcaagagcaaatatattcaaaagctggcagaagacttgaaataactaagatcagagcagaactgaaggagatagagacacaaaaaacccttcaaaaaaaaatcaatgaatccaggagctggtgttttgaaatgatcaacaaaattgatagaccgctagcaagactaataaagaagaaaagagagaagaatcaaatagacacaataaaaaatgataaaggggatatcaccaccgatcccacagaagtacaaactaccatcagagaatactataaaaacacctctattcaaataaactag

SEQ ID NO: 6914 - DNA, 1287 bp, Homo sapiens
  SIMILAR (307)..(1284): 841254mologous to Homo sapiens unknown,accession number AF148856,Smith-Waterman Score=1410.
atggtaacagctcctccttgtacctctggtacaattcggctgcgaatccatctggtcctggactttttttggttgccaccgctgctgatacccaggcaaaaagggtctggagtggacttccagcaaactccaacagacctgcagctgagggtcctgaccgttagcaggaaaactaacaaacagaaaggacatccacaccaaaaacccatctgtatgtcaccatcatcaaagaccaaagagaagtccttaaaggacctgatggagctaaaaatcatggcacaagaactatgtgatgaatggacaagcctcagtagccgatgcaatcaactggaagaaagggtatcagtgatggaagatgaaatgaatgaaatgaaagacaagcataggcccaaaataaaggaatggaggaagatctaccaagcaaatggacaacaaaaaaagacaagggttgcaaacctagtctcagataaaacagagtttaaaccaacaaagatcaaaagagacaaagaaggccattacataatggtaaagggatcaattcaacaagaagagctaactatcgtaaatatatatgcacccaatacaggagcacccaggttcataaagaaagtccttagtgacctacaaagagccttagactcccacacaataataatgggagactttaacaccccactatcaacattagacagatcaacgagacagaaagtcaacaaggatatccaggaattgaactcagctctgcaccaagcggacctaatagatatctacagaactctccaccctaaatcaacagaatatacattcttttcagcaccacattacacctatcccaaaattgaccacatagttggaagtaaagcactcctcagcaaatgtaaaagaacagaaattataacaaactgtctctcagaccacagtgcaatcaaactagaactcaagattaagaaactcactcaaaacctctcaactacatggaaactgaacaacctgctcctaaaggactactgggtacataaagaaatgaaggcagaaataaagatgttctttgaaaccaacaagaacaaagacacaacataccagaatttctgggacacattcaaagcagtgtgtagagggaaatttatagcactaaatgcccacaagagaaagcaggaaggatttaaaatagacaccctaacattacaattaaaagaactagagaagcaagagcaaacacattcaaaagctagcagaaggcaagaagtaactaagatcagagcagaactgaaggaaatagagacataa

SEQ ID NO: 6915 - DNA, 1056 bp, Homo sapiens; identical to SEQ ID NO: 2097
  SIMILAR (397)..(1053): 951254mologous to Homo sapiens putative p150,accession number U93568,Smith-Waterman Score=1089.

SEQ ID NO: 6916 - DNA, 963 bp, Homo sapiens
  SIMILAR (939)..(962): 871254mologous to Homo sapiens ORF2, encodes a reverse transcriptase homolog,accession number U09116,Smith-Waterman Score= 40.
gacttccttacaagagcccctgaaggaagcactaaacatggaaaggaaaaaccaggaccagccactgcaaaaacatgccaaattgtaaaggccatcgatgctaggaagaaactgcatcaactaatgagcaaaataaccagtggcaacattagatcaacgaaacagaaagttaacaaggatacccaggaattgaactcagctctgcaccaagcagacctaatagacatctacagaactctccaccccaaatcaacagaatatacattcttctcagcaccacatcacacttattctaaaattgaccacatagtcggaagtaaagcactcctcagcaaatgtaaaagaacagaaattataacgaactgtctctcagaccacagtgcaatcaaactagaactcaggattaagaaactcactcaaaactgctcaaccacatggaaactgaacaacctgttcctgagtgactactgggtacataacgaaatgaaggcagaaataaagatattctttgaaaccaatgagaacaaagacacaacataccggaatctctgggacacatgtaaagcagtgtgtaaagggaaatttatagcactaaataaccacaagagaaagcaggaaagatctaaaattgacaccctaacatcacaattaaaagaactagagaagcaagagcaaatatattcaaaagctggcagaagacttgaaataactaagatcagagcagaactgaaggagatagagacacaaaaaacccttcaaaaaaaaatcaatgaatccaggagctggtgttttgaaatgatcaacaaaattgatagaccgctagcaagactaataaagaagaaaagagagaagaatcaaatagacacaataaaaaatgataaaggggatatcaccaccgatcccacagaagtacaaactaccatcagagaatactataaaaacacctctattcaaataaactag

SEQ ID NO: 6917 - DNA, 1163 bp, Homo sapiens
  SIMILAR (3)..(836): 821254mologous to Homo sapiens unknown,accession number AF148856,Smith-Waterman Score=1186.
actttaaaccaacaaagatcaaaagagacaaagaaggccactacataatggtaaagggatcaattcaacaagaagagctaactatcctaaatatatatacacccaatacaggagcacccagattcataaagcaagtccttagagacctacaaagagacttagactcccatacaataatagtgggagactttaacaccccactgtcaacattagacagttcaaagagacagaaggttgacaaggatatccaggaattgaactcagctctgtaccaagcagacctaacagacatctacagaactctccaccccaaatcaacagaatatacatttttttcagcaccacaccacacctattccaaaattgaccacatagttggaagtaaagcactcctcagcaaatgtaacagaacagaaattataacaaactgtctctcagaccacagtgcaatcagactagaactcaggattaagaaactcactgaaaaccgctcaactacatggaaactgaacaacctgctcctgaaagactactgggtacataacgaaatgaaggcagaaataaagatgttctttgaaaccaatgagaacaaagacacaacataccagaatctctgggacacaggcaaagctgcgtgtagagggatatttatagcaataaatgcccacaagagaaaccagaaaagatctaaaatggacaccctaacatcacaattaaaagaattagagaagcaagagcaaagacattcaaaagctagcagaagactaaaccaggaagaagttgaatctctgaataaaccaagaacaggctctgaaattgaggcaataattaacagcttaccaaccaaaaaaagtccaggagcagatggattcacagccgaattctaccagaggtacaaggaggagctgggaccattccttctgaaactattccaatcaatagaaaaagagggaatactccctaactcattttatgaggccagcatcatcctgataccaaagcctgacagagacacaacaaaaaaagagaattttaggccaatatgcctgatgaacatccatgcaaaaatcatcaataaaatactggcaaaccaaatccagcagcacatcaaaaagcttatccaccatgatcaagtgggcttcatccctaggatgcaaggctag

SEQ ID NO: 6918 - DNA, 1364 bp, Homo sapiens
  SIMILAR (1)..(1224): 941254mologous to Homo sapiens unknown,accession number AF148856,Smith-Waterman Score=1971.
atggtaaagggatcaattcaacaagaagagctaactatcctaaatatttatgcacccaatacaggagcacccagattcataaagcaagtcctgagtgacctacaaagagacttagactcccacacattaataatgggagactttaacaccccactgtcaacattagacagatcaacgagacagaaagtcaacaaggatacccaggaattgaactcagctctgcaccaagcggacctaatagacgtctacagaactctccaccccaaatcaacagaatatacatttttttcagcaccacaccacacctattccaaaattgaccacatagttggaagtaaagctctcctcagcaaatgtaaaagaacagaaattataacaaactatctctcagaccacagtgcaatcaaactagaactcaggattaagaatctcactcaaagccgctcaactacatggaaactgaacaacctgctcctgaatgactactgggtacataacgaaatgaaggcagaaataaagatgttctttaaaaccaacaagaacaaagacaccacataccagaatctctgggacgcattcaaagcagtgtgtagagggaaatttatagcactaaatgcctacaagagaaagcaggaaagatccaaaattgacaccctaacatcacaattaaaagaactagaaaagcaagagcaaacacattcaaaagctagcagaaggcaagaaataactaaaatcagagcagaactgaaggaaatagagacacaaaaaacccttcaaaaaatcaatgaatccaagagctggttttttgaaaggatcaacaaaattgatagactgctagcaagactaataaagaaaaaaagagagaagaatcaaatagacacaataaaaaatgataaaggggatatcaccaccgatcccacagaaatacaaactaccatcagagaatactacaaacacctctacgcaaataaactagaaaatctagaagaaatggatacattcctcgacacatacactctcccaagactaaaccaggaagaagttgaatctctgaatagaccaataacaggctctgaaattgtggcaataatcaatagtttaccaactaaaaagagtccaggaccagatggattcacagccgaattctaccagagagtgggtggcctggagactgagaatcggaggctagaaatcaaaatctgggaacatctggagaagaaggggccccaggtcagagactggggacattatgttaagaccacagaggacttcagggctcagacttttgcaaattctgtggacaatgcctgcattgttctgcagattggcaaggcctatcttgctgctgatgattttagagtcaa

SEQ ID NO: 6919 - DNA, 1003 bp, Homo sapiens
  SIMILAR (1)..(726): 881254mologous to Homo sapiens putative p150,accession number U93569,Smith-Waterman Score=1110.
atggtaaagggatcaattcaacaagaagagctaactatcctaaatatatatgcacccaatacaggagcacccagattcataaagcaagtccttagagacctacaaagagacttagatgcccacacaataataatagcagactttaacaccccactgttaatattagacagatcaatgagacagaaggttaacagggatatccaggacttgaactcagctctgcaccaagtggacctaatagacatctacagaactctccaccccaaatcaacagaatatacattcttctcagcaccacatcacacttattccaaaacttaccacatagttggaagtaaagcactcctcagcaaatgtaaaagaacagaagtcacaacaaactgtctctcagaccacagtgcaatgaaattagaactcaggattaagaaactcactcaaaaccgcacaactacatggaaactgaacaacctgctcctgaatgactactgggtaaataatgaaatgaaggcagagataaagatgttctttgaaaccaatgagaaaaaagacacaacgtaccagaatgtctgggacacatttaaagcagtgtgtagagggaaatttataggactaaatgcccataagagaaagcaggaaagatctaaaattgacaccctaacatcacagttaaaagaactagagaagcaagagcaaacaaattcaaaagctagcagaagtcaaaaaatagatgagaaaacagactcagacagcatcccacccaagatagtatttggcagcgctgaaattgaaactaaaagagactacactcttaaccagtatactaaaatgcttctaagtgattcatgccttggacaattgtccttttccaagtccattatttctgcaattttcaatcctgtcttcactatagttgtttactcttttgctaaggcagcaaagccttcagggcacaggctctggagccagataaaggagatctatatgccgggccactgcacacaag

SEQ ID NO: 6920 - DNA, 1205 bp, Homo sapiens
  SIMILAR (1)..(1038): 971254mologous to Homo sapiens putative p150,accession number U93563,Smith-Waterman Score=1746.
atgggagactttaacaccccactgtcaacattagacagatcaacgagacagaaagtcaacaaggatacccaagaattgaactcagctctgcaccaggtggacctaatagacatctacagaactctccaccccaaatcaacagaatatacatttttttcagcaccacaccacacctattccaaaattgaccacatggttggaagtaaagctctcctcagcaaatgtaaaagaacagaaattataacaaactatctctcagaccacagtgcaatcaaactagaactcaggattaagaatctcactcaaagccgctcaactacatggaaactgaacaacctgctcctgaatgactactgggtacataacgaaatgaaggcagaaataaagatgttctttgaaaccaacgagaacaaagacacaacataccagaatctctgggacacattcaaagcagtgtgtagagggaaatttatagcactaaatgcccacaagagaaagcaggaaagatccaaaattgacaccctaacatcacaattaaaagaactagaaaagcaagagcaaacacattcaaaagctagcagaaggcaagaaataactaaaatcagagcagaactgaaggaaatagagacacaaaaaacccttcaaaaaatcagtgaatccaggagctggttttttgaaaggatcaacaagattgatagaccactagcaagactaataaagaaaaaaagagagaagaatcaaatagacacaataaaaaatgataaaggggatatcaccaccgatcccacagaaatacaaactaccatcagagaatactacaaacacctctacgcaaataaactagaaaatctagaagaaatggataaattcctcaacacatacactctcccaagactaaaccaggaagatgttgaatctctgaatagaccaataacaggagctgaaattgtggcaataatcaatagtttaccaaccaaaaagagtccaggaccagatggattcacagctgaattctaccagaggtacaaggaggaactggcgcgagccgccgcttgcagcacagaacccgttgagcttcgtgcccggcagcacccccggtcccgcgcggggcggacttgcggcgggacaggtgtagcccgcagccgcagtcctgcgctcaggactgggcgggctcggctggccgtccccgccacgcaggccggtcg

SEQ ID NO: 6921 - DNA, 1917 bp, Homo sapiens
  SIMILAR (1)..(1566): 941254mologous to Homo sapiens putative p150,accession number U93563,Smith-Waterman Score=2537.
atggtaaagggatcaattcaacaagaagagctaactatcctaaatacatatgcagcccatacaggagcaccaagactcataaagcaagtcctgagtgacctacaaagagacttagactcccacacaataataatgggagactttaacaccccactgtcaacattagacagatcaacgagacagaaagttaacaaggatacccaggaattgaagtcagctctgcaccaagcggacctaacagacatctacagaactctccaccacaaatcaacagaatatacatttttttcagcaccacaccacatctattccaaaattgaccacatactgggaagtaaagctctcctcagcaaatgtaaaagaacagaaattataacaaactatctctcagaccacagtgcaatcaaactagaactctggattaagaatctcactcaaaaccactcaactacatgggaactgaacaacctgctcctgaatgactactgggtacataacgaaatgaaggcagaaataaagatgttctttgaaaccaatgagaacaaagacacaacataccataatctctgggacacattcaaagcagtgtgtagagggaaatttataccactaaatgcccacaagagaaagcaggaaagatccaaaattgacaccctaacatcacaattaaaagaactagaaaagcaagagcaaacacattcaaaagctagcagaaggcaagaaataactaaaatcagagcagaactgaaggaaatagagacacaaaaaacccttcaaaaaattaatgaatccaggagctggttttttgaaaggatcaacaaaattgatagactgctagcaagactaataaagaaaaaaagagagaagaatcaaatagatgcaataaaaaatgataaaggagatatcaccaccgatcccacagaaatacaaactaccatcagagaatactgcaaacacctctatgcaaataaactagaaaatctagaagaaatggataaattcctggacacatacactctcccaagactaaaccaggaagaagttgaatctctgaatagaccaataacaggagctgaaattgtggcaataatcaatagcttaccaaccaaaaagagtccaggaccagatggattcacagccaaattctaccagaggtacaaggaggaactggtaccattccttctgaaactattccaatcaatagaaaaagagggaatcctccctaactcattttatgaggccagcatcattctgataccaaagccaggaagagacacaacaaaaaaagagaattttagaccaatatccttgatgaacattgatgcaaaaatcctcaataaaaaactggcaaaacgaatccagcaacacatcaaaaagcttatccaccatgatcaagtgggcttcatccctggaatgcaaggctggttcaatatacgcaaatcaataaatgtaatccagcatataaacagagccaaagacaaaaaccatatgattatctcaatagatgcagaaaaagcctttgacaaaattcaacaacccttcatgctaaaaactctcaataaattagagaataaaatacctaggaatccaccttacaagggatgtgaaggacctcttcaaggagaactacaaaccactgctcaaggaaataaaagaggatacaaacaaatggaagaacattccatgctcatgggtaggaagaatcaatatcgtgaaaatggccatactgcccaagatgtgcctctaaaggaggtggactccactctgtttactgacagcagcagcttccttgaacagggagtaggaaaggctggtgcagccgttactatggagacagatgtactgtgggcccaggcactgccggcaggtacctcagcacagaaggctgaattggtcaccttcactcaggctctctga

SEQ ID NO: 6922 - DNA, 2676 bp, Homo sapiens
  SIMILAR (466)..(2307): 721254mologous to Homo sapiens putative p150,accession number U93563,Smith-Waterman Score=2170.
gactatgtgaaaagaccaaatctacctcttattggtgtacccgaaagtgacggggataacgcaaccaagttggaaaacactctgcaggatattatccaggagaactgccccaatctagcaaggcaggccaacattcaaattcaggaaatacagagaacgccacaaagatactcttcgagaagagcaactccaagacacataattgtcagattcaccaaagttgaaatgaaggaaaaaatgttaagggcagccagagagaaaggtcgggtcacccacaaagggaagcccatcaggctaacagctgctctctcagcagaaactctacaagccagaagagacaggaggccaatattcaacattcttaaagaaaagaattttcaacccagaatttcatatccagccaaactaagcttcgtaagtgaaggagaaatagaatactttacagacaagcaaatgctgagagattttctcatgaccaggcctgccctaaaagagctcctgaaggaagcactgaacatggaaacaaccggagcacccagattcataaagcaagtccttagagagctacaaagagacttagacacccacacaataataacgggagactttaacaccccactgtcaacatcagacagatcaactagacagaaagttaacaaggatatccaggaactgaactcagctctgcaccaagcggacctaatagacatctgcagaactctccaccccaaatcaatagaatatacattcttttcagcaccacaccacacctattccaaaattgaccacatagttggaagtaaagcactcctgagcaaatgcaaaagaacagaaattataacaaactgtctctcagaccacagtgcaatcaaactagaactcaggattaagaaactcactcaaaaccgctcaactacatggaaactggacaatctgctcctgaatgactactgggtacataacgaaatgaagacagaaataaagatgttctttgaaaccaatgagaacaaagacacaacataccagaatctctgggacacattcaaagcagtgtgcagagggaaatttatagcactaaatgcccacaagagaaagaagacaagatctaaaattgacaccctaacatcacaattaaaagaactagagaagcaagagcaaacacattcaaaagctagcagaaggcaagaaataactaagatcagagaagaactgaaggaaatagagacacaaaaaacccttcaaaaaatcaatgaatccaggagctggttttttgaaaagatcaacaaaattgatagaccactagcaagactagtaaagaagaaaagagagaagaatcaaatagacgtaataaaaaatgataaaggggatatcaccaccgatcccacagaaatactaactaccatcagagaataccataaacacctctacacaaataaactagaaaatctagaagaaatggataaattcctcaacacatacaccctcccaagactaaaccaggaagaagttgaatctctgaatagcccaataacaggctctgaaattgaggcaataattaatagcttatcaatgaaaaaaagtacaggaccagatggattcacagccgaattctaccagaggtacaaggaggaactggtaccattccttctgaaactattccaatcaatagaaaaagagggaatcctccctaactcattttatgaggccagcatcatcctgataccaaagcctggcagagacacaacaaaaaaagagaattttggaccaatattcctgatgaacatcaatgcaaaaatcctcaataaaatactggcaaaccgaatccagcagcacatcaaaaagcttatccactatgatcaagtgggcttcatccctgggatgcaaggcagggcaatcaggcaggagaaggaaataaagggtattcaattaggaaaagaggaagtcaaattgtccctgtttgcagatgacatgattgtgtatctagaaaaccccatcgtctcagcccaaaatctccttaagctgataagcaacttcagcaaagtctcaggatacaaaatcaatgtgcaaaaaccacaagcattcttatacaccaataacagacaaacagagagccaaatcatgagtgaactcccattcacaattgcttcaaagagaataaaaaacctaggaatccaacttacaagggatgtgaaggacctcttcaaggagaactacaaaccactgctcaatgaaataaaagaggatacaaacaaatggaagaacattccatgctcatgggtaggaagaatcaatatcatgaaaatggtcatactgcccaaggggcttgctcctgcagacaaactgggagccgttctaaaggagagggtcacatttccaacacagctaataaagtggcatgcccaggatgcaggaaagggggcacagtgtgactgcggagtggtgatctgcagccgagtggcattgctgacaagcagacatcaccctatcctaccatctgactcacagaactgtaaagaattccaagttttcaccaaattaaatgcaaacagtaaaaagagaagcgctcaacagaagcattacaaagatgaggttctggccctgcttctgccacttgccccagcccatctagcaggctgtcatgatgctcagacacagagtcagcagcagcagggctag

SEQ ID NO: 6923 - DNA, 2670 bp, Homo sapiens
  SIMILAR (391)..(1581): 931254mologous to Homo sapiens putative p150,accession number U93569,Smith-Waterman Score=1908.
aacgactattaccgtcccatgaaccttacagaaaacaacgtacgattgtcctgacattattgtactatgattggtgcccatgccaccctacccgctgaaacggactctgaactggtgagaggagtgtggcattattgtactatgattggtgcccatgccaccctacctgctgaaacagactctgaactggtgagaggagtgtggtatttgaacttaattcaaccttactttagtgggaagggagggcagaaagcaagtgaacctggtgctctgggaggtatatggtagggtgccgcactggcatctgcttctggtgagggccttaggaagcttacaatcgtggcggaaggtgaaggaggagcaggcatgtcacttggtgagagtggaaacaagatcaaaagagacaaagaaggccattacataatggtaaatggatcaattcaacaagaagagctaactatcctaaacatatatgcacccaatacaggagcacccagattcataaagcaagtccttagagacctacaaagagacttagactcccacacaataataatgagagactttaacaccccactgtcagcattagagagatctacgagagagaaagttaacaaggatatccaggaattgaactcagctctgcaccaagcagatctagtagacatctacagaactctccaccccaaatcaacagaatatacattcttctcagcaccacatcgcacttattccaatattgaccacatagttggaagtaaagcactcctcagcaattgtaaaagaacagaaattataacaaagtgtctttcagaccacagtacaatcaaactagaactcaggattaagaaactcactcaaaaccgctcaactacatggaaactgaacaacctgctcctgaatgactactgggtacataatgaaatgaaggcagaaataaagatgttctttgaaaccattgagaacaaagacacaacataccagaatctctgggacacatttaaagcagagtgtagagggaaatttatagcactaaatgcccacaagagaaagcaagaaagatctaaaattgacaccctaacatcacaattgaaagaactagagaaacaagagcaaacacattcaaaagctagcagaaggcaagaaataactaagatcagagcagagctgaaggagacagagacacaaaaaacccttcaaaaaattaatgaatccaggagctggttttttgaaaggatcaacaaaattgatagaccgctagcaagactaataaagaaaaaaagagagaagaatctaatagatgcaataaaaaatgataaaggggatatcaccaccgatcccacagaaatacaaactaccatcagagaatactacaaacacctctacgcaaataaactagaaaatctagaagaaatggataaattcctcgacacatacactctcccaagactgaaccaggaagaagttgaatctctgaatagaccaataacaggatctgaaattgtggcaataatcaatagcttaccaaccaaaaagagtccaggaccagatggattcacagccgaattctaccagaggcacacagtatcaatactcatcagctattgtcagggtggaagcctgatgagccaagtatactggaaccagcaagagaaacccccttcctccagcaacgcccctccagggctctctgttaacaaagctcagcatcgtcatgtttgctgcagaggagaaatgctaaaaagggtccaggttcattatgtcagagcaggggaatctgacagtgctagctttcactgtgtggcccaaggcccaagagcctttggcaaaccactgatcctctccaaagagaatcatctcttgactgtcactgcaatagccaaattaaaccacaaattatgtgaaattaaaagcatgggtgtttttatcaacacagagcccctgtatgacagttgtttagaacagaaacatgctctttttgcctctcctccagccaccacccactccactaccatgatcagtaaggcaaaggtgataccgatgctttctctgacgccagggagtttccaaaccgtggaaagctctttggccccctctgctggtaagttccaggggacagaaacaagctctctgaagactctcattaatctttgctgtccgaagctaccttctccatctcctgctcacctgggaggactccctggaggaagccaggaaagaccatcaaggcagtacctctatgagtctgcaagaaccactgtgttactgggcttggggtgtcccctaaagcagatacagcttagatcacaacactcaagtcctttagaatacctggagagccttcccaagaaggacagaaaaaaaagagagaagatccaaataaataaagtcagagatgaaaaaggagacattacaaccaatagtgcagaaattcaaaggatggttattggctaccatgagcaactatatgccaataaattggaaaatctagaagaaatggacaaatttctagacacatacgacctaccaagattgaaccatgaagaaatccaaaagctggacagaccaataacaagtaacaagattgaagctgtaaaaaaaagtctcccagtaaagaaaagcctggaacctgatggcttcactgctgagtttcaccaaacatttagataa

SEQ ID NO: 6924 - DNA, 1687 bp, Homo sapiens
  SIMILAR (1652)..(1687): 1001254mologous to Homo sapiens putative p150,accession number U93574,Smith-Waterman Score=60.
atgttaaagggatcaattcaacaagaagagctaactgtcctaaatatatatgcacccaatacaggagcacccagatgcataaagcaagtcctgagtgacgtacaaagagacttagactccaacacattaataatgggagactttaacaccccactgtcaacattagacagatcaacgagacagaaagtcaacaaggatacccaggaattgaactcagctctgcaccaggcggacctaatagacatctacagaactctccaccccaaatcaacagaatatacatttttttcagcaccacaccacacctattccaaaattgaccacatacttggaagtaaagctctcctcagcaaatgtaaaagaacagaaattataacaaactctctctcagaccacagtgcaatcaaactagaactcaggattaagaatctcactcaaaaccgctcaactacatggaaactgaacaacctgctcctgaatgactactgggtacataacgaaatgaaggcagaaataaagatgttctttgaaaccaaggagaacaaagacacaacataccagaatctctgggacgcattcaaagcagtgtgtagagggaaatttatagcactaaatgcctacaagagaaagcaggaaagatcaaaaattgacactctaacatcacaattaaaagaactagaaaagcaagagcaaacacattcaaaagaaatacaaactaccatcagagaatactacaaacacctctacacaaataaactagaaaatctagaagaaatggataaattcctcgacacatacactctcccaagactaaaccaggaagaagttgaatctctgaatagaccaataacaggatctgaaattgtggcaataatcaatagcttaccaaccaaaaagagtccaggaccagatggattcacagctgaattctaccagaggtacaaggaggaaatgcatataaacagagccaaagacaaaaaccacatgattatctcaatagatgcagaaaaggcctttgacaaaattcaacaacccttcatgctaaaaactctcaataaattaggtattgatgggacatatttcaaaataataagagctatctatgacaaacccacagtcaatatcatactgaatgggcaaaaactggaagcattccctttgaaaactggcacaagacagggatgccctctctcaccactcctattcaacatagtgttggaagttctggccagagcaataaggcaggagaaggaaataaagggtattcaattaggaaaagaggaagtcaaattgtcccctctttgcagatgacatgattgtatatgtagaaaacccccttccgtctcagccccaaaatcttctttaaggctggttaagcaacttcagcaaaagtcttcaggttacaaaatcaatgtgcaaaaatcacaagcattcctatacaccaacaacagacaaacagagagccaaatcatgagtgaactcccattcacaattgcttcaaagagaataaaatacctaggtatccaatttacaagggatgtgaaggacctcttcaaggagaactacaaaccactgctcaatgaaataaaagaggatacaaacaaatggaagaacattccatgctcatgggtaggaagaatcaatatcgtgaaaaatggccatactgcccaaggtaatttatagattc

SEQ ID NO: 6925 - DNA, 2431 bp, Homo sapiens
  SIMILAR (557)..(2206): 921254mologous to Homo sapiens putative p150,accession number U93574,Smith-Waterman Score=2603.
atggaggagagagatgcttttgaagcatgttcctgttcagttcagctgggcttgatttcaagctacagatttggtccagatgtgctccttatgtcttcttcaccctctttggaccaacaggctaaccaggatatttcttctcatggcagaagcaaaagaagggccagcccaactgcacaagtacatttgcaggctctgcttatatcaagtctactagtattctatcgagccaagcaagtcacagggccaaaccccacgtcaatgaagcagagagactttaaaccaacaaagatcaaaagagacaaagaaggccattacataatggtaaagggatcaattcaacaagaagagctaactatcctaaatatatatgcacccaatacaggagcacccagattcataaagcaagtcctgagtgacctacaaagagacttagactcccacacattaataatgggagactttaacaccccactgtcaacattagacagatcaacaagacagaaagtcaataaggatacccaggaattgaactcagctctgcaccaagcggaccttaatagacatctacagaactctccaccccaaatcaacagaatatacatttttttcagcaccacaccacacctattccaaaattgaccacatacttggaagtaaaggtctcctcagcaaatgtaaaagaacagaaattataacaaactatctctcagaccacagtgcaatcaaactagaactcaggattaagaatctcactcaaaaccgctcaacttcatggaaactgaacaacctggtcctgaatgactactgggtacataacgaaatgaaggcagaaataaagatgttctttgaaaccaatgagaacaaagacacaacataccagaatctctgggatgcattcaaagcagtgtgtagagggaaatttatagcactaaatgcccacaagagaaagcaggaaatatccaaaattgacaccctaacatcacaattaaaagaactagaaaagcaagagcaaacacattcaaaagctagcagaagccaagaaataactaagatcagagcagaactgaaggaaatagagacacaaaaaacccttcaaaaaattaatgaatccaggagctggttttttgaaaggatcaacaaaattgatagaccactagcaagactaataaagaaaaaaagagagaagaatcaaatcgacacaataaaaaatgataaaggggatatcaccaccaatcccacagaaatacaaactaccatcagagaatactgcaaacacctctatgcaaataaactagaaaatctagaagaaatggataaattcctcgacagactaaaccaggaagaagttgaatctctgaatagaccaataacaggagctgaaattgtggcaataatcaatagcttaccaaccaaaaagagtccaggaccagatggattcacagccaaattctaccagaggtacaaggaggaactggtaccattccttctgaaactattccaatcaatagaaaaagagagaatcctccctaactcattttatgaggccagcatcatcctgttaccaaagccgggcagagacataacaaaaaaagagaattttagaccaatatccttgatgaacattgatgcaaaaatcctcaataaaatactggcaaaccgagtccagcagcacaaaaagcttatccaccatgatcaagtgggcttcatccctgggatgcagggctggttcaatatacacaaatcaataaatgtaatccagcatataaacagaactaaagacaaaaaccacatgattatctcagtagatgcagaaaaggcctgtgacaaaattcaacaacccttcatgctaaaaactctcaataaattaggtattgatgggacgtatctcaaaataataagagctatctatgacaaacccacagccagtatcatactgaatgggcaaaaactggaagcattccctttgaaaactggcacaagacagggatgccctctctcaccactcctattcaacatagtgttggaagttctggccaggacaatcgggcaagagaaagaaataaagggtattcaattaggaaaagaggaagtcaaattgtccctgtctgcagatgacatgattgtatatctagaaaaacccatcatctcagcccaaaatctctttaagctgataagcaacttcagcaaagtctcagatacaaaatcaatagccaccagcaccaagaacactccccagtgcacaaacatgccccagtgcacgaacatactgaaactggcctcatcaaatcagtgtggcagcagccaggaatccagcctcagccagtccaaagtgtacctgcctggagccccaagcacccacatgacggctccatgcgccagcagcagcagtagcagcagcgcaggggccactgccagcaacttcatctag

SEQ ID NO: 6926 - DNA, 1921 bp, Homo sapiens
  SIMILAR (502)..(1311): 881254mologous to Homo sapiens putative p150,accession number U93563,Smith-Waterman Score=1234.
atgggagagtcagtacagagtctgctgactttagctcagaaaaggagtatgatgatacaagttgcagtggcaccaaggacacccactcttcttctgaaattatacaaagagaaagcttcaaagacacagctgaaaaaagtaaatctggtggttcaggatggccagtcactggaaagcattgaggtgcatgatcatgagcctgcagatacctacaaattgctgagtctcgttaaggaacctgcagaagagatcccaagagtgatccaaaatgtctttgggcacagaagcaagaaagaaaacctgaaggattcatatgggctcagacaaagcagcaccatggtggcaaccacatggaacaatgtgtctctgatgcagcaccattccttaagaagaccaaacagacacttgacagcaagttacccacatttccacttccaagaaattccagtgaatttcttccactctggaagggacagtgaatcatttggctggaatcagcacatcaaaaaagacaaagaaggccatcacataatggtaaagggatcaattcaacaagaagagctaactatgctaaatatatatgcacccaatacaggagcacccagattcataaaccaagtccttagtgacatagaaagagacttagactcccacaaaataataatgggagactttaacaccccactgtcaacattagacagatcaacgagacagaaagttaacaaggatacccaggaattgaactcagctctgcaccaagcggacctaacagacatctacagaactctccacccaaaatcaacagaatatacattgttttcagcaccacaccacacctactccaaaattgaccacatagttggaagtaaagcactcctcagcaaatggaaaagaacagaaattataacaaactgtctctcagaccccagagcaatcaaactagaactcaggattaagaaactcactcaaaaccgctcatctatatggaaactgaacaacgtgctcctgaatgactactgggtacataatgaaatgaaggcagaaataaagatattctttgaaaccaatgagaacaaagatacatcatgccagaatctctgggacacattcaaagcagtgtgtagagggaaatttatagcactaaatgcccacaggagaaagcaggaaagatctaaaattgataccctaacatcacaattaaaagaactagaaaagcaagagcgaacacattcaaaagccagcagaaggcaagaaataactaagatcagagcagaaatgaaggaaatagagacacaaaaaaacccttcaaaaaattaatgaatccaggagctggttttttgaaaagatcaacaaaattgatagaccgctagcaagactaataaagaagaaaagagagaagaatcaaatagatgcaataaaaaataataaaggggatattaccactgatcccacagaaatagaaactaccatcagagaatactacaagcacctctacacaaataaactagaaaatctagaagaaatggataaattccttgacacatacaccctcccaagactaaaccaggaagaagttgaatctctgaatagaccaataacaggctctgaagttgtggcaataatcaatagcttaccaaccaaaaaaagtccaggaccagatggattcacagccgaattccatcagaggtacaaggagaagctgataagcgaacttttgccaatgccaaatcatacagcattaaagaagcagactcaagacctctcagactgtaaagctatgtttttatactatcagtctgtatcagttcagactgctataataaattaccacagactgagaggcttaaacaacagaaatttatttctcacagttttggagtattcaagcctgagatcagggtgtgaacatagtcgggttctg

SEQ ID NO: 6927 - DNA, 1848 bp, Homo sapiens
  SIMILAR (730)..(900): 751254mologous to Homo sapiens unnamed protein product,accession number AK001116,Smith-Waterman Score=219.
atgtcactgaccaagatgttaatttgcgccgccctgctggggctgttctgcatgttacttgggctgcgctggcaggtcgcggaattgatcggcatgacgctggcgctctcctctacggcgattgccatgcaggcgatgaatgaacgcaatctgatggtgacgcaaatgggtcgcagtgcctttgcggtgctgctgttccaggatatcgcggcgatcccgctggtggcgatgattccgctactggcaacgagcagtgcctcgacgacgatgggcgcatttgctctctcggcgttaaaagtggcgggtgcgctggtgctggtggtattgctggggcgctatgtcacgcgtccggcgctgcgttttgtagcccgctctggcttgcgggaagtgtttagtgccgtggcgttattcctcgtgtttggctttggtttgctgctggaagaggtcggcttgtcgatggcgatgggcgcgtttctggcgggcgtactgctggcaagctcggaataccgtcatgcgctggagagcgatatcgaaccatttaaaggtttgctgttgggagctgtttttacaccgcgtgttgtagtgaatatatattcgagtgaactcaggacggctaagaactaccaagcaaatggaaaacaaaaaaagccaggggttgcaatcctagtctcggataagacagcctttaacccacagagatcaaaagagacaaagagggccattacaataatggtaaagggatcaattcaacaagaggagctaactatcttaaatatttatgcacccaatacaggagcacccagattcataaagcaagtcctcagtgacctacaaagagatttagactcccacacattaatgatgggagactttaacaccccactgtcaacattagacaagatcaacgagacagaaagtcaacaaggatacccaggaattgaactcagctctgcaccaagcagacctaatagacatctacagaattctccaccccaaatcaacagaatatacatttttttcagcaccacaccacacctattccaaaattgaccacatagttggaagtaaagctctcctcagcaaatgtaaaagaacagaaattataacaaactatctctcagaccacagtgcaatcaaactagaactcaggattaagaatctcactcaaagccgctcaactacatggaaactgaacaacctgctcctgaatgactactgggtacataacgaaatgaaggcagaaataaagatgttctttgaaaccaacgagaacaaagacatgacataccagaatctctgggacacattcaaagcagtgtgtagagggaaatttatagcactaaatgcccacaagagaaagcaggaaagatccaaaattgacaccctaacatcacaattaaaagaactagaaaagcaagagcaaacacattcaaaagctagcagaaggcaagaaataactaaaatcagagcagaactgaaggaaatagagacacaaaaagccattcaaaaaatcaatgaatccaggagctggggtcctccaggcaactgccagcagaattaccgtaatagtgagagtggcgaaaagagtgctcccgaaggccaggcccaacacgcagggcctacggaaggaaaagttcccaccttcctatatgtgggcaaggaaaagttcccaccttcctacctcctgacaaggaaaagttcccaccttcctacatgcggagaccctatatgcggggagaagtgctggagggtacccacaaccagtgggcaagggaacaaggcagaccagtggggcggagtaggtatcggggatacagaccatgattctgcagggaccctctgccaaag

SEQ ID NO: 6928 - DNA, 2238 bp, Homo sapiens
  SIMILAR (1774)..(2235): 871254mologous to Homo sapiens Similar to cadherin 1, type 1, E-cadherin (epithelial),accession number BC001865,Smith-Waterman Score=689.
atgagtgaacttccattcataattgctacaaaaaggattaaatacctaggaatacaacttacaagggacgtgaaggatctcttcaaggaaaactacaaaccacttctcaaggaaataagagaggacacaaacaaatggaaaaacattccatgctcatggataggaagaatcgatattgtgaaaatggccatactgcccgaagtaatttatagatttaatgctatccccatcaagctaccaatgactttcttcacagaattagaaaaaactactttaaacttcatatggaaccaaaaaagggtctgtatagccaagacaatcctcagcaaaaagaacaaagctggaggcatcatgctacctaacttcaaactatactacaaggctacagtaaccaaaacagcatgggcatcctaccccatggctgcgcagttctttgctcctcagaagtacctaaacctcaccagtatgcttacacacctccctcccaccagtcaaatatcaacaggcacccccaccataaacaggtacacagagaacaggcttcaccccttcccgcccacacgcctgcaagatcctgttctcaagctgcagtctttgcagagtcgcaacccacgaacaagttacgaaatccattccaatggccgcagccggcaatggacaaacatgaaactagaacagcctggtgacagagcaagatcccatctcaggaaaaaaaaaaaaaaaaagaaggaggatgagaaggagaaggaggaaaaggaggaggagaaggagaagaaggaggaggagaaggagaagaaggagaaggagaagaaggaggaagagaaggagaagaaggagaaggagaagaaggagggggagaaggagaagagcacaggtgccaggcagacattcctgagacagtcacggctgcaatgcggttacaatgatgagaagcctttcctggccctggagctaactacatcccatgcaactggccccgacataggtactgctgtcataatgaccttgcaggtatctggggtttctgtcgtgaccacgtggcaggagctgctgccactgctgtctgatgctcgccccacagtggaaggagatgctaaattccgttacgcattagaggcttctggcaagcagagaccatgccagggggtccagagaggtccaaccagcagcaaagctcacccaggtctcaccagccaggcagttagaaaagggggcactgatgccatcgtgtcaaacaccaagataactgaagtctgccaagctctattcactactctgcaagcaggaaccatgccctataattttctgtttctggcagaatctggcacagtgctgagcacaaggacagtgctcgaatatctctgtagtggccttcttgccaagcatcagaatcctggcaccaaggtgctgcggaggccgaagcaagtacagcaagctctgagccttggggttccatctgcgttgaactggtgccgtctacagcacgtgtgcaaggtagcggggagacctgtgtttgcccaacaaggcccgggctccaggggccctaaccagggagaagtcattggtctacatgcaatgaccctgccggcctctgggactcacactccgcaagctcaagggcctggttggcaccacggaaaaatcttgaagcgctcacttggcgtgaacaaggagccaaagaacctgcccacctgcctggcccaccactactggtatctgaattgttgccctatttgttgtttaagaaatgctgacccttttcacaagacagtgctgaaagcgaagaaagaagttcctgcccctcctaaagccaaagccaaagcaaaggctttaaaggccaagaaggcagtgttgaaaggtgttcacaaccacaaaaaaaagaagatccacacgtcccccaccttccggcggcccaagacactgcaactccggaggcagcccaaatatccttggaagagcacccccaggagaaacaagcttgaccactatgctatcatcaagtttccgctgaccactgagtcggccatgaagaagacaggagacaataacacacgtgtgttcatggtggatgttaaagccaacaagcaccagatcaaacaggctgtgaagaggctctatgatattgacatgatcaaggtcaacaccctgatttggcctgatggagagaagaaggcatatgttccactggctcctgattacgatgctttggatgttgccaacaaaattgggatcatctaa

SEQ ID NO: 6929 - DNA, 2955 bp, Homo sapiens
  SIMILAR (442)..(2898): 971254mologous to Homo sapiens putative p150,accession number U93563,Smith-Waterman Score=4074.
atggagctgaaaaccaaggctcgagaactacgtgaagaatgcagaagcctcaggagccgacgcaatcaactggaagaaagggtatcagcaatggaagatgaaatgaatgaaatgaagcgagaagggaagtttagagaaaaaagaataaaaagaaatgagcaaagcctccaagaaatatgggactatgtgaaaagaccaaatctacgtctgattggtgtacctgaaagtgatgcggagaatggaaccaagttggaaaacactctgcaggatattatccaggaggacttccccaatctagcaaggcaggccaacgttcagattcaggaaatacagagaacgccacaaagatactcctcgagaagagcaactccaagacacataattgtcagattcaccaaagttgaaatgaagcaaaaaatgttaagggcagccagagagaaagactttaaaccaacaaagatcaaaagagacaaagaaggccattacataatggtaaagggatcaattcaacaagaggagctaactatcctaaatatatatgcacccaatacaggagcacccagattcataaagcaagtcctgagtgacctacaaagagacttagactcccacacattaataatgggagactttaacaccccactgtcaacattagacagatcaacaagacagaaagtcaacaaggatacccaggaattgaactcagctctgcaccaagcagacctaatagacatctacagaactctccaccccaaatcaacagaatatacatttttttcagcaccacaccacacctattccaaaattgaccacatagttggaagtaaagctctcctcagcaaatgtaaaagaacacaaattataacaaactatctctcagaccacagtgcaatcaaactagaactcaggattaagaatctcactcaaagccgctcaactacatggaaactgaacaacctgctcctgaatgtctactgggtacataacgaaatgaaggcagaaataaagatgttctttgaaaccaatgagaacaaagacacaacataccagaatctctgggacacattcaaagcagtgtgtagagggaaatttatagcactaaatgcccacaagagaaagcaggaaagatccaaaattgacaccctaacatcacaattaaaagaactagagaagcaagagcaaacacattcaaaagctagcagaaggcaagaaataactaaaatcagagcagaactgaaggaaatagagacacaaaaaacccttcaaaaactcaatgaatccaggagctggttttttgaaaggatcaacaaaattgatagaccgctagcaagactaataaagaaaaaaagagagaagaatcaaatagacacaataaaaaatgataaaggggatatcaccaccgatcccacagaaatacaaactaccatcagagaatactacaaacacctctacgcatataaactagaaaatctagaagaaatggatacattcctcgacacatacactctcccaagactaaaccaggaagaagttgaatctctgaatagaccaataacaggatctgaaattgtggcaataatcaatagcttaccaaccaaaaagagtccaggaccagatggattcacagccaaattctaccagaggtacaaggaggagctggtaccattccttctgaaactattccaatcaatagaaaaagagggaatcctccctaactcattttatgatgccagcatcattctgataccaaagccgggcagagacacaaccaaaaaagagaattttagaccaatatccttgatgaatattgatgcaaaaatcctcaataaaatactggcaaaccgaatccagcagcacatcaaaaagcttatccaccatgatcaagtgggcttcatccctgggatgcaaggctggttcaatatacgcaaatcaataaatgtaatccagcatataaacagagccaaagacaaaaaccacatgattatctcaatagatgcagaaaaagcctttgacaaaattcaacaacccttcatgctaaaaactctcaataaattaggtattgatgggacgtatttcaaaataataagagctatctatgacaaacccacagccaatatcatactgaatgggcaaagactggaagcattccctttgaaaactggcacaagacagggatgccctctctcaccactcctattcaacatagtgttggaagttctggccagggcaatcaggcaggagaaggaaataaagggtattcaattaggaaaagaggaagtcaaattgtccctgtttgcagacgacatgattgtttatctagaaaaccccatcgtctcagcccaaaatctccttaagctgataagcaacttcagcaaagtctcaggatacaaaatcaatgtacaaaaatcacaagcattcctatacaccaacaacagacaaacagagagccaaatcatgagtgaactcccattcacaattgcttcaaagagaataaaatacctaggaatccaacttacaagggatgtgaagaacctcttcaaggagaactacaaaccactgctcaaggaaataaaagaggatacaaacaaatggaagaacattccatgctcatgggtaggaagaatcaatatcgtgaaaatggccatactgcccaaggtaatttacagattcaatgccatccccatcaagctaccaatgactttcttcacagaattggaaaaaactactttaaagttcatatggaaccaaaaaagagcccgcattgccaagtcaatcctaagccaaaagaacaaagctggaggcatcacactacctgacttcaaactatactacaaggctacagtaaccaaaacagcaagaccccatgactggtatagaactgaaagtaaatcaagctggacttatgaaggattcctctctccattcgtggatgaatttgagtggcactggaacaag

SEQ ID NO: 6930 - DNA, 2158 bp, Homo sapiens
  SIMILAR (69)..(674): 811254mologous to Homo sapiens putative p150,accession number U93569,Smith-Waterman Score=830.
agaagtccttaaaggacctgatggagctaaaaatcatggcacaagaactatgtgatgaatggacaagcctcagtagccgatgcaatcaactggaagaaagggtatcagtgatggaagatgaaatgaatgaaatgaaagacaagcataggcccaaaataaaggaatggaggaagatctaccaagcaaatggacaacaaaaaaagacaagggttgcaaacctagtctcagataaaacagagtttaaaccaacaaagatcaaaagagacaaagaaggccattacataatggtaaagggatcaattcaacaagaagagctaactatcgtaaatatatatgcacccaatacaggagcacccaggttcataaagaaagtccttagtgacctacaaagagccttagactcccacacaataataatgggagactttaacaccccactatcaacattagacagatcaacgagacagaaagtcaacaaggatatccaggaattgaactcagctctgcaccaagcggacctaatagatatctacagaactctccaccctaaatcaacagaatatacattcttttcagcaccacattacacctatcccaaaattgaccacatagttggaagtaaagcactcctcagcaaatgtaaaagaacagaaattataacaaactgtctctcagcaccacagtgcaatcaaactagaactcaagattaagaaactcactcaaaacctctcaactacatggaaactgaacaacctgctcctaaaggactactgggtacataaagaaatgaaggcagaaataaagatgttctttgaaaccaacaagaacaaagacacaacataccagaatttctgggacacattcaaagcagtgtgtagagggaaatttatagcactaaatgcccacaagagaaagcaggaaggatttaaaatagacaccctaacattacaattaaaagaactagagaagcaagagcaaacacattcaaaagctagcagaaggatcaacaaaattgatagaccgctagcaagactaataaagaaaaaaagagagaagaatcaaatagacacaataaaaaatgataaaggggatatcaccaccgatcccacagaaatacaaactaccatcagagaatactacaaacacctctatgcaaataaactagaaaatctagaagaaatggataaattcctggacacgtacactctcccaagactaaaccaggaagaagttgaatctctgaatagaccaataacaggagctgaaattgtggcaataatcaatagcttaccaaccaaaaagagtccaggaccagatggattcacagccaaattctaccagaggtacaaggaggaactggtaccattccttctgaaactattccaatcaatagaaaaagagggaatcctccctaactcattttatgaggccagcatcatcctcataccaaagcctggcagagacataacaaaaaaagagaattttagaccaatatccctgatgaacatcgatgcagaaatcctcaataaaatactggcaagccaaatgcagcagcacatcaaaaagcttatctaccacaatcaagttggcttcatccatgggatgcaaggctggttcaacatacacaaatcaaataaatgtaatccagcatataaacagaaccaaagacaaaaaccatacgattatctcactagatgcagaaaaggcctttgacaaaattcaacaacccttcatgctaaagctaaaaactctcaataaactaggtattgatgggatgtatctcaaaataataagagctatctatgacaaacccacagccaatatcatactgcattggcaaaagctggaagcattccctttgaaaactggcacaagacagggatgccctctctcaccactcctgttcaacatagtattggaagttctagccagggcagtcaggaaagagaaagaaataaagcgtactcaaataggaagagaggaaatcaaattatctctctttgcagatgacatgattgtatatttagaaaaccccattgtctcagcccaaaatctccttaagctgataagcaacttcaccaaagtctcaggatacaaaatcaatgtgaaaaaatcacaagcattcctatacaacaatagcagacaaacagacagctaa

SEQ ID NO: 6931 - DNA, 10450 bp, Homo sapiens
  SIMILAR (2147)..(3694): 961254mologous to Homo sapiens putative p150,accession number U93563,Smith-Waterman Score=2620.
  misc_feature (1)...(10450): n = a,t,c or g
aacgaaaactaacaaacaggaaggacatccacatcaaaaacccatctgtatgtcaccatcatcaaagaccaaaggtagataaaaccacaaagatggggaaaaaacagagcagaaaaactggaaactctaaaaatcagagcacatctcctactctaaaggaaagcagctcctcaccagcaacagaacaaagctggacagagaatgactttgacgagttgagagaagaaggcttcagaagatcagactactccgagctacaggaggaagttcaaaacaatggcaaagaagttaaaaactttggaaaaaaattagatgaatggataactagaataaccaatgcaaagaagtccttaaaggacctgatggagctgaaaaccaaggcacgagaactatgtgatgaacgcacaagcctcagtagccaatgcaatcaactggaagaaagggtatcagtgatggaagatgaaatgaatgaaataaagcaagaagagaagtttagagaaaaaagaataaaaagaaacgaacaaagcctccaagaaatatgggactatatgaaaagaccaaatctacgtctgattggtgtacctgaaagtgacggggagaatggaaccaagttggaaaacactctgcaggatattatccaggagaacttccccaatctagcaaggcaggccaacattcaaattcaggaaatacagagaacgccacaaagatactccttgagaagagcaaccccaagacacataattgtcagattcaccaaagttgaaatgaaggaaaaaatgttaagggtagccagagagaagggtcgggttacccacaaagggaagcctgtcagactaacagctgatctcttggcagaaactctacaagccagaagacaagacacacataggctcaaaataaagggatggaggaagatttaccaagcaaatggaaaacgaaaaaacggcaggggttgcaatccctagtctctgataaaacagactttaacccaacaaagatcaaaagagacaaagaaggccattacataatggtaaagggatcaattcaacaagaagagctaactatcctaaatatatatgcacccaatacaggagcacccagattcataaagcaagtcctgagtgacctacaaagagacttagactcccacgcattaataatgggagactttaacaccccactgtcaacattagacagatcaacgagacagaaagtcaacaaggatacccaggaattgaactcagctctgcaccaagcggacctaatagacttctacagaactctccacccccaaatcaacagaatatacatttttttcagcaccgcaccacacctattccaaaattgaccacatagttggaagtaaagctctcctcagcaaatgtaaaagaacaggaattataacaaactatctctcagaccacagtgcaatcaaactagaactcaggattaagaatctcactcaaaacggctcaactacatggaaactgaacaacctgctcctgaatgactactgggtacataacgaaatgaaggcagaaataaagatgttctttgaaaccaacgagaacataagacacaacataccagaatctctgggacacatttaaagccagtgtatagagggaaatttatagcactaaatgcccacaagagaaagcagggaaagatccaaaatggacaccctaacagacatcacaattaaaagaattagaaaagcaagagcaaacacattcaaaagctagcagaaggcaagaaataactaagatcagagcagaactgaaggaaatagcgacccaaaaaaacacttcaaaaaattaatgaatccaggagctggttttttgaaaggatcaacaaaattgataggccattagcaagactaataaagaagaaaagagagaagaatcaaatacagtcaataaaaaatgataaaggggatatcactaccaatgccacagaaatacaaactaccatcagagaatactataaacacctctacgcaaataaactagaaaatctagaagaaatggatacattcctcgacatatacactctcccaagactaaaccaggaagaagttgaatctctgaatagaccaataacaggagctgaaattgtggcaataatcaatagtttaccaaccgtgggcttcatccctgggatgcaaggctggttcaatatacgcaaatcaacaaatgtaatccagcatataaacagagccaaagacaaaaaccacatgattatctcaatagatgcagaaaaagcctttgacaaaattcaacaacccttcatgctaaaaactctcaataaattaggtattgatgggacgtatttcaaaataataagagctatctatgacaaacccacagccaatatcatactgaatgggcaaaaactggaagcattccctttgaaaactggcacaagacagggatgccctctctcaccgctcctattcaacatagtgttggaagttctggccagggcaatcaggcaggagaaggaaataaagggtattcaattaggaaaagaggaagtcaaattgtccctgtttgcagatgacatgattgtttatctagaaaaccccatcatctcagcccaaaatctccttaagctgataagcaacttcagcaaagtctcaggatacaaaatcaatgtacaaaaatcacaagcattcttatacaccaacaacagacaaacagagagccaaatcatgagtgaactcccattcacaattgcttcaaagagaataaaatacctaggaatccaacttacaagggatgtgaaggacctcttcaaggagaactacaaaccactgctcaaggaaataaaagaggatacaaacaaatggaagaacattccacgctcatgggtaggaagaatcaatatcgtgaaaatggccatactgcccaaggtaatttacagattcaatgccatccccatcaagctaccaatgactttcttcacagaattggaaaaaactactttaaagttcatatggaaccaaaaaagagcccgcatcgccaagtcaatcctaagccaaaagaacaaagctggaggcatcacactacctgacttcaaactatactacaaggctacagtaaccaaaacagcatggtactggtaccaaaacagagatatagatcaatggaacagaacagagccctcagaaataatgccgcatatctacaactatctgatctttgacaaacctgagaaaaacaagcaatggggaaaggattccctatttaataaatggtgctgggaaaactggctagccatatgtagaaagctgaaactggatcccttccttacgccttatacaaaaatcaattcaagatggattaaagatttaaacattagacctaaaaccataaaaaccctagaagaaaacctaggcattaccattcaggacataggcgtgggcaaggacttcatgtccaaaacaccaaaagcaatggcaacaaaagccaaaattgacaaatgggatctaattaaactaaagagcttctgcacagcaaaagaaactaccatcagagtgaacaggcaacctacaacatgggagaaaattttcgcaacctactcatctgacaaagggctaatatccagaatctacaatgaactcaaacaaatttacaagaaaaaaacaaacaaccccatcaaaaaacaagaaacattgaataaaatatttggtgtaaatgtcttgaatggncctaaatgctcccaattaaaagacacagactggcaaattggataaagaggtcaagaccccatcagtgtgctgtattgaggaaaccccatctcacgtgcagagacgcacataggcacaaaataaaaggatggaggaagatctaccaagcaaatggaaaacaaaacaaaacaaaacaacaaaaaaagcaggggttgcaaatcctagtctctgataaaagagactttaaaccaacaaagatcaaaagagacaaagaaggccattacataatggtaaagggaccaattcaacaaggaagagctaactatcctaaatatatatgcaccccaatacaggagcacccagattcataaagcaagtcctcagtgacctacaaagagacttagactcccacacattaataactgggagacctttaacaccccactgtcaacattagacagatcaatgagacagaaagtcaacaaggatacccaggaattgaactcagctctgcaccaagcggacctaatagacatctacagaactctccaccccaaatcaacagaatatacatttttttcagcacccacaccacacctattccaaaattgaccacatacttggaagtaaagcactcctcagcaaatgtaaaagaacagaaattataaccaaactatctctcagacccacagtgccaatcaaactgaaactcaggattaagaacctcactcaaaaccactcaactaccatggaaactgaacaacctgctcctgaatgactactgggtatataacgaaatgaaggcagaaataaagaaagatgttctttgaaaccaaaagagaacaaaggacacaacataccagaatctctgggacgcattcaaagcagtgtgtagagggaaatttataagccctaaatgcccacaagagaaagcaggaaagtatctaaaattgacaccctaacatcacaattaaaaaaaactagagaagcaaagagcaaacaaacacattcaaaagctagcagaaggcaagaaataactaaaatcagagcagaactgaaggaaatagagacacaaaaagcccttcaacccttcaaaaaaaatcagtgaatccagggagctggtttttttgaaaagatcaacaaaatagatagatagaccgctagcaagaactaataaagaaaaaaagagagaagaatcaaatagacgcaataaaaaatgataaaggggatatcaccaccaccgatcccacagaaatacaaactaccatcagagaatactacaaacacctctacgcaaataaactagaaaatctagaagaaatggataaattcctggacacatacactctcccaagattaaacccaggaagaagttgaatctctgaatagaccaataacaggagctgaaattgtggcaataatcaatagtttaccaaccaaaaaagagtccaggaccagatggattcacagccgaattctaccagaggtacaagggaggagctggtaccattccttctgaaactattccaatcaatagaaaaagagagaatcctccctaactcattttatgaggccagcatcattctgataccaaagccgggcagagacacaacaaaaaaaagagaattttagaccaatatccttgatgaacattgatgcaaaaatcctcaataaaatactggcaaaccaaatccagcagcacatcaaaaagcttatccaccatgatcaagtgggcttcatccctgggatgcaaggctggttcaatatacgcaaatcaataaatgtaatccagcatataaacaagagccaaagacaaaaaccacatgattgtctcaatagatgcagaaaaagcctttgacaaaattcaacaacccttcatgctaaaaactatcaataaaataggtattgatgggatgtatttcaaaataataagagctatctatgacaaaaccacagccaatatcatactgaatgggcaaaaactggaagcattccctttgaaaaccggcacaagacagggatgccctctctcacctcaccactcctattcaacatagtattctgccccatagtgttctggccagggcaatcaggcaagagaaggaaataaagggtattcaattaggaaaagaggaagtcaaattgtccctgtttgcagatgacatgattgttgatctagaaaaccccatcgtctcagcccaaaatctccttaagctgataagcaacttcagcaaagtctcaggatacaaaatcaatgtacaaaaatcaccaagcattcctatacaccaacaacagacaaacagagagccaaatcatgagtgaactcccattcacacttactacaacaagaataaaatacctaggaatccaacttacaagggatgtgaaggacctcttcacggagaactacaaaccactgctcaatgaaataaaagaggatacaaacaaatggaagaacattccatgctcatgggtaggaagaatcaatatcgtgaaaatggccatactgcccaaggtaatttatagattcaatgccatccccatcaagctaccaatgactttcttcacagaattggaaaaaactactttaaagttcatatggaaccaaaaaagagctcgtatagccaagacaattctaagccaaaagaacaaagctggaggcatcacgctacctgacttcaaactatactacaaggctacagtaaccaaaacagcatggtactggtaccaaaacagatatatagaccaatggaacagaacagagaacctattcactgccaccaataagacggcacacctacaactatctgacctttgacaaacttgacaaaaacaagcaatagagaaagaattccctattcaataaatggtcctaggataactggctagccatatggagaagactgaaagtggatcccttccttacaccttatacaaaaatcaattcaagatggattaaagacttaaacgttagacctaaaaccataaaaaccctagaagaaaacctaggcattaccattcaggacataggcgtgggcaaggacttcatgtccaaaacaccaaaagcaatggcaacaaaagccaaaattgacaaatgggatctaattaaactaaagagcttctgcacagcaaaagaaactaccatcagagtgaacaggcaacctacaacatgggagacaattttcacaacctactcatctgacaaagggctaatatccagaatctacaatgaactcaaacaaatttacaagaaaaaaacaaacaaccccatcaaaaagtgggcgaaggacatgaacagacacttctcaaaagaagacatttatgcagccaaaaaacacatgaaaaaatgctcatcatcactggccatcagagaaatgcaaatcaaaaccactatgagatatcatctcacaccagttagaatggcaatcatgaaaaaagtcaggaaacaacaggtgctggagaggatgtggagaaataggaacacttttacactgttggtgggactgtaaactagttcaaccattgtggaagtcagtgtggcgattccttagggatctagaactagaaataccatttgacccagccatcccattactgggtatatacccaaatgactataaatcatgctgctataaagacacatgcacacgtatgtttattgcggcattattcacaatagcaaagacttggaaccaacccaaatgtccaacaatgatagactggattaagaaaatgtggcacatatacaccatggaatactatgcagccataaaaaatgatgagttcatgtcctttgtagggacatggatgaaattggaaaccatcattctcagtaaactatcgtcttcgctgaaacatgggcactcgtgggaagtgctttctgttccccaggctcagttattttcatatcttcagctgctgctattacattcccatctcttggaaggagccagagccagagaaatacagggttcctctgtggccaagggaaaaatgcctgccaagaatgctgaacttctggtgaagaaccagatgatttcttggattggccagattaattccaggcccaaggagcaaaagaatcctaaaacagagacagaggctgtgagaagcgaaaggcgctgtggatgttgctgccctagcgtttggaagcccgaacattcacatgacttgcttcaatctcatagagagccagcagctgagctgtgggtccaagtgtcaggacacctcgcccatatctctgtgtgcgaaaggatgtgcatgatgtggtcccaatcctcaggcccagtgctacttctctattcatgccgagagcagcaggccagggaggccagaaagcaggtgggacagagaaatcttcaggcccatgaaaagatgatgtgtagagattacagccaccaaatggcttcagaattattcactgagtgcaatagacctgtcgaaaagggtgtccacatttgtcaaaaaggaacactttccagttccaaaattagaggtgaaacctgttgtacccagctctgccgaacattccacactcctcagtggaggaaggagttggctccatctaggcgaggtctgaggatctggaaggtgctcagctcccatagctattggcacgtttatttacatgcagatctaacacctacagaggacttaagttcacagaggcatgaggtggagagtaacaaagcatctgctattcaacaagaagagctaactatcctaaatatatatgcacccaatacaggaggacccagattcataaagcaagtcctgagtgacctacaaggagacgtagactcccacacaataataatgggagactttaacaccccactgtcaacattagacagatcaacaagacagaaagttaacaaggatacccaggaattgaactcagctctgcaccaagcagacctaatagacatctacagaactctccaccccaaatcaaaagaatttacattttttttcagcaccacaccacacctattcccaaaattggaccaccatagttggaagtaaagctctcctcagcaaatgtaaaagaacagaaattataacaaactatctctcagaccacagtgcaatcaaactagaactcaggattaagaatctcactcaaagccgctcaactacatggaaactgaacaacctgctcctgaatgactactgggtacataacgaaatgaaggcagaaataaagatattctttgaaaccaacgagaacaaagacaccaacataccagaatttttgggacgcattcaaagcagtgtgtagagggaaatttatagcactaaatgcctacaagaggaaagcaggaaagatccaaaattgacaccctaacatcacaattaaaagaactagaaaagcaagagcaaacacattcaaaagctagcagaaggcaagaaataactaaaatcagagcagaactgaaggaaataaagacaaaaaaaaaaaccctccaaaaaattaatgaatccaggagctggttttttgaaaggatcaacaaaattgatagaccgctagcaagactaataaacaagaaaagagagaagcatcaaatagacgcaataaaaaatgataaaggggatatcaccaccgatcccacagaaatacaaactaccatcagagaatactacaaacacctctacgccaataaactagaaaatctaggagaaatggataaattcctcgacacatacaccctcccaagactaaaccaggaagaagttgaatctctgaatagaccaataacaggctctgaaattgtggcaataatcaatagtttaccaacaaaaaagagtccaggaccagatggattcacagccgaattctaccagagccgggcagagacacaaccaaaaaaagagaattttagaccaatatccttcatgaacattgatgcaaaaatcctcaataaaatactggcaaaccaaatccagcagcacatcaaaaagcttatccaccatgatcaagtgggcttcatccctgggatgcaaggctggttcaacatacgcaaatcaataaatgtaatccagcatacaaacagaaccaaagacaaaaaccacatgattatctcaatagatgcagaaaaggcctttgacaaaattcgacaacccttcatgctaaaaactctcaagaaattaggtattgatgggacgtatctcaaaataataagagctatctatgacagacccacagccaatatcatactgaatgggcaaaaactggaagcattccctttgaaaatgggcacaagacagggatgccctctctcaccactcctattcaacatagtgttggaagttctggccagggcaatcaggcaggagaaggaaataaagtgtattcaattaggaaaagagaaagtcaaatcgtccctgtttgcagatgacatgactgtatatctagaaaaccccatcatctcagcccaaaatctccttaaggtgataagcaacttcagcaaggtctcaggatacaaaatcaatgtacaaaaatcacaaccattcttatacaccaataacagacaaacagagagccaaatcatgagtgaactcccattcacaattgcttcaaagagaataaaatacctaggaatccaacttacaagggatgtgaaggacctcttcagggagaactacaaaccactgctcaaggaaataaaagaggatacaaacaaatggaagaacattccacgctcatgggtaggaagaatcaatatggtgaaaatggccatactgcccaaggcctga

SEQ ID NO: 6932 - DNA, 1077 bp, Homo sapiens
  SIMILAR (754)..(945): 981254mologous to Homo sapiens protein p84,accession number L36529,Smith-Waterman Score=330.
atggactggtaccagtctggtggcctgttaggaaccggctgcacagcaggagttgagtggcaggatgatttcttacattccactaagagagcctcagaagatttggttagagcagagattatagtagatgacacaatctgggagctagaaggttgtgcagaggtcaagcgtcattgtgtcattgatgggaaaagagaggcccagagaggggaagcaggatcagaagccacagccaaggctgatgccacagggagccgcagcctcaaacccgctggaggtagagggtggaatgaaggttatgatgaaaggaatgcaaaacatgccttcagacccctgcccagactgaagttcaagagagtgaggggaaacaaactgcggtatgaaactaacatctgcacagcagtcatcggcacagcagtaacattacttggatatccagggcagaatcgatcaagtactcatacggttatccttttttcctccacagtgaccgctggaaagggaacaccttgcaacttctcccacgaggctttcgatcctaatctaagaatccccgtaagggcttatctgaaccgggtagaatcaaatattgtgatagaaccccagggcctgggagaagcagcagccccccacctccccccaagaattctgtctggtatgcttcgtggtacatctgcagaagtctaccagagaggccttgaacaacaaaaacatcaagccattgttaagtaccttcagccaggtacctggcagataaatcattcatcatgtgaaaacgttttagctattatttctcttgctattgggggagtaactgaaggtatttgtaccgcatctacaccttttgtattgttgggagatgttttggattgtcttcctttggatcagtgtgacacaatattcacttttgtggaaaaaaatgttgctacttggaaatcaggtacagcctctctccctgctgctttcatggctggtgttgagcatctgtggcttttccaggtgaacggtgcaaactgtcagtggatctacccttctggggtctggaggacggtggccctcttctcacagctccactag

SEQ ID NO: 6933 - DNA, 315 bp, Homo sapiens
  SIMILAR (58)..(183): 971254mologous to Homo sapiens protein p84,accession number L36529,Smith-Waterman Score=222.
atggcatggtgtttgggaactggggagtgggaactagaaagggatgtctgtggcccaggtatttgtaccgcatctacaccttttgtattgttgggagatgttttggattgtcttcctttggatcagtgtgacacaatattcacttttgtggaaaaaaatgttgctacttggaaatcaggtacagcctctctccctgctgctttcatggctggtgttgagcatctgtggcttttccaggtgaacggtgcaaactgtcagtggatctacccttctggggtctggaggacggtggccctcttctcacagctccactag

SEQ ID NO: 6934 - DNA, 873 bp, Homo sapiens
  SIMILAR (354)..(193): 921254mologous to Homo sapiens Human secreted protein clone,accession number W73633,Smith-Waterman Score=302.
tcagtcacgcgccttgctttggccaatgttggtggatgtgatacagccaaagccttggaaagcaccagggtcactgggcttgccctcttgcatatctgccatcaccgtgcagagttcccctggccttcgcctctgttcctgtggccagggccctagagtgaacacacctggaacaaagctgccccagccaaacagacctgtctccctgtctttttcgcaaatgaagttattgacgtcttcacattggaaatcgttccactgcccagcataaatcaacccagcacagtcttctcctggcccatggccatgaccccagttatccggctgtccagctttccaatttctcagctttgggtagaaatctttgctttcctccggaaatacagcttcatcttctcctttgtggtttttgtgctggtgctttcttaatctggtcttgcaagcaaagctaccagatggctttcgtcctgcgcaccgagtctgagtcagtgcttccttctccaccgtgtaactccaacttagagttactgccactcggcttctatcggccacgtctctcattgctttacagttcacacttgcggtcattatttcagtggagcttttcaacagctctgtgagacaggtattatttctatttcggagcagagagaacagcgcccttgagccacagggctcatacatccggagcctatcaccactccgcatcttaagctcccgggatgaccgcggactggcggcccaggaccactgctccagctgtttccccaggtaatccacctgccttgggttaccttttagcgcggcccagttagccgcaaccagccaccatttacccgctttccccaaaccaggaaaaccacagaaacgcat

SEQ ID NO: 6935 - DNA, 493 bp, Homo sapiens
  SIMILAR (491)..(405): 721254mologous to Homo sapiens Human secreted protein clone,accession number W73633,Smith-Waterman Score=115.
ataatcgcacgggtactggcggaggagaatttatgtgattcagtccctgtgcacaatgaaaatccagcatatcacccctggggaacattttagttcccaagtctttgggtaatgacggatggtaaaaaacactagctgtcaattttttttcagtaattggttttcagtgcttttttttttttcaatctgatgagaaggtgatgcaattagaaaggagtgtcctttgcctttgagagctgaaaatttgctcatgtgatcccatcacagtccgttataatgcagatgacagtactgtctccctgtctttttcgcaaatgaagttattgacgtcttcacattggaaatcgttccactgcccagcataaatcaacccagcacagtcttctcctggcccatggccatgacccccagttatccggcttgcccagctttccaattttgtgtagtctggaagatgtcccatccagccacttccattcattttcacgctctg

SEQ ID NO: 6936 - DNA, 2023 bp, Homo sapiens
  SIMILAR (49)..(294): 931254mologous to Homo sapiens protein p84,accession number L36529,Smith-Waterman Score=390.
cccacgcgtccggccgcagcgcagtggcgggcacgcgcagccgagaagatgtctccgacgccgccgctcttcagtttgcccgaagcgcggacgcggtttacgaagtctaccagagaggccttgaacaacaaaaacatcaagccattgttaagtaccttcagccaggtacctggcagtgaaaatgaaaaaaaatgtacccttgaccaagctttcagaggtattctagaagaagaaattataaatcattcatcatgtgaaaacgttttagctatttatttctcttgctatgggggaagtaactgaaggtatttgtaccgcatctacacattttgtattgttgggagatgttttggattgtcttcctttggatcagtgtgacacaatattcacttttgtggaaaaaaatgttgctacttggaaatcaaatacattctattctgctgggaaaaattacttactacgtatgtgcaatgatctcctaagaagattgtctaaatcccagaatacagtcttctgtggacggattcagctctttttggccaggcttttccctctgtctgagaaatcaggtcttaacttgcagagtcagtttaatctggaaaatgtcactgttttcaatacaaatgagcaggaaagcaccctgggtcagaagcacactgaagatagagaagaaggaatggatgtagaagaaggcgaaatgggagatgaggaagctccaacaacgtgctctattccaattgattacaacctgtatcgaaaattctggtcacttcaggattacttcaggaaccctgtgcaatgctatgagaagatttcatggaaaacttttctcaagtattctgaagaagttttagctgtttttaagagttataaattagatgatactcaggcctcaagaaaaaagatggaagaattgaaaacaggaggagaacatgtatattttgcaaaatttttaacaagtgaaaagctgatggatttacaactgagtgacagtaactttcgtcgacacatcctgttgcagtatctcattttattccaatatctcaaggggcaggtcaaattcaaaagttcaaactatgttttaactgatgagcaatcactttggattgaagatactacaaaatcagtttatcaactactatctgaaaacccccccgatggagaaagattttcaaagatggtagagcatatattaaacactgaagaaaactggaactcgtggaaaaatgaaggttgcccaagttttgtgaaagaaagaacatcagataccaaacctacgagaataattcggaagagaacagcacccgaggacttcctagggaaaggacccaccaaaaaaattctgacgggaaatgaggagttaacaaggctttggaatctttgccctgataatatggaagcctgtaaatcagagacaagggaacacatgcccactttggaggaattctttgaagaagccattgaacaggcagaccctgaaaatatggcggaaaatgaatataaggctatgaacaattcaaattatggttggagagccctgaaactattagcacggagaagccctcacttcttccagccaaccaaccagcagtttaaaagtttacaagaatatcttgaaaatatggtaataaagctagccaaggaattaccgcctccttctgaagaaataaaaacaggtgaggatgaagatgaggaagataatgatgctctactgaaggaaaatgaaagtcctgatgttcggcgagacaaacctgtaacaggagaacaaatagaggtatttgccaacaagctgggtgaacaatggaagattctggctccctacttggaaatgaaagactcagaaattaggcagattgagtgtgacagtgaagacatgaagatgagagctaagcagctcctggttgcctggcaagatcaagagggagttcatgcaacacctgagaatctgattaatgcactgaataagtctggattaagtgaccttgcagaaagtctaactaatgacaatgagacaaatagttag

SEQ ID NO: 6937 - DNA, 1521 bp, Homo sapiens
  SIMILAR (172)..(1065): 981254mologous to Homo sapiens Human collectin amino acid sequence,accession number Y77985,Smith-Waterman Score=1714.
atggacccttcactagcgggtgcaaataaggacccagagcccagggttgctgaagacaaggaggagtcaacaggagctgtgggcagagtagctaagtatcctcgaacaaatagtttggcatctctggccctacatgtcctcatttatgcaatgagaattctaccgcacaggcaaggtccaccgggccccaggggtccaagaggtgacagaggatcccagggaccccctggcccaactggcaacaagggacagaaaggagagaagggggagcctggaccacctggccctgcgggtgagagaggcccaattggaccagctggtccccccggagagcgtggcggcaaaggatctaaaggctcccagggccccaaaggctcccgtggttcccctgggaagcccggccctcagggctccagtggggacccaggccccccgggcccaccaggcaaagagggactccccggccctcagggccctcctggcttccagggacttcagggcaccgttggggagcctggggtgcctggacctcggggactgccaggcttgcctggggtaccaggcatgccaggccccaagggcccccccggccctcctggcccatcaggagcggtggtgcccctggccctgcagaatgagccaaccccagcaccggaggacaatggctgcccgcctcactggaagaacttcacagacaaatgctactatttttcagttgagaaagaaatttttgaggatgcaaagcttttctgtgaagacaagtcttcacatcttgttttcataaacactagagaggaacagcaatggataaaaaaacagatggtagggagagagagccactggatcggcctcacagactcagagcgtgaaaatgaatggaagtggctggatgggacatctccagactacaaaaattggaaagctggacagccggataactggggtcatggccatgggccaggagaagactgtgctgggttgatttatgctgggcagtggaacgatttccaatgtgaagacgtcaataacttcatttgcgaaaaagacagggagacagtcttcacgcacatctattgttcctgcttgagaaatgaggaaactgaggctcaggttgaagacttgcccatggctcacgtatctgtcacagtcactttccaaaaagcaaatctgatcaggttccccactcaggtccccaaatctgaatccatcctacctctcaccctcggcttaaaatcttccaaacaatcctggttgggctcaggacatacctgcaggggccgtaaggcacttggtacctggttcccaactccaagtctagccttctttccaggtaggccccggtgtctacggttcccatctttgcgtccaggttcctcccacaacatgtgggaatcatgggggctacaactcaaggggacagggccacctccactacagaaagagcccaaatgttcaggacagagctcctcagagcccaaggtatgtgccaaaaggctcttcctggatgaattatctgattga

SEQ ID NO: 6938 - DNA, 1329 bp, Homo sapiens
  SIMILAR (619)..(765): 971254mologous to Homo sapiens Human secreted protein clone,accession number W73633,Smith-Waterman Score=296.
gtagcctgcttcaggatatcagagttatttagatgagctgacattcactctatgcttagaaagatggagttgaaatttaccatgtggtaaagaggaggaagagtatgcacaaaacaacattgtgaacaaaaccatggaaggatgaacatggcatggtgtttgggaactggggagtgggaactagaaagggatgtctgtggcccaggtatttgtaccgcatctacaccttttgtattgttgggagatgttttggattgtcttcctttggatcagtgtgacacaatattcacttttgtggaaaaaaatgttgctacttggaaatcacacactgaagatagagaagaaggaatggatgtagaagaaggcgaaatgggagatgaggaagctccaacaacgtggattcccaaaaaggccttcacacctaaatatatgccagttttgggcctgatgttactttcaacttttgatatagatttgatcaccagagatgtgacagtcttcctgagaatctccccaaacgcactagaagctcttctgttcctctgtccacgggacctcatttgtaaagaaaagctctgcattactgtgcaaataacattcaatttctgttttgctaaaagaaattggaaagctggacagccggataactggggtcatggccatgggccaggagaagactgtgctgggttgatttatgctgggcagtggaacgatttccaatgtgaagacgtcaataacttcatttgcgaaaaagacagggagacaggcaggtgggacccacagtcctctgggcctaaactgctgaagcctgcaacacaaggcgggcacggcattccaacacctcttcaggctcaacagcctttagaggctacactgagtcctctttttcatgctcttcctggttttcaagtgtccaattaaaatttgtcttcagaagaaacttgaaaataagtatctgatgccgtcatcaggatagactagtattagctttcgcagctgaagttattgctctcccagccctaataataacttaccaagtgcttattatttatcaggcactggtccaagtccttcaatcagattgtctcacctgatcctcccaacagccctaggaagcaggtcttactacactccccatttcacagggactggggcttggggaggtgatgcggtttcctgggtcactccattactgagtagtgagacaggattcagacgcaagctttgaaaatgttctaattttctttagaaggaagggcccttcttaatagcacactgaataaaatcaaatgaataatcacacattacaagatgcctcctatacgtctt

SEQ ID NO: 6939 - DNA, 398 bp, Homo sapiens
  SIMILAR (297)..(332): 501254mologous to Plasmodium vivax recombinant antigen,accession number X53680,Smith-Waterman Score=37.
ggagcctgggctcaggtgtgtcctgtgggaagtgattgctccctggctagcagaaacagaggaaagcggattgttggccccaggacccagctctgagaagctgggcttgtttccctgaactctgccttggaggaaagcaatggaaggggaaggggtaagaaacttcaaggaacttcgagccaaatttcaaaatcttgatgctccacctcttccaggacctattaaattcccagcaggtgtttctccaaagggtgacattggaggcacacagtcaactcaaattttgggccaatgggaaacccctctcatccaaccacaagcagcgcacaccatactgttccacttattgagtcccagccctcttccacctcaaaaaaataaagttggctcagaagagt

SEQ ID NO: 6940 - DNA, 486 bp, Homo sapiens
  SIMILAR (64)..(264): 401254mologous to Homo sapiens Human secreted protein encoded by gene 77 clone HSAUM95,accession number W67883,Smith-Waterman Score=141.
cctcctgagaggagcccggcaagcagcccctgccagcccatctatgagtgtgagcttgccagtcaggccccagaaaaacagccagatgtcaggcatcaccaccttcccaaaacaaagccattgccctccatcgactccctgggtcctcctcccccaaagccttcaagacctcccatcgtgaacctccaggcctttcagaggcagccagctgctgttcccaagactcagggggaagtgactgtggaagagggctccctgtctccagagaggcttttcaatgcagaatttgaagaaccacataattacgaggcaacaatttcatatctgagacactctggcaactccattaacctgtgcactgcaaaagaaattgctgatcttttggaggtaaaaaagttagcaactcagaaacaccagtgggcacaacaacagcttcagctgaagcctgctctttctagccaaacgaccaggaaaagggcaacctag

SEQ ID NO: 6941 - DNA, 298 bp, Homo sapiens
  SIMILAR (6)..(200): 831254mologous to multiple sclerosis associated retrovirus protease,accession number AF009666,Smith-Waterman Score=264.
tcttttgtcttggacaactgtcctccagatctgtcactatctgaggcgtcccacgacaggcagtcactagatacttctcccagccactaagttgtgactggagaactttgctgtcttcacatgcttttctaattatgcctgaaagcccaaatcctttgttagggagagacatcctagcaaaagcaggggccattgtacacgcatggcccaaggttccattccttggaatccatgaggccaagaaccccaggtcagagaacaaagggcttgcagccattttgtgagcagctgccaccat

SEQ ID NO: 6942 - DNA, 1317 bp, Homo sapiens
  SIMILAR (1134)..(721): 861254mologous to Cloning vector pSacBII SacB,accession number U09128,Smith-Waterman Score=624.
tcaacaagatggtgaattgactagtgggtagatccacaggacgggtgtggtcgccatgatcgcgtagtcgatagtggctccaagtagcgaagcgagcaggactgggcggcggccaaagcggtcggacagtgctccgagaacgggtgcgcatagaaattgcatcaacgcatatagcgctagcagcacgccatagtgactggcgatgctgtcggaatggacgatatcccgcaagaggcccggcagtaccggcataaccaagcctatgcctacagcatccagggtgacggtgccgaggatgacgatgagcgcattgttagatttcatacacggtgcctgactggggttcttggcctcaaggattccaaggaatggaaccttgggccatgcggtgagtgttatagctctattagaagcatgcttgaattctcgccgggccttagctgcctccccatggggcagggcttgggacctgcagcccgccatgcccaagtcaccccccatggtgggctcttgcatggcccgagcctccccaccaggcactgccccctgctccatgggttcccagtcccatcgacccccccaagggtgctttagatgtgtcccagagatctcgtgcattgtgtctttgttttcattggtttcaaagaacatctttatttctgccttcatttcgttatttacccagtagtcattcaggagcaggttgttctgtttccatgtagttgtgtgatttcgagtgagtttattaatcctgagttctaatttgattgcactgtggtctgcgcttgttgtcaggctttgtttgccgtaatgtttaccggaatagtcagtgtagaataaacggatttttccgtcagatgtaaaggttgcagaaccggaccattcttgcgtctgatctttcaggatcggatcgttggcgtcgaacttatcgctgtctttaaagacacggcccgcgtttttccagctgtcgattgagttgtcgccgaccttttgataaaacatgtagattgatgtgtcatcagcgtctttcgggcttcccgcaagagcaaacacaacgtgatagccgttgtattcagctactgttccgtcaacgttttgcagcggccagctgtcccacacatcaagtccatgtgcataggtggagaaagccaatggttttcctaattcttgaatcagacctgaaatatacagtcctgtctctcccagaagagtgtcacacaggtgcccatgagcagtcatctcattgccttctgctctcattggcctctgttgatgtccattgctcccaaaggccctgaggttgctgctttccatcat

SEQ ID NO: 6943 - DNA, 348 bp, Homo sapiens
  SIMILAR (109)..(68): 781254mologous to Plasmodium falciparum serine repeat antigen,accession number AB021825,Smith-Waterman Score=43.
aaaaaaaaagaggaagaagaagatagaagaagaagaagaagaagaggaagaggaagaagaagaagaaagcagaggaagagggagatgaagaacaagaagaagaagaagaaagaagaagaagaagaagaagaagaagaagaagaagaagaagaagaagaagaagaagacgacgacgacgacaatggccttttgcaaacattaccaggattacatgagatgcgagtgaatctcacaagatctgatggtattataagtgtctggcatttccccttctggcacttctccttcctgatgccttatgaagaaggtgccttgcttcgtcttcaccttccaccttacaccatgatt

SEQ ID NO: 6944 - DNA, 195 bp, Homo sapiens; identical to SEQ ID NO: 4377
  SIMILAR (4)..(192): 691254mologous to Arabidopsis thaliana putative protein,accession number AL162506,Smith-Waterman Score=217.

SEQ ID NO: 6945 - DNA, 510 bp, Homo sapiens; identical to SEQ ID NO: 5343
  SIMILAR (4)..(354): 511254mologous to Homo sapiens Human thyrotropin GPR N- terminal sequence,accession number W03626,Smith-Waterman Score=336.

SEQ ID NO: 6946 - DNA, 318 bp, Homo sapiens; identical to SEQ ID NO: 2962
  SIMILAR (102)..(251): 801254mologous to Arabidopsis thaliana putative protein,accession number AL162506,Smith-Waterman Score=202.

SEQ ID NO: 6947 - DNA, 159 bp, Homo sapiens; identical to SEQ ID NO: 2961
  SIMILAR (54)..(113): 601254mologous to Oryza sativa similar to RING-H2 finger protein RHA1a (AF078683),accession number AP000616,Smith-Waterman Score=62.

SEQ ID NO: 6948 - DNA, 777 bp, Homo sapiens
  SIMILAR (389)..(721): 261254mologous to Homo sapiens Human follicle stimulating hormone GPR N-terminal sequence,accession number W03627,Smith- Waterman Score=176.
atgattgctaacctgaagaaaaaagctatgaaagagcttctgaagctcccatgcccatggatttctcagtgccttgagaagggagtatgtcatctgcatcttgccagaggaaatagtgagagagatattgacaccaaaagacttcacaatgaaggggatcggattgtgccagcccaaaatatgccactttggcataaggattattttgagctaaaggcaattaagaagcagcaagaagagaaaaggaattctttttttggggttactctgacagtctacttatgccgctatatcgataaactcatgattttctttctgaatcaagacttttggctgccaggtaaactcacagcccaatctgtctcagcaacttccacccccagcagttatttgccatcaggcctgggagacaagagtgaaactccatctgaagaagaagaagaagaggaagaagaagaagaaggagaaggagaaggggaaggggaaggggaaggggaagaagaagaaagaagaagaagaagaagaggaagaagaagaagaaagaagaagaagaagaagaaagaagaagaagaaagaagaagaagaagaagaaagaagaagaagaagaaagaagaagaagaagaagaagaagaagaagaagaagaagaagaagaagaagaagaagaagaagaagaagaaagaaagaaagaaagaaagaaagaaagaaagaaagaaagaagacagattcactcatcctttatgccttttgtgagaaaatgtaagaacctaggatggtga

SEQ ID NO: 6949 - DNA, 282 bp, Homo sapiens; identical to SEQ ID NO: 2959
  SIMILAR (116)..(232): 841254mologous to Homo sapiens Human secreted protein HCHPF68, SEQ ID NO:163,accession number Y86248,Smith-Waterman Score =168.

SEQ ID NO: 6950 - DNA, 1233 bp, Homo sapiens; identical to SEQ ID NO: 3966
  SIMILAR (960)..(1214): 361254mologous to Plasmodium falciparum glutamic acid-rich protein,accession number AF251290,Smith-Waterman Score=147.

SEQ ID NO: 6951 - DNA, 181 bp, Homo sapiens; identical to SEQ ID NO: 6508
  SIMILAR (3)..(113): 911254mologous to Homo sapiens dJ1022E24.3 (KIAA0835, similar to myelin transcription factor 1 (MYT1)),accession number AL121581,Smith-Waterman Score=176.

SEQ ID NO: 6952 - DNA, 460 bp, Homo sapiens
  SIMILAR (5)..(196): 901254mologous to Homo sapiens Human thyrotropin GPR N- terminal sequence,accession number W03626,Smith-Waterman Score=294.
aaagcatatccagaaaaaagaagaagaagaagaagaagaagaagcagaagaagaagaagaagaagaagaagaagaagaagaagaagaagaagaagaagaagaagaagaagaagaagaagaggaagaggaagaagaagaagaagaagaagaagaagaagaagaagaagaagaagaagaagaagaagaagaagaaaagtgctcactgaagcacactgaagctccctgtgtaaaaggaatagaaactattttctggaacaaattctcactgtgtgacatcacaaagagttatttatctggggtccaaaaacttgaggaacgtgcacacaaagtgaagttagcactgaagtttaagaaggaaattaaaatggctctccacggtggaaacccaatttggttgtccagtgtcaccctggtgtttggggtcctcatgtactgggagatggaagaatgtgatgattga

SEQ ID NO: 6953 - DNA, 435 bp, Homo sapiens; identical to SEQ ID NO: 2964
  SIMILAR (315)..(166): 501254mologous to Plasmodium falciparum serine repeat antigen,accession number AB021826,Smith-Waterman Score=87.

SEQ ID NO: 6954 - DNA, 393 bp, Homo sapiens
  SIMILAR (190)..(276): 591254mologous to Boophilus microplus NADH dehydrogenase subunit 3,accession number AF110622,Smith-Waterman Score=61.
agttttatggcatgcgcaattgcaattgaagtacaactgacttctgcagaaccggcttccataggatttcctgtccaaaaatcaccatgtggtcatctgcagctaaatggttacaaatcatcaagtaaacaaggcttccccaccccggcgctttttttttaaggagtgaaatccaccaaactctatcatttgcaaattatctctggacttcttttatttctttttttttcactgggtaagaaggaaaacgagcaaacaaaaaatcctccctccgaatttgtttaaaggcgtaatttccctgtgaggtgttttacaggcttctccttcgttagcttttcttgcctggtaattactgaaagaagtctgcttttccagggcgagctattcctttaa

SEQ ID NO: 6955 - DNA, 3130 bp, Homo sapiens
  SIMILAR (132)..(2150): 1001254mologous to Homo sapiens phosphodiesterase,accession number L20970,Smith-Waterman Score=3487.
gaattcccaatacttgttgcaataattgcccacgatagctgctcaaacaagagagttggaattcatctgtaaaaatcactacatgtaacgtaggagacaagaaaaatattaatgacagaagatctgcgaacatgatgcacgtgaataattttccctttagaaggcattcctggatatgttttgatgtggacaatggcacatctgcgggacggagtcccttggatcccatgaccagcccaggatccgggctaattctccaagcaaattttgtccacagtcaacgacgggagtccttcctgtatcgatccgacagcgattatgacctctctccaaagtctatgtcccggaactcctccattgccagtgatatacacggagatgacttgattgtgactccatttgctcaggtcttggccagtctgcgaactgtacgaaacaactttgctgcattaactaatttgcaagatcgagcacctagcaaaagatcacccatgtgcaaccaaccatccatcaacaaagccaccataacagaggaggcctaccagaaactggccagcgagaccctggaggagctggactggtgtctggaccagctagagaccctacagaccaggcactccgtcagtgagatggcctccaacaagtttaaaaggatgcttaatcgggagctcacccatctctctgaaatgagtcggtctggaaatcaagtgtcagagtttatatcaaacacattcttagataagcaacatgaagtggaaattccttctccaactcagaaggaaaaggagaaaaagaaaagaccaatgtctcagatcagtggagtcaagaaattgatgcacagctctagtctgactaattcaagtatcccaaggtttggagttaaaactgaacaagaagatgtccttgccaaggaactagaagatgtgaacaaatggggtcttcatgttttcagaatagcagagttgtctggtaaccggcccttgactgttatcatgcacaccatttttcaggaacgggatttattaaaaacatttaaaattccagtagatactttaattacatatcttatgactctcgaagaccattaccatgctgatgtggcctatcacaacaatatccatgctgcagatgttgtccagtctactcatgtgctattatctacacctgctttggaggctgtgtttacagatttggagattcttgcagcaatttttgccagtgcaatacatgatgtagatcatcctggtgtgtccaatcaatttctgatcaatacaaactctgaacttgccttgatgtacaatgattcctcagtcttagagaaccatcatttggctgtgggctttaaattgcttcaggaagaaaactgtgacattttccagaatttgaccaaaaaacaaagacaatctttaaggaaaatggtcattgacatcgtacttgcaacagatatgtcaaaacacatgaatctactggctgatttgaagactatggttgaaactaagaaagtgacaagctctggagttcttcttcttgataattattccgataggattcaggttcttcagaatatggtgcactgtgcagatctgagcaacccaacaaagcctctccagctgtaccgccagtggacggaccggataatggaggagttcttccgccaaggagaccgagagagggaacgtggcatggagataagccccatgtgtgacaagcacaatgcttccgtggaaaaatcacaggtgggcttcatagactatattgttcatcccctctgggagacatgggcagacctcgtccaccctgacgcccaggatattttggacactttggaggacaatcgtgaatggtaccagagcacaatccctcagagcccctctcctgcacctgatgacccagaggagggccggcagggtcaaactgagaaattccagtttgaactaactttagaggaagatggtgagtcagacacggaaaaggacagtggcagtcaagtggaagaagacactagctgcagtgactccaagactctttgtactcaagactcagagtctactgaaattccccttgatgaacaggttgaagaggaggcagtaggggaagaagaggaaagccagcctgaagcctgtgtcatagatgatcgttctcctgacacgtaacagtgcaaaaactttcatgccttttttttttttaagtagaaaaattgtttccaaagtgcatgtcacatgccacaaccacggtcacacctcactgtcatctgccaggacgtttgttgaacaaaactgaccttgactactcagtccagcgctcaggaatatcgtaaccagttttttcacctccatgttcatccgagcaaggtggacatcttcacgaacagcgtttttaacaagatttcagcttggtagagctgacaaagcagataaaatctactccaaattattttcaagagagtgtgactcatcaggcagcccaaaagtttattggacttggggtttctattcctttttatttgtttgcaatattttcagaagaaaggcattgcacagagtgaacttaatggacgaagcaacaaatatgtcaagaacaggacatagcacgaatctgttaccagtaggaggaggatgagccacagaaattgcataattttctaatttcaagtcttcctgatacatgactgaatagtgtggttcagtgagctgcactgacctctacattttgtatgatatgtaaaacagattttttgtagagcttacttttattattaaatgtattgaggtattatatttaaaaaaaactatgttcagaacttcatctgccactggttatttttttctaaggagtaacttgcaagttttcagtacaaatctgtgctacactggataaaaatctaatttatgaattttacttgcaccttatagttcatagcaattaactgatttgtagtgattcattgtttgttttatataccaatgacttccatattttaaaagagaaaaacaactttatgttgcaggaaaccctttttgtaagtctttattatttactttgcattttgtttcactctttccagataagcagagttgctcttcaccagtgtttttcttcatgtgcaaagtgactatttgttctataatac

SEQ ID NO: 6956 - DNA, 642 bp, Homo sapiens
  SIMILAR (367)..(630): 591254mologous to Homo sapiens Human follicle stimulating hormone GPR N-terminal sequence,accession number W03627,Smith- Waterman Score=276.
atgaagaaatgcaaaacatcagtgatagggattgcaacgttttatctcagcattcctcatatctacacaccccctaatcaaacaagcagttttatggcatgcgcaattgcaattgaagtacaactgacttctgcagaaccggcttccataggatttcctgtccaaaaatcaccatgtggtcatctgcagctaaatggttacaaatcatcaagtaaacaaggcttccccaccccgctgctcaaacaagagagttggaattcatctgtaaaaatcactacatgtaacgtaggagacaagaaaaatattaatgacagaagatctgcgaacatgatgcacgtgaataattttccctttagaaggcattcctggatatgcctggacagagtccagagtgagaccctgcctcaagaaaaaaaagaagaagaagaagaaagaagaagaagaagaagaaagaagaaagaagaagaagaaagaagaagaagaagaaagaagaagaagaaagaagaagaagaagaagaagaagaagaggaagaggaagaggaagaagaagaagaagaagaagaagaagaagaagaagaagaagaagaagaagaagaagaagaagaagaagaagaagaaagaaagaaagaattagttcactga

SEQ ID NO: 6957 - DNA, 654 bp, Homo sapiens; identical to SEQ ID NO: 5357
  SIMILAR (109)..(384): 711254mologous to Homo sapiens Human follicle stimulating hormone GPR N-terminal sequence,accession number W03627,Smith- Waterman Score=336.

SEQ ID NO: 6958 - DNA, 684 bp, Homo sapiens
  SIMILAR (187)..(681): 921254mologous to Homo sapiens diubiquitin,accession number Y12653,Smith-Waterman Score=769.
atgattcagaggaaacgtgccagcattggtgctccctgtgcctgggtccgaaaaaaagaagaagaagaagaagaagaagaagaagaagaagaagaagaagaagaagaagaggaagaggaagaggaagaggaagaggaagaggaagaagaagaagaagaagaagaagaaggagagaacaacttggctatggggaaatcctttaacgtgattactgtgcatgtccgttccgaggaatgggatttaatgacctttgatgccaacccatatgacagcgtgaaaaaaatcaaagaacatgtccggtctaagaccaaggttcctgtgcaggaccaggttctttcgctgggctccaagatcttaaagccacggagaagcctctcatcttatggcattgacaaagagaagaccatccaccttaccctgaaagtggtgaagcccagtgatgaggagctgcccttgtttcttgtggagccaggtgatgagggaaagaggcacctcctccaggtgcgaaggtccagctcagtggcacaagtgaaagcaatgatcgagactaagacgggtataatccctgagacccagattgtgacttgcaatggaaagagactggaagatgggaagatgatggcagattacggcatcagaaagggcaacttactcttcctggcatcttattttattggagggtga

SEQ ID NO: 6959 - DNA, 481 bp, Homo sapiens
  SIMILAR (47)..(424): 991254mologous to Homo sapiens TRABID protein,accession number AJ252060,Smith-Waterman Score=664.
atactcggtttcaaggtgtttatctgcctttgttgtgggaacagagtttttgtggaaaagtccgattgctctgggttatacgaggggccacttctctgctttggttgccatggaaaatgatggctatggcaaccgaggtgctggtgctaatctcaataccgatgatgatgtcaccatcacatttttgcctctggttgacagtgaaaggaagctactccatgtgcacttcctttctgctcaggagctaggtaatgaggaacagcaagaaaaactgctcagggagtggctggactgctgtgtgacggaggggggagttctggttgccatgcagaagagttctcggcggcgaaatcaccccctggtcactcagatggtagaaaaatggcttgaccgctaccgacagatccggccgtgtacatccctgttctgatggagaggaagatgaggatgatgaagatgaatggaaaaaaagattcaaaca

SEQ ID NO: 6960 - DNA, 802 bp, Homo sapiens
  SIMILAR (218)..(595): 961254mologous to Homo sapiens TRABID protein,accession number AJ252060,Smith-Waterman Score=648.
aagttgcagtagtggtaatagccaaaggagatcacctcctgctacgaagcgggactctgaagtgaaaatggattttcagaggattgaattggctggtgctgtgggaagcaaggaggaacttgaagtagactttaaaaaactaaagcaaattaaaaacaggatgaaaaagactgattggctcttcctcaatgcttgtgtggaaagcaccatggttcatttgaacttagagaaggagcctggagcaagcttggagcagacgcacatttttgtactggcacatattcttagacgaccaattatagtttatggagtaaaatattacaagagtttccggggagaaactttaggatatactcggtttcaaggtgtttatctgcctttgttgtgggaacagagtttttgttggaaaagtccgattgctctgggttatacgaggggccacttctctgctttggttgccatggaaaatgatggctatggcaaccgaggtgctggtgctaatctcaataccgatgatgatgtcaccatcacatttttgcctctggttgacagtgaaaggaagctactccatgtgcacttcctttctgctcaggagagctgggatgctgctgggtggtacgagggcccctgggagaacgccgagtccctgcggcctctggggaggagaagctccctgacgtatggcacagcagaggggacttggtttgagccaaaccaccgaccacaggacgctgccctgcccgtggccgccgagccctacctgtaccgggaggccgtttataactcagtggctgcaagatag

SEQ ID NO: 6961 - DNA, 933 bp, Homo sapiens; identical to SEQ ID NO: 6176
  SIMILAR (1)..(930): 681254mologous to Homo sapiens p40,accession number U93567,Smith-Waterman Score=1054.

SEQ ID NO: 6962 - DNA, 873 bp, Homo sapiens
  SIMILAR (28)..(870): 631254mologous to Homo sapiens p40,accession number U93569,Smith-Waterman Score=856.
gatcacaactcctcgccagcaagggaacaaaactggatggagaatgagtttgacgaattgacagaagtaggcttcagaaggtgggtaataacaaactcctccgagctaaaggagcatgttctaacccaatgcaaggaagctaagaaccttgataaaaggttagacaaattgctacctagaataaccagtgtagagaagaacataaatgacctgatggagctgaaaaacacagcacaagaacttcatgaagcatacacaagtatcaatacccaaatcgatcaagcagaagaaaagatatcagagattgaagatcaactcaatgaaataaaaccaaatctacgtctgattggtgtacctgaaagtgatggggagaatggaaccaagttggaaaacactctgcaggatattatccaggagaacttctccaacctagcaaagcaggccaacattcaaattcaggaaatacagagaacaccacaaagatactcctcgagaagaacaaccccaagacacataattatcagattcaccaaggttggaatgaaggaaaaaatgttaagggcagccagagagaaaagtcgggttacccacaaaggaaagcccatcagactaacagtggatctctcggcagaaaccagaaaagagtgggggccaatattcagcatttgtaaagaaaagaattttcaacccagaatttcatatccagccaaactaagcttcataagcgaaggagaaataaaatcctttacaaacaagcaaatgctgagagattttgtcaccaccaggcctgccctacaagagctcctgaaggaagcactaaatatggaaaagaacaaccggtaccagccactgcaaaaacataccaaattgtaa

SEQ ID NO: 6963 - DNA, 585 bp, Homo sapiens
  SIMILAR (292)..(585): 821254mologous to Homo sapiens p40,accession number U93574,Smith-Waterman Score=404.
catcaaagaccaaaggtagataaatccacgaagatgaggaaaaaccagcgcaaaaagtctgaacattccaaaaaccagaacgcctcttccccaaaggatcacaactcctcactagcaagggaacaaaactggatagagattgagtttgatgaattgacagaagtaggcttcagaaggtgggtaataacaaactcctctgagctgaaggagcatgttctaacccaatgcaaggaagctaagaatcttgaaaaaaggttagacgaattgctaactagaataaccaatttagagaagaacataaatgacctgatggagctgaaaaaggatattacccaggagaacttccccaacctagcaagacaggccaacattcaaattcaggaaatacagagaacaccacaaagatactcctcgagaagcgcaaccccaagacacatcatcatcagattcaccaaggttgaaatgaaggaaaaaatgttaaggccagccagagagaaagatcgggttacccacaaagggaagcccatcagactaacagtggatctctctgcagaaaccctacaagccagaagagagtgggggcca

SEQ ID NO: 6964 - DNA, 1035 bp, Homo sapiens
  SIMILAR (463)..(1032): 501254mologous to Homo sapiens p40,accession number U93570,Smith-Waterman Score=461.
atggaatactatgcagccataaaaaatgatgagttcatgtcctttgtagggacatggatgaaattggaaatcatcattctcagtaaactatcacaagaacaaaaaaccaaacaccgcatattctcactcatagagcacctgggggaaggggcagctgtgggtgcagcttcagcagacttcctgctggctctgaagagaaccttccttcctgctagctctgaagaaaacagcagatctcagagcagagtacttgggttctggagacacctcacagcaggggtcaacagacatctgatacgggagagctctggctggcatcttgtgggtgcccctctgggaagaagcttccagaggaaggaacaggcagcagtctttgctgttctgcagactctgctggtgatacccaggcaaacagggtctggaatggacctccagcaaagtccagcagacctgcagcagaggggactgagtgttagaaggaaaactaacaaacagaaaggaatagcatcaacatcaacaaaaaggacgtccacacagaaaccccatccaaagggcaccatcatcaaaaaccaaagggacagaagaaggcttcagaagttgggtaataacaaaccctctgagctacaggagcatgttctaacccaatgcaaggaagctaagaaccttgaaaaagggttagaggaattgctaactagaataaccagtttagagaagaacacaaatgacctgatagagctgaaaaacacagcacaggaacttcatgaagcatacacgagtatcaatagcccaattgatcaagcagaagaaaggatatcagagattgaagatcaacttaataaaataaagtgtgaagacaagtttggagaaaaagaaatgaaaaggaaagaacaaagcctccaagaaatatgggactatgtgaaaagaccaaacctacgtttgattggagtacttgaaaatgacagggataatggaaccaagtggaaaaacactcttcaggatattatgcagaaaaacttccccaacctagcaagatag

SEQ ID NO: 6965 - DNA, 772 bp, Homo sapiens
  SIMILAR (434)..(733): 601254mologous to Homo sapiens PRO2221,accession number AF116695,Smith-Waterman Score=294.
gagagagcacctggcggaagggatggctgtgggcacagcttcagcagacttaaacatttctgcctgctggctccgaagagagcaacagatctcccagcacagtgctcgagctttgctaagggacagactgcctcctcaagagaactccagctggcatccggcaggtgcccctctgggacgaaacttccagaggaaggagcaggcagcaatctttgctgttctgcagcctccactggtgatacccaggaaaacagggtctggagtggacctcgagcaaactccagcagacctgcagaagaggggcctgactgttacaaggaaaactaacaaacagaaagcaatagcatcaacatcaacggaaaggacgcccacgcagaaacccccattcaaaagtcaccaacatcaaagaccaaacgtagataaatccgcgaagatgaggaaaaaccagagcaaaaaggctgaaaattccaaaaaccagaatacctcttctcctccaaaggatcacaactcctcgccagcaagggaacaaaactggacagagaatgagtttgatgaactgacagaagtaggcttcagaaggtgggtaataacaaactcctccaagttaaaggagcatgttctaacccaatgcaaggaaactaagaaacttgataaaaggttagaggaactgctaactataataaccagtttagagaagaacataaatgacctgatggagctgaaaaacacagcaggagaacttcgtgatgcatacacaagtatcaatagctga

SEQ ID NO: 6966 - DNA, 2913 bp, Homo sapiens
  SIMILAR (2)..(49): 811254mologous to Homo sapiens putative p150,accession number U93563,Smith-Waterman Score=76.
atggaggaagatctaccaagcaaatggaaaacaaaaaaggcaggggttgcaatcctagtctctgataaaacagactttaaaccaacaaagatcaaaagagacaaagaaggccattacataatggtaaagggatcaattcaccaagaagagctaactatcctgaatatatatgcacccaatacaggagcacccagattcattaagcaagtcctgagtgacctacaaagagacttagactcccacaccataataatgggagactttaacaccccactgtcaacattagacagatcaatgagacagaaagttaacaaggatacccaagaattcaactcagctctgcaccaagcggacctaatagacatctacagaactctccaccccaaatcaacagaatatacatttttttcagcaccataccacacctattccaaaattgaccacatagttcaaagtaaagctctcctcagcaaatgtaaaagatcagaaattataacaaactgtctctcagaccacagtgcaatcaaactagacctcaggattaagaaactcactcaaaaccactcaactacgtggaaactgaacaacctgctcctgaataactactgggtacataacgaaatgaaggcagaaataaagatgttctttgaaaccaacgagaacaaagacacaacataccagaatctctgggacacattcaaagcagtgtgtagagggatatttatagcactaaatgcccacaagagaaagcaggagacatccaaaattgacaccctaacatcacaattaaaagaactagaaaagcaagagcaaacacattcaaaagctagcagaaggcaagaaataactaaaatcagagcagaactgaaggaaatagagacacaaaaaacccttcaaaacattaatgaatccaggagctggttttttgaaaggatcaacaaaattgacagaccgctagcaagactaataaagaagaaaagagaaaagaagcaaatagacacaataaaaaatgataaaggggatatcaccactgatcccacagaaatacaaactaccatcagagaatactacaaacacctctacacaaataaactaaaaaatctagaagaaatggataaattcctcgacacatacaccctcccaagactaaaccaggaagaagttgaatctctgaatacaccaataacaggctctgaaattgtggcaataatcaatagcttaccaacaaaaaagagtccaggaccagatggattcacagccgaattctaccagaggtacaaggaggaactgatgcagaaaaggccctttgacaaaattcaacaacccttcatgctaaaaactctcaataaattaggtattgatgggacatatctcaaaataataagagctatctatgacaaacccacagccaatatcatactgaatgggcaaaaactggaagcattccctttgaagactggcacaagacagggatgccctctctcaccactcctattcaacatagtgatggaagttctggccagggcaattaggcacgacaaggaaataaagggtattcaattaggaaaagaggaagtcaaattgtccctgtttgcagatgacatgattgtatatctagaaaaccccattgtctcagcccaaaatctcaagctgataagcaacttcagcaaagtctcaggatacaaaatcaatgtacaaaaatcacaagcattcttatacaccaataacagacaaacagagagccaaatcatgagtgaactgccattcacaattgcttcaaaaagaataaaatacctaggaatccaacttacaagggacgggaaggacctcttcaaggagaactacaaaccactgctcaatgaaataaaagaggatacaaacaaatggaagaacattccatgctcatgggtaggaagaatcaatatcatgaaaatggccatactgcccaaggtaatttacagattcaatgccatccccatcaagctaccaatgactttcttcacagaattggaaaaaactactttcaagttcatatggaaccaaaaaagagcccacattgccaagtcaatcctaagccaaaagaacaaagctggaggcatcacactacctgacttcaaactatactacaaggctacagtaaccaaaacagcatggtactggtaccaaaacagagatatagatcaatggaacagaacagagccctcagaaataacgccacgtctgaagagagcagcagatctcccagcacagtacttgagctctgctgagggacagactgcttcctcaagggggtccctgacccccctggctcctgatgaggagacacctctcagcaggggtcaacagacacctcatacaggagagctccagctggcattaggtgggtgcccctctgggacaaatcttccagaggaaggaacaggcaacaatctttgctgttctgcagcctccgccggtgatacccggcaacaggatctggagtggtcctccagcgaactccagcagacctgcagtagaggaaacccatctgaaggtcaccaacatcaaagatcaaaggtagataaatccatgaagatgaggaaaaaccagtgcaaaaaggctgaaaattccaaaaaccagaacacttcttctcctccaaaggatcaaaactccttgccagcaagggaacaaaactggacagagaattggtttgatgaattttcagaagtaggcttcagaaggtgggtaataacaaactcctctgagctaaaggagcatgttctaagccaatgcaaggaagctaagaaccttgaaaaaagattagaggaattgctaactggaataatcagtgtagagaagaacataaatgtcctgatggagctgaaaagcacagcacaagaacttcgtgaagcatgcacaagtatcaacagctga

SEQ ID NO: 6967 - DNA, 577 bp, Homo sapiens
  SIMILAR (239)..(538): 621254mologous to Homo sapiens PRO2221,accession number AF116695,Smith-Waterman Score=292.
catctttggtgaatctaatacaacatccacgagcctcactttgaaaaactctgccatttggtgccccactggaacaaagcttccagaaggaagaacaggcagcaatctttgctgttctgcagcctctgctggtgatacccaggcaaacagggtctggagtggaccttcagcaaactttagcagacctgcagaagaaggtcaccaacatcagagaccaaaggtagataaatccacgaagatgaggaaaaaccagtgcaaaaaggctgaaaattccaaaaaccagacagcctcttctcctctaaaggatcacaactcctcgccagcaagggaacaaagctggacggagaatgagttcaatgaattgacagaagtaggcttcagaaggtgggtaataacaaactcctacgtgctaaaggagcatgttctaaaccaatgcaaggaagctaagaaccttgaaaaaaggttagatgaattgctaactagaataaccagtttagagaagaacataaatgacctaatggagctgaaaaacacagcacgagaactttgtgaagcatacacaagtatcagtagctga

SEQ ID NO: 6968 - DNA, 695 bp, Homo sapiens
  SIMILAR (357)..(692): 531254mologous to Homo sapiens p40,accession number U93571,Smith-Waterman Score=281.
gtctgaagagagcagcagatctcccagcacagtacttgagctctgctgagggacagactgcttcctcaagggggtccctgacccccctggctcctgatgaggagacacctctcagcaggggtcaacagacacctcatacaggagagctccagctggcattaggtgggtgcccctctgggacaaatcttccagaggaaggaacaggcaacaatctttgctgttctgcagcctccgccggtgatacccggcaacaggatctggagtggtcctccagcgaactccagcagacctgcagtagaggaaacccatctgaaggtcaccaacatcaaagatcaaaggtagataaatccatgaagatgaggaaaaaccagtgcaaaaaggctgaaaattccaaaaaccagaacacttcttctcctccaaaggatcaaaactccttgccagcaagggaacaaaactggacagagaattggtttgatgaattttcagaagtaggcttcagaaggtgggtaataacaaactcctctgagctaaaggagcatgttctaagccaatgcaaggaagctaagaaccttgaaaaaagattagaggaattgctaactggaataatcagtgtagagaagaacataaatgtcctgatggagctgaaaagcacagcacaagaacttcgtgaagcatgcacaagtatcaacagctga

SEQ ID NO: 6969 - DNA, 1215 bp, Homo sapiens
  SIMILAR (820)..(1212): 531254mologous to Homo sapiens p40,accession number U93571,Smith-Waterman Score=346.
atgaaagaaccaatgaaatcttccaaagaatctgcagcaaatgaattagttaaatacttgtttgctataagttctaatgaacaggaaaaaacattttcagcagctgtaaggtatcatttctttgctgattccccaattggacagtgcaatcatctgcatattagtgaattgaaacttagaattctatctgaaagaaattctactaggttcctgaggacattgtgcaccattggcttcacagaaactgggccccgtaagtgggctgccaagttgtgcccgtacaaagctggtaaagcctccccagaggcagttgctgcagcagtggtcagagaaaaaatcagttccttgcagtggactgatgaagggctgaaaggaagtggtagaggtgctttaccttcatcccaagtaaaacgagaaacactttttaaaagccaccttaagtctgcgttttctggagtttgggtggacctaaggccaacggacaacaccatggcaccaatacccctgggaaaatcatattgtagaagcagatcctcaagtgagctaatagtggagcaagctgaaaagcgttccttcagagttcaagaaagtaaaggaaataacggaaaaatgatgcaaaactatgagatcttaatcaatattggtcaaattaaatcaaagtttatcttcacccctgaacatgtacacattggtgaaatgtggttaaaatcaacatcaagagaaaaagaaattatagattctaatgagaagaaggaggaagaggagaccctatccaaaggtcaccaacatcgaagaccaaaggtagataaatccatgaagatgggaagaaaccaatgcaaaaagactgaaaattccaaaaaccagaacacctcttctcctccaaaggatcacaactcctcgccagcaagggaacaaaactggatagagaatgaatttgacgagttgacagaagtaggcttcagaaggtggataataaactcctcagagctaaaggagcatgttctaatccaatgcaaggaagctaagaaccttgaaaaaaggttagatgaattgctaactagaataaccagtttagagaagaacataaatgacctgatggagctgaaaaacatagcacgagaacttcatgatgcatacacaagtatcaatagccaaattgatcaagcagaagaaaggatatcagaggttgcagatcagctctgtgaaataaagtga

SEQ ID NO: 6970 - DNA, 1143 bp, Homo sapiens
  SIMILAR (829)..(443): 601254mologous to Homo sapiens Human secreted protein sequence SEQ ID NO:195,accession number Y87156,Smith-Waterman Score =364.
atggccaaaggtcagggggagtcttggctgctagatcaggaggctcttgctgaaattgaaaaacaacagcagaagtacaaatctttagaggctcgtgctgtgagtcctgtgctagatgctggttggaccttgccctcagggagcttgcagtcagcagaggagtcggcagaaagagagctaaacatagatcatggtgcagcaaggccctctctgctccatgaccaggcagatcatcaggcattcggagcacccattttcctcgatcagcagtctgagtcacccaaaccctcctacgcagaggtcttgcgcatctctgaaaaaaaggcagcagcccgtcagggacttgcagataaaatccccaccttcctgggacagagcacctgggggaaggtcgctctgaagagagcagcggatcttccagtacagcgttccaactctgatacgggacagactgcctcctcaagtgggtccctgacccccgtgtatcctgactgggagacacctcccagtaggggccgaccatgcatctatcacctcacacaggagagctctggctggcacctggcaggtgccccttttggacaaagcttccagaggaaggaacaggcagcaatctttgctgttatgcagcctctgctggtgatacccaggcaaacagggtctggagtggacctccaacaaactccagtagacctgaaacagagggaaaggaataatatcaacatcaacaaaaaggatgtcctctcagagacgtcctccgaagatcaccgacttcaaagatcaaaggtagataaatccacgaagatggggagaaaccagtgcaaaaaggctgaaaactccaaaaaccagaatgcctattctcctacaaaggatcacaacttcttgccagcaagggaacaaaactggacggagagtgagtttgatgaattgacagaagtaggcttcagaaggtgggtaataacaaactcctccgagctaaaggagcatgttctaacccaatgcaaggaagctaagaaccttgaaaaaaggttagatgaattgctaattagaataaccagttcagagaagaacataaatgacctgatggaggtgaaaaacacagcacaagaacttcgagaagcatacacaggtatcaatagctga

SEQ ID NO: 6971 - DNA, 573 bp, Homo sapiens
  SIMILAR (271)..(570): 571254mologous to Homo sapiens PRO2221,accession number AF116695,Smith-Waterman Score=279.
atggatggagatctccacaagggagtggctgtgttctggccaccagatgctgctggaggccacacctgctgcaggagcatggtctgcaggagcctgctaggaggagcacagtggaaatttcatagttttaggtgtaggatccgttttgaattaattttacatatgatacaagaaaggaatagcatcaacatcagccaaaaggacgtccacacagaaactccatctgaaactcaccatcatcaaagaccaaaggtagataaatccatgaagatgaggagaaaccagtgcaaaaaggctgaaaattccaaaaaccagaaagcctcttctcctccaaaggaacacaactcctggagagcaagggaacaaaactggacagagaatgagtttgacaaattgacggaagtaggcttcagaaggtgggtaataacaaactcctctgagctaaaggagcatattctaacccaatgcaaggaagctaagaaccttgaaaaaacattagaggaattgctaactagaataaccagtttagagaagaacataaatgacctgatgaagctgaaaaacacagcatga

SEQ ID NO: 6972 - DNA, 489 bp, Homo sapiens
  SIMILAR (247)..(486): 561254mologous to Homo sapiens PRO2221,accession number AF116695,Smith-Waterman Score=229.
atgagaaatccagggctacggccatgcctgtggcagttaagtattgatgatgaaattggtgaggcattaaggaagtgtgagttggtaaacagggtctggagtggaccccagcaaactccagcagacctgcagcagaggggcctgactgttagaaggaaaactaaccaaacagaaaggaatagcatcaacatcaacaaaaaggacatccccacaaaaactccatctgaaggtcaccaacatcaaagaccaaaggatcacaactccttgccggcaagggaagaaaactggacagagaatgagtttgatgaattggcagaagtaggcttcagaaggtgggtaatgacaaactcctctgagctaaaggagcatattctaattcaatgtagggaagctaaaaaccttgaaaaaaggttagaggaattgctaactaaaataaccagtttagagaagaatataaatgacctgatgaagctgaaaaatacagcatga

SEQ ID NO: 6973 - DNA, 1479 bp, Homo sapiens
  SIMILAR (595)..(1476): 661254mologous to Homo sapiens p40,accession number U93570,Smith-Waterman Score=909.
atggaggtaaatagagaaaaacagctaaacgagttggaagtgattggctccgaggagcaaaacctggaggaagagggcctgatgattggtggtgtagctgttcgattagtaccagatgatatagtcattccaggaggagtaaatgcaaccaatggcacagaggccagagatgccttgagagtgaaagtcgccatgtctgtgaccttactttcaggaatcattcagtatctactgagtgctcttggctggtcttactacacggtggatggggtcagccagaaaaaccccagagctctgggagtaactgcagaccaactgcatgccatattcacaactatgagtgacgagcaagcaagcttcaggtttggatttgtggccatatatctcacagagcctctggtccgtgggtttaccaccgcagcagctgtgcatgtcttcacctccatgttaaaatatctgtttggagttaaaacaaagcggtacagtggaatcttttccgtggtgtatagtacagttgctgtgttgcagaatgttaaaaacctcaacgtgtgttccctaggcgtcgggctgatggtttttggtttgctgttgggtggcaaggagtttaatgagagatttaaagagaaattgccggcgcctattcctttagagttctttgcggatcacaactcttcaccagcaagggaacaaaagtggatggagaatgagtttgacgaatggacagaagtaagcttcagaaggtgggtaataacaaactcctccgagctaaaggaacatattctaacccaatgcaaggaagctaagaaccttgaaaaaaggttagaggaattgctaactagaataaccagtttagagaagaacataaatgacttgatggagctgaaaaacacagcacaagaatttcatgaagcatacacaagtataaatagtcaaatcaaacagaagaaagggtatcagagattgaagatcaacttaatgaaatatagtgtaaagacaagattagaggaaaaaaaaagaatgaaaaggaatgaacaaagcctccaggaaatatgggactgtgtgaaaagaccaaacctacgtttgactggtgtacctgaaagtgacggggagaatggaaccaagttggaaaacactcttcaggacattatccaggagaacttccacaacctagcaagacaggccaacagtcaaattcaggaaatacagagaacaccacaaagatactcctcaagaagagcaaccccaagacacataatcatcagattcaccaaggttgaaatgaaggaaaaaatgttaagggcagccagagagaaaggtcgggttacccacaaagggaaccccatcagactaatagcggatctatctgcagacaccctacaagccagaagacagtgggagccaatattcaacattcttaaagaaaattttcaaaccagaatttcacatccagccaaactaagcttcataagcaaaggataa

SEQ ID NO: 6974 - DNA, 1083 bp, Homo sapiens
  SIMILAR (793)..(1080): 501254mologous to Homo sapiens PRO2221,accession number AF116695,Smith-Waterman Score=219.
atgcctgagcctcctatcccctccatgggctcctgtgcggcccgagcctccccaacgagtgccagccctgctccacggcgcccagtcccatcgaccacccaaaggctgaggagtgcaggtgcatggcacgggactggcaggcagctccacctgcagccccggtgctggatcaactgggtgaagccatctgggctcctgagtctggtggggcctcggagaacctttatgtctagctcagggattgtaaatacaccagttggcactctatctgtagctcaagctaatctggtggggacatggagaacctttgtgtctagctcagggattgaaaacgcaccaatcagcgccctctcagaccactgggctctaccaatcagcaggatgtggagctgtattccaattttcgctgctcttaaaattttttttaatatcattgcttcccaattgactcacaataacgcagacatagggactgctggagactgtgaccttaaacagttaaagatgtctgcatatacgacatcatgtttgatgggggtgcagggcggtttgccgctgccaccctcggcaccatctctgaactgcccgcttttccggaggagcggaaaagttggaagccgaaaagacaggcgcccggagccctggtctaggtatcaggtgatccggagccctagtcggtgcccactaagaacaccccttctcccatcgggggttcggaggagtgttaagcctgcgggtctgccagtccctaaggcggaactgaaagcgaagatcagccaagagcacagtcggaggcggcagagacggtggcggcctgacctggctctttcgcccctcggagaaccggatcacaactcctcacaagcaagggaacaaaactggatggagaatgagtttgatgaattgacagaagtgggcttcagaacgtgggtaatagcaaattcctctgagctaaagaagcatgttctaacccaatgccaggaagctaagaaccttgaagaaaggttagatgaatttctaactagaataaccagattagagaagaacataaatgacctgatggagctgaaaaacacagcatga

SEQ ID NO: 6975 - DNA, 3501 bp, Homo sapiens
  SIMILAR (1116)..(1157): 801254mologous to Homo sapiens putative p150,accession number U93574,Smith-Waterman Score=61.
atgattgtatatttagaaaaccccatcgtgtcagcccaaaatctccttaagctgataagcaacttcagcaaagtctcaggatacaaaatatacaaaatcgatgtgcaaaaatcacaagcattcctatacaccaataatagacaaacagagagccaaatcatgagtgaactcccattcacaattgcttcaaagagaataaaatacccaggaatccaacttacaaggaatgtgaaggacctcttcaaggagaactacaaaccactgctcaatgaaataaaagaggacacaaacaaatggaagaacattccatgctcatggataggaagaatcaatattgtgaaaatggccatactgcccaaggtaatttatagattcaatgccatccccatcaagctaccaatgacttccttcacagaattggaaaaaactactttaaagttcatatggaaccaaaaaggagcccgcattgccaagacaatcctaagcaaaaagaacaaagttggaggcatcacgctacctgacttcaaactatactacaaggctacggtaaccaaaacagcatggtactggtaccaaaacagagatatagatcaatggaacagaacagaggcctcagaaataacaccacccatctacaaccatctgatctttgacaaacctgacaaaaacaagaaatggggaaaggattccctatttaataaatggtgctgggaaaactggctagccatatgtagaaagctgaaactggatcccttccttacatcttatacaaaaattaattcaagatggattaaagacttaaatgttagacctaaaaccataaaaaccctagaagaaaacctaggcaataccattcaggacataggcatgggcaaggacttcatgactaaaacaccaaaagcaatggcaacaaaagccaaaattgacaaatgggatctaattaaactaaagagcttctgcacagcaaaagaaactaccatcagagtgaacaggcaacctacaaaatgggagaaaaattttgcaatctacccatctgacaaagggctaatatccagaatctacaaagaacttaaacaaatttacaagaaaaaaatcaaaaaatcccatcaaaaacactattcacaacagcaaaatcatggaatcaacctaagcccaccaacagttgactggataaagaaaacaggggacacatacaccatagaatactatgcagccataaaaaagaatgaaatcatgtccttcacagcaacatggactgagctggaggccattattctaagagaaataacagaaataggaaataaaataccacacattcacacttacaagtgtgaactaaacagtgggttctttgaagccaacgagaacaaagacacaacataccagaatctctgggacacattcaaggaagtgtgtagagggaaatttatagcactaaatgcccacaagagaaagcaggaaagatccaaaattgacaccctaacatcacaactaaaagaactagaaaagcaagagcaaacacattcaaaagctagcagaaggcaaaaaataactaaaatcagagcagaactgaaggaaatagagacacaaaaaacccttcaaaaaattaatgaatccaggagctggttttttgaaaggatcaacaaaattgatagactgctagcaagactaataaagaaaaaaagagagaagaatcaaatagacgcaataaaaaatgataaaggggatatcaccaccgatcccacagaaatacaaactaccatcagagaatactacaaacacctctatgcaaataaactagaaaatctagaagaaatggataaattcctcgacacatacaccctcccaagactaaaccaggatgaagttgaatctctgaatagaccaataacaggatctgaaattgtggcaataatcaatagcttaccaacaaaaaagagtccaggaccagatagattcacagccaaattctaccagaggtacaaagaggagctgaaccaacgacaaaaaccacatgattatcccaatagatgcagaaaggcctacaaaattcaacatcccttcatgctaaaaactctcaataaactaggtattgatggaacgtatctcaaaataataagagctatttatgacaaacccacagccaatgtcatactgaatgggcaaaagctggaagaattccctttgaaaaccggtctgagaaccattggagttatcaccaaactggaccttatggatgaaggaacggatgccagggatgttctagagaacaaactgttgcctcttcgcaggggttacgtgggggtggtaaacagaagccagaaggacatagatgggaagaaggacataaaggcagccatgctggcagagaggaagtttttcctttcccacccggcttacagacatatcgctgaccgaatgggaaccccacacctgcagaaggtccttaatcaggttcttggaaaagttttcattgtactgagcttgaggtgcctgctgatctcagtggaaatgccaagtagatggttatgtcaagccttcaatagcagagagagctttcccttactcagtcatggagttgcactgggatctagagatggaagtatgagggttgacagacacctcatacgggagagctccggctggcatcttgtgggtgcccctctgggacgaaacttccagaggaaggaacagacagcagtctttgctgttctgcagcctccgctggtgatacccaggcaaacaggatctggagtggacctccagcaaactccagcagacctgcagcagaggggcctgaccgttagaaggaaaactaacaaatcagaaaagaatagcatcaacgtcaacaaaaaggacatccacacagaaaccccatctgaagatcaccaacctcaaagaccaaaggtagataaatctatgaagatgaggagaaagcagtgcaaaaaggctgaaaattccaaaaaccagaatgtctcttctcctccaaaggatcacaactcctcgtcggaaagggaacaaaactggaaggagaatgagtttgatgaattgacagaaataggcttcacaaggtgggtaataacaaactcctctgagctaaaggaggatggtttaacccaatacaaggaagccaagaaccttgaaaaaattttagaggaattgctaactagagaaaccagtttagagaagaacataaatgacctgatggagctgaaaaacacagcacgagaacttcgtgaagcatacacaagtatcaatagccaaatcaatcaagcggaagaaaggatatcagagattgaagatcatcttaatgaaataaagcatgaagacaaaattagagaaaaaagaatgcaaaggaatgaacaaagcctccaagaaatatggggctatgtgaaaagaccaagcctgcatgtgattgtgtacctgaaagtgatgggaagaatggaaccaagttggaaaacacttttcaggatattatccaggagaacttccccaacctag

SEQ ID NO: 6976 - DNA, 717 bp, Homo sapiens
  SIMILAR (286)..(714): 461254mologous to Homo sapiens ORF1; putative,accession number M19503,Smith-Waterman Score=301.
atggagacaggcattttcagaactattataatgcaaaatagaaaatggcacatatccaaaggcatacaagttgagagccatggtcattcagaggagaaaagatcccatctagtaggaggaaggcttctcagaagagccagccatgaagtgggatttaaaatgaataggggtcaacaggcacctcatacaggagagccccagctggaatctggcaggtgctcctctggaacaaatcttccagaggaaggagcaggcagcaatctttgctattctgcagcctctgctggtgatatccaggcaaacaggatctggagtggacccccagcaaactccagcagacctgcagaagaggggtctgactcaagggaacaaaacaagacagagaatgagtttgacgagttgacagaaataggctgcagaaggtgggtaataacaaactcctctgagctaaaggagcatgttgtaacccaatgcaaggaagctaagaatcttgaaaaaatgttacaggaattgctaactagaataaccagtttagagaagaacataaatgacctaatggagctgaaaaacacagcacaagaacttcgtgaagcatatacaattatcaatagccaaactgaccaggcagaagaaaggatatcagagattgaagatcaacttaatgaaataaagggtgaagacaacattagagaaaaaacagtgaaaaggaatgaataa

SEQ ID NO: 6977 - DNA, 633 bp, Homo sapiens
  SIMILAR (1)..(489): 581254mologous to Homo sapiens p40,accession number U93571,Smith-Waterman Score=475.
atggggaaaaaacagtgcaaaaaggctaaaaattccaaaaaccagaatgcctcttctcctccaaaggatcacaactcctcgccagcaggggaacaaaactggatggagaatgaattgacagaagtaggcttcagaaggtgggtcgttacagactcctccaagctaaaggagcatgttctaacccaatgcaaggaagctaagaaccttgaaaaaaggttacaggaactgctaactagaataaccagtttagagaagaacatatatgacctgatggagctgaaaaacacagcacgagaacttcgtgatgcatacataagtatcagtagccgaattgatcaagcagaaaaaaggatatcagagattgaagatcaacttaatgaaataaagcgtgaagacaagattagagaaaaaaatgaaaaggatgaacaaggcctccaagaaatatgggactatgtgaaaagaccaaacctacatttgattggtgtacctggcctgctctattcagacatgtgccgcctcctcccttctccaagaaatcagcctgccttgcaggctttggaacgtggagtcatcttggaggtcaaatgcgtcgtttgcagcacgcaggctggggcagcgcggcgtggtgtaaag

SEQ ID NO: 6978 - DNA, 930 bp, Homo sapiens
  SIMILAR (520)..(918): 501254mologous to Homo sapiens p40,accession number U93567,Smith-Waterman Score=309.
atgaaggtttatggctcgcaccctctgaagcagcggcctaagctgtatctggagccctttgagccaagactggggccagatctgccaggatgtgaggagcaacctcctagggtggcacagggcagttgtgacttgggactggcccctgaaaccaatcaatcgtcctggacctttgtgatcatactggttaatccagagcaaaccctaactctcttcaattctatgaaggctgagagaggtaaggaagctgcagatgaaaagttggaagttcgcagaggctatccagaagatctagctaagataattgatgaggcctccaccagtgatacccaggcaaacagggtctggagcaaagctccagcaaaatccagcagacctgcagaacagcagccttattttagaaggaaaactagcaaacagaaaggaatagtagcaacatcaacaataaaggacatccactcacagaccccatccaaaggtcaccaacatcaaagaccaaaggtagataaatccacgaagatggggcgaaaccagtgcaataaggctgaaaactccaaaaaccagaacgcctcttctccttcgaaggatcacaactcctcgccagcaaaggaacaagactggatggagaatgagtttgatgaattgacagaagtaggcttcagaaggtgggtaataacaaactcttctgagctagaggagcatgttctaacccaatgcaaggaagctaagaaccttgaaaaaaggttagacgaactgctaactataataaccagtttagagaagaacacaaatgacctgatggagctgaaaaacatagcagaagaactttatgaagcatacacaagtttcaatagtcgaattgatcaagcagaagaaaggatatccaaaaaaggaaggatatcagagattgaagagcaacttatgcaataa

SEQ ID NO: 6979 - DNA, 1365 bp, Homo sapiens
  SIMILAR (335)..(700): 441254mologous to Homo sapiens p40,accession number U93569,Smith-Waterman Score=219.
atggcagccgggagacacctcccagtaggggccgacagacacctcatacaggagagcactggctggcatctggcaggtgcccctctgggatggagcttccagaggaaggaacagacagcaatctttgctgttctgcagcctctgctggtgatacccaggcaaacagggtatggagtggacctccagcaaatgccagcagacctgcagcagaggttcctgactgttagaaggaaaactaacaaacagaaaggaatagtatcaacatcaacaaaaaggacgtcatccgaaggtcaccaacatcaaagacgaaaggtagataaattcacagagatggggagaaaccagcacaaaaaggctgaaaattccaaaaaccagaatgcctcttctccctccaaaggatcacaactccttgccagcaagggaacaaaactggacggagaatgagtttgatgaattgacagaaatagacttcagaaggtgggtaataacaaactcctcccaaactaaagggagcatgttctaaccctaatgcaaggaagctaagaaccttgaaaaaaggttagatgaattgctaactagaataaccagtttagagaagaatataaatgacccgatggagctgaaaaacacagcacgagaacttcgtgaagcaaacaaaagtatcaatagctgaatcgatcaaggcaggaaggaaagggtattcagagattgaagatcaacttaatgaaataaagcgagaagacaagattagagaaaaaagaatgcaaaggaacaaacaaaccctccaagaaatatgggactatgtgaaaagaccaaacctacatttgattggtgtacctgaaagtgacagggagaatggaaccaagttggaaaacactcttcaggatattatccatggagaacttccccaatctagcaaggcaggccaatattcaaattcaggaaatacagagaacgccacagagatactcctcgagaagagcaactccaagacacataattgtcagattcaccaaggttgaaatgaaggaaaaaatgttaagggcagccagaaagaaaggtcaggttacccacaaagggaagtccattaggctatcagcagatttctctgcagagaccctacaagccagaagagagtggggaccaatattcaacattcttaaagaaaagaattttcaacccaaaatttcatatccagccaaactaagcttcataagtgaagaagaaataacatcctttacagacaagcaaacgctaagggattttgtcaccactaggcctgccttacaagagctcctgaaggaagcagtgaatatggaaaggaaaaaccagtaccagccactgcaaaaacataccaaaatgtaa

SEQ ID NO: 6980 - DNA, 850 bp, Homo sapiens
  SIMILAR (463)..(570): 1001254mologous to Homo sapiens prolyl endopeptidase,accession number D21102,Smith-Waterman Score=187.
atggctgtggtcatccctgctgccttgggaacagctgctctggtgccctggtccatcctgagggggaaggcaccaaggtactggctcctcccattacttctggacccagataaagtgccaatcattagtgcaagggatctgacttctccagatgctgccctggccagtctgacagctcagtctggagggttagaggagttacacctcaagttagttcatgaagtagctgtgatggctaatactgaatgtcaacttgattggattgaaggatgcaaagtattaatcctggcttgcagattgtgggaccttgtgatcatgacacatccagccttttaccagagtgtgcagtggggaaagggaaatgatcagacatttcagggacgactggacactggctgtgagctgatgttgattccaggggacccgaattgtggtcctccagttaaagtaggggtttatggaggtatcatttatcactgtgatcttaccaaagaggagctggagccaagagttttccgagaggtgaccgtaaaaggaattgatgcttctgattaccagacagtccagctccccaagggtactgagtcttccagaaactgaatcactggttgattgatgatgacgaaaaatgtctctgttcctttgcaatgagaggtcaccaatagggcaccagggtgtttatcaaggcccctcccacctgggagggctgggaccacacaggccacagattagggaatcagaacattgtttgtgaagggaaggatgaggaataaaggaggcgctgggatgtttccccacaatgttttctgtggaaactagggcattattatagcttggtgaattacccttt

SEQ ID NO: 6981 - DNA, 962 bp, Homo sapiens
  SIMILAR (180)..(392): 491254mologous to DG-75 Murine leukemia virus putative gag- pro-pol polyprotein,accession number AF221065,Smith-Waterman Score= 157.
  misc_feature (1)...(962): n = a,t,c or g
atgattgccaacagctccttttaacccttttcacctctgaaaaaaacgaacgtatccgaaaagaagccaaaaataattcctcacatcagccaatagaccggaagaagacactagagacctccttgaagaggtctttccctctacctggcctaactgggacccaaattcctcaatgtttcaatccagctacactacttcctgactcagagtgcactattcctgctcatgactgtcaagaactgttagaaactatcgaaactggccgatctgatcttcaagatgtgcccctggaaaaggcagatgccgccgtgttcacagacagtagccgcttcctcaagcaggaagtaggaaaagccagtgcagctgttaccatgaagacagacgtgttatggaacaacttcgaaatgtgttccacatcacctcccaaaggtccccagtggggtcaaatcctagttgcctggagtgaacgctttcatactgtcctgcaaatatgcggcaccttgctacactccgggttgtttgtcccacaacagaactgggcagaattattaatgtggactttgttcaacaacggactaaagagggagaagcccatgaactctgatcaggatgtggacacccccaaactggaccgtcaggccggggagagcctcaaggccaagtacctcatgccgccctttgtcacaatgacctccccgtcccacttcaccgccatcccggctaagcaccactctgcccatttcacccgatgcccatcaaagccccagcacccatcattcctggaataagaagcagagctcggtcagctctagggaggctgaggcggctcnnnnnnnnnnnnnnnnnnnnnnnnnnnnnnnnnnnnnnnnnnnnnnnnnnnnnnnnnnnnnnnnnnnnnnnnnnnnnnnnnnnnnnnnnnnnnnnnnnnnnnnnnnnnnnnnnnnnnnnnnnaccaaccaccg

SEQ ID NO: 6982 - DNA, 379 bp, Homo sapiens
  SIMILAR (191)..(93): 421254mologous to Arabidopsis thaliana F24O1.6,accession number AC003113,Smith-Waterman Score=61.
gaactttgttgcaggtattggttgactgcagtgttcccaagtggtcgtgctgtgccctaaaggctgctagaacctcaggggccgttgagggcaggttcgagtcccgcaggcaagaaggtggaactctagagaggagggggatgccttggcctgggccccctctgagggaggactgtcgcccctgctgctgggagcatcattagctgcagctcctcatggagagatgcccagcgtaagggtacatcctgtcagaccctcttcccgtgactgttcttccagggtgtgaagggcagaaaggtggggccatctggacccatcatgggacaattctaatggcctctccattgctccctgttgggttggcgagatggcctcaagt

SEQ ID NO: 6983 - DNA, 1859 bp, Homo sapiens
  SIMILAR (587)..(625): 1001254mologous to Homo sapiens CTG26 alternate open reading frame,accession number U80761,Smith-Waterman Score=119.
gaattccatactgagctggcaataacagcgctgatccactggaatggggaagggcctcgagctgttctgtcaacacggagttgtttgtcaggcgtcatgggtatcattttgtgcatctgcccttgttcagtgtttccttgtaattttgcggaaaaaagtctgcttagtgttgaaccagacattctgcagcctttgaaagagaatggaaatggagagattgtgatgtgttcattggtgacttttgacacggatgctaacctgtaagatgtgcagatatatcatgtgcaaactgttaagatgctgtcaacattttgaatgacttcttgcaaatagtaaggaaattaaacacgcacagagctgggcaaatgctagaggatggtgttgccttttgcatcttggtgggaaagagatatttaagggggtgaggggagctcagcaacagcgacttaagggcctgctaggagcggggagaagttggttgctggggtgtgcggcctctgtagcccagtcctccgagtatcgtgacaggtggctgggtgcctcagtgctcaggtatgggctcctgttcctgccgcatgggctcctctgctgctgctgctgctgctgctgctgctgctgctgctggcccgccagttcccatggactctccctcacctgtgcttccttctgctccccgacttcatggttggaacgtgctgtcttcccatccctctgggcacgtggctcctcttttacatgcatgcctggcgaatagtatatccccagtaaatgcttgcagaatgaatgtctttcctgaatgttctgctctgctccccagcccccagaaataaaacagaaatgctgtactccttccctgtctcaggcccaggagcattattattattttttttaaatctcttgtggcacttttctactttctcctccacagtacagctgcttgttgagaggcagtatatgtcatgtctaagaagagtcctcaagtgaagtctggtgcagcttctttctagctgtgtgctttcaggaaagccttttgaatttggagcctctgtttcctctagctttactccaaaggaaacaagtgtaagtgcttggcacctgcagcctgagcgtagttcatgccgcccgtattcctggccagcctccgttctctgggacccggcaggaatgtgtttgtcgcctctggccctgtgcaccctggcttcccatcatacctggagcccctgggacaaatgcctgtggagtggatgagtgagtgcatgcgggtccactcagctccccggcaggcttcagaatcttccctgtattctggaagtaagtggcgtcgctgcccagtttaggagagtgccatgtgggactctgttccatcagctgggttggtgcagtgggactgaactttcttctttggttgccctctgcaaacagccatgcagatgttattgatgggcagttgcaggtagaagcatttttggccctacagggtagatctgccagcatggcaggctgatcagccacgggtgccacgtggctctggaggggcttggcgcctacgttagtcagctcgggctgccacgacaaaataccacagactgggaggcccaaacgtattttctcacagttctggaggttgagagtccatgatcaaggcactggcaggtttggcttcttcccattctgtgcctcacctggtcttttccgtgtgtgtggtcttcagtgtttttccgttctcaggaggacaccagtcttgttggatgagggtcccacccttaagctgccatattaccatgattgcctccttaaagaccttatctccagcgacagtcaccatggggtgtgagcctctgcagaggaatttggaattc

SEQ ID NO: 6984 - DNA, 1140 bp, Homo sapiens
  SIMILAR (631)..(990): 281254mologous to Drosophila melanogaster homeodomain transcription factor Prospero,accession number AF190403,Smith- Waterman Score=94.
atgcctctcacctattcccagatactcgctggagttggagcacacatgtctgcagatgtaaaacgacctgctcccccaggagcggaagacccgatggagcaggtttcacagtgccctcgctgctgcctcccgtttcatctgcacgtctctttcaatgcgggcgtgcgaacttccagagttccaccttcttgcctgcgggactcgaacctgccctcaacggcccctgaggttctagcagcctttagggcacagcacgaccacttgggaacactgcagtcaaccaatacctgcaacaaagttcttaaaaccagctgcagtgagctctcgtaccttgccggcacccgggacctccacaatgcgggcgttccttctggtgtcaacgtggactggtgtttccgtggcacatgcagaagaggctcacaccccaaggtgactgtcgctggagataaggtctttaaggaagccatcatggtaatatggcagcttaagggtgggaccctcatccaacaagactggtgtcctcctgagaacggaaaaacactgaagaccacacacacggaaaagaccagggccaaaaatgcttctacctgcaactgcccatcaataacatctgcatggctgtttgcagagggcaaccaaagaagaaagttcagtcccactgcaccaacccagctgatggaacagagtcccacatggcactctcctaaactgggcagcgacgccacttacttccagaatacagggaagattctgaagcctgccggggagctgagtggacccgcatgcactcactcatccactccacaggcatttgtcccagggtctccaggcatgcatgtaaaagaggagccacgtgcccagagggatgggaagacagcacgttccaaccatgaagtcggggagcagaaggaagcacaggtgagggagagtccatgggaactggcgggccagcagcagcagcagcagcagcagcagcagcagcagcagaggagcccatgcggcaggaacaggagcccatacctgagcactgaggcacccagccacctgtcacgatactcggaggactgggctacagaggccgcacaccccagcaaccaacttctccccgctcctagcaggcccttaagtcgctgttgctga

SEQ ID NO: 6985 - DNA, 666 bp, Homo sapiens
  SIMILAR (1)..(129): 881254mologous to Macaca fascicularis hypothetical protein,accession number AB047968,Smith-Waterman Score=199.
atggaatactatgcagccataaaaaaggatgagttcgtgttctttgcagggacatggacaaagctggaaaccatcattctcagcaaactaactcaggaacagaaaaccaaacaccacatgttctcactctgggttcgtggtctcgctggcctcaggagtgaagctgcagaccttcgtgatgttacagctcttaaggcggtgcgaacccaaagagtaagcagcagcaaggtttactgcaaagagcggaagaacaaagcctccacaggatctcggccaggcctgctctgtgacttccgccacgctcccacgggtggcggcgaggagcctgagccggcgatggtgctacaggaggcgctggagccggccatgtgcctggatcgctacccgcatgtgcagcttgaggcctcggagctgctgctggaagatggcggctcagccctggccactgagctcaacaccgccaagcttgccctggcctatgcaggcatggagatgaatgacttggtggtgagctgcggcctgggcctcgcgccagggtccgtgcccacctggctgctggaccccatgcggctcgaggaggagcacaccgcccccggtgtcaccttggcactcctgcccatgctgaatcaggtggcccggctgctggctgcagggagggcggcctga

SEQ ID NO: 6986 - DNA, 197 bp, Homo sapiens
  SIMILAR (120)..(146): 771254mologous to Homo sapiens Human secreted protein, SEQ ID NO: 6834,accession number G02753,Smith-Waterman Score=41.
atgtggcacatatacaccgtggaatactatgcaaccataaaaaaggatgagttcatgtcctttgcaggcacatggatgaagctggaaaccatcattctcagcaaactaacacaggaacagaaaaccaaacaccgcattttctcactctcccatgctcccccaagcctagccatagaaactagaatcctcttcccaag

SEQ ID NO: 6987 - DNA, 291 bp, Homo sapiens
  SIMILAR (102)..(134): 811254mologous to Homo sapiens Human secreted protein, SEQ ID NO: 6833,accession number G02752,Smith-Waterman Score=48.
atggaatactatgcagccataaaaaatgatgagttcatgtcctttgtagggacatggatgaagctggaaaccatcattctcagcaaactgtcgcaaggacaaaaaaccaaacaccacatattctcactcatagaagctcaagcccaggtgtcgccgccacccccttaccctgcaccccaggagctcacccagcccctcctgcagcagccccgcgcccctgaggcccctgcccagcagccccaggcagcctcctcactgccacagtcagactttcagcttctcccggcccag

SEQ ID NO: 6988 - DNA, 342 bp, Homo sapiens
  SIMILAR (3)..(248): 601254mologous to Homo sapiens Human secreted protein, SEQ ID NO: 6720,accession number G02639,Smith-Waterman Score=254.
agacttggaaccaacccgaatgtccaacaatgatagactggattaagaaaatgtggcacatatacaccatggaatactatgcagccataaaaaatgatgagttcatgtcctttgtagggacatggatgaaattctccctctgtcacttggtttccaccacagaagccctaccagtcactctgaatctcttctcccatctagggctcccacaattgccccctcaccagtgggtgcagactcacagttggacatctgccccggaatgtttcaagaagcctccaatgcatcctgcccaaacaatgaattcgttgtcctgcccctacttggccctttatgccttcg

SEQ ID NO: 6989 - DNA, 439 bp, Homo sapiens
  SIMILAR (1)..(129): 881254mologous to Macaca fascicularis hypothetical protein,accession number AB047968,Smith-Waterman Score=193.
atggaatactatgcagccataaaaaaggatgagttcatgtgttttgcagggacatggatgaagctggaaaccatcattctcagcaaactaacacaagaacagaaaaccaaacactgcatgttctcactcaaaaggtcggccggcctgccccttaccagccgcaggaccagccgggagaaggctggaggcgggtcccactgcctgagggcctgggtgcagcctcactgccccacaagcagaaccaacgcctgcgagctccttaacaatgcgcggtgtgggccacctgcgagctccttaacaatgcgcggccccatgccggacctactgtgttccgacagaatccgcggcatagaatcagccctgcgcctccagagcccaatcctaatgcccccacctggaaggggcttctgttgtcctgggaccagcttcagaatggcag

SEQ ID NO: 6990 - DNA, 253 bp, Homo sapiens
  SIMILAR (3)..(140): 801254mologous to Homo sapiens Human secreted protein, SEQ ID NO: 6720,accession number G02639,Smith-Waterman Score=197.
tgtggcacatatacaccatggaatactatgcagccatgaaaaaggatgagttcatgtcctttgcagggacacggatgaagctggaaaccatcattctcagcaaactaattcaagatcagaaaaccaaacaccaagacttgccggcttcaggtgagattcagcacattacaagctgtggtggctacagggcaaaactacttctgtttgagaaaagcagaggaaaagtaaaagggtctttgtcttgcaccttagg

SEQ ID NO: 6991 - DNA, 210 bp, Homo sapiens
  SIMILAR (1)..(201): 641254mologous to Homo sapiens Human secreted protein, SEQ ID NO: 6720,accession number G02639,Smith-Waterman Score=201.
atgtggcacatatacaccacggaatactatgcagccataaaaaaggatgagttcatgtcctttgtagggacatggatgaagctggaaaccatcgttctcagcaaactattgcaaggacaaaatccaaacaccgcatgttctcactctcaggaattggaattaaatgagaagattaatgaagagattacccatattcaagaagaaaaacag

SEQ ID NO: 6992 - DNA, 165 bp, Homo sapiens
  SIMILAR (1)..(93): 831254mologous to Macaca fascicularis hypothetical protein,accession number AB047968,Smith-Waterman Score=132.
atgaaatactatgcagccataaaaaaggataagttcatgtccttttcagggaaatggatgaagctggaaacaatcattctcagcaaactaacgttttattctttctttctcttttcccttggtccaatgcacgtggcccaattcacaggtgttgaccctgggaag

SEQ ID NO: 6993 - DNA, 346 bp, Homo sapiens
  SIMILAR (102)..(146): 801254mologous to Homo sapiens PRO1546,accession number AF116638,Smith-Waterman Score=64.
atggaatactatgcagccataaaaaaggatgagttcatgtcctttgtggggacacggatgaaactggaaaccatcattctcagcaaactatcgcaaggacaaaaaaccaaacaccgcatgttctcactcatagggagcggctctccctccgccgcggtctacacagctgtgcttacagcctgcaccgctggctgggtgcccgccacgcacagaagggcagtaggaacacaaaagggtgtggtggccagggtcccagaacaagtgaaaggggacctgcgagcggggagttttctgaaaactgcacaagccttcttgggcagcgtggtgtcttttcaccaggacgcag

SEQ ID NO: 6994 - DNA, 389 bp, Homo sapiens
  SIMILAR (110)..(370): 881254mologous to Escherichia coli monomeric lac repressor,accession number X58469,Smith-Waterman Score=356.
atggaatactatgcagccataaaaaaggatgagttcatgtcctttgcagggacatggatgaagctggaaatcatcattctcagcaaactaacacaggaagagaaaaccaaacactgcacattctcaagtggattttgccgatttcggaaccaccatcaaacaggattttcgcctgctggggcaaaccagcgtggaccgcttgctgcaactctctcagggccaggcggtgaagggcaatcagctgttgcccgtctcactggtgaaaagaaaaaccaccctggcgcccaatacgcaaaccgcctctccccgcgcgttggccgattcattaatgcagctggcacgacaggtttcccgactggaaagcgggcagtgagcgcaacgcaattaat

SEQ ID NO: 6995 - DNA, 464 bp, Homo sapiens
  SIMILAR (1)..(195): 711254mologous to Homo sapiens PRO1546,accession number AF116638,Smith-Waterman Score=231.
atggaatactatgcagccataaaaaaggatgagttaatgtcctttgtagggacacggatgacgctggaaaccatcattctcagcaaactaacaagaacagaaaaccaaacactgcatattctcactgataagcgggagttgaacaatgagaacccatggaaacagggaggggaacatcacacaccagggcctgttgaagagttgggggctaggggagggatagcattaggagaaatgcctaatatagatgacgggttgatggggtatgtgacacagtggcaactcaggtctcaaggaggtaccagggctgctcgggccctggggaaacggcacagcagcagcatgactctgggggtggtggagcatactggcaagtctggcactggcactagggtttggcatgcagcacagcagcagctccagcctcatgggtggtgtagtatcacagtagctcagatcttggg

SEQ ID NO: 6996 - DNA, 1809 bp, Homo sapiens
  SIMILAR (1)..(531): 981254mologous to Escherichia coli K12 putative oxidoreductase,accession number AE000459,Smith-Waterman Score=931.
atggacgccatgaaatataacgatttacgcgacttcttgacgctgcttgaacagcagggtgagctaaaacgtatcacgctcccggtggatccgcatctggaaatcactgaaattgctgaccgcactttgcgtgccggtgggcctgcgctgttgttcgaaaaccctaaaggctactcaatgccggtgctgtgcaacctgttcggtacgccaaagcgcgtggcgatgggcatggggcaggaagatgtttcggcgctgcgtgaagttggtaaattattggcgtttctgaaagagccggagccgccaaaaggtttccgcgacctgtttgataaactgccgcagtttaagcaagtattgaacatgccgacaaagcggctgcgtggtgcgccctgccaacaaaaaatcgtctctggcgatgacgtcgatctcaatcgcattcccattatgacctgctggccggaagatgccgcgccgctgattacctgggggctgacagtgacgcgcggcccacatagagagcggcagaatgtgggccagctggaaaaagtggggttaaggattaagaaaatgtggcacatatacaccatggaatactatgcagccataaaaaaggatgagttcatgtcctatgcagggacatggatgaagctggaaaccatcattctgagcaaactatcacaaggacagaaaaccaaacaccgcatgctctcgctcatagggacacggatgaagctggaaaccatcattctcagcaaactattgcaaggacaaaaaaaccaaacaccgtatattctcactcatagaatcagttttgaggatgtgaggaattacatgccactggcagtaattcactcagatgagagtccaattcttcctctccatgaacagcaagatgccagtgagaatggatggattaaggatacagagagggatgcggatttggagatatatattgtgtctggaattggttcctttcggtgggttcttggtctcgctgacttcaagagtgaagccgcagacccttgcggaatgaagctgcagaccttcgcagtgagtgttacagctcttaaaggtggcgcatccagagttgttcattcctcctggtgggtttgtgttctcactgacttcaggagtgaagctgcatacctgagcgttacagctcttgaaggtggcgcatccagagttgctcattcctcccggttcgtggtctcactgacttcaggagtgaagctgcagaccttcaccgtgaatgctacagctcataaaggtagtgcggacccaaagagtgagcagcatcaagatttattgcaaagagcgaaaaaacacaccttccacagcatgaaaggggaaccaaggcgtgttgttgctgctggctgggggggtgcaatcaaggctgattccaataaccttattctcttatttcagactattgaaaaatattgtccttggttccctgacaaaggttctgtggacctgttagactgggatagagttggcaccactctctgccaactcatgagagatggtgttttacttcctatttctgtttggactgactgggctcttattcgtgttgctttacttccttttcagtctggtgatactcttcaactgccacaagttaacgcggatgttgaaccactccctttacctcggtgcattggcggcatcacgggaccagaaggcggtgacccccctggacccagctttcactatcttgtgggtgtctattatttcttgacctgccgatccacctgggaacaaagaaagagccccgttgcattgcgggctgctggccagatcccgcaataa

SEQ ID NO: 6997 - DNA, 1642 bp, Homo sapiens
  SIMILAR (6)..(449): 511254mologous to Homo sapiens putative p150,accession number U93572,Smith-Waterman Score=351.
aaatgtcaggaaacaacagatgctggagaggatgtggagaaataagaatgcttttacactgttggtgggagtgtaaattagttcaaccattgtagaagacagtctggtcattcctcaaggatctacaaccagaaataccatttgacccaacaatcccattactggatgtatacccaaacaattataaatcattccactataaagacacatgcacacacatatgtttattgtggcactgttcacaatagcaaagaattggaaccaacccaaatgcccatcaatggtagactggaaatgaagaacatgtggcacatatacaccatggaatactatggcagccataaaaaataatcgagttcatgtcctttgtaggggacatggatgaagctggaaaccatcattctgagcaaactatcgtcagcaaactatcgcaaggacagaaaaaccaaacactgcatattctcactcataagtgggagttgaataatgagaacacatggacacagggaggggaagatcacacaatcacacactggggcctgttgtgggaatagttactccaaagcctctgcttgttctcatccttggacaattctggcaatttaattgccaaggaagaagcatgtctgccttaacacaagctttggcccaatgtgtccatcagactgtagaagattgtcgttgggattcacactataacaggtgtccccaactgcagggccacggagcagtagtggtccctggcccattaggaaccaggccacacagcaggagttcatatccaatgcactctggacactttctttccagcattctagacacgctttcttcaacccacaggaacagaatgaacaaaaggaaggaagaacatcaaatacaaactactttcagagaatactataaacacctctacttaaataaactggaaaatctagcagaaattgataaattcctggacacaaacaccctcccaagactaaaccaggaagaagtagaatccctgaataaaccacaaacaagttctgaaattgaggcaataattaatagcctaccaaccaaaaaaagtccaggaccagagagattcacagccaaattcaaccagaggtacaacgaggaactggtaccattccttctgaaactatgccgaacattagaaaaagaaggactcctccctaactcattttatgaggccagcatcatcctgataccaaaacctggcagagacacaacaaaaaaagaaaatttcaggccaatatccctgatgaacatcaatgcgaaaatcctctataaaatactagcaaaccgaatccagcagcacatcaaaaagcttatccaccatgatcaagttggcttcatccctgggatgcaaggctggttcaacatacacaacatacacaaattaataaacgtaatccatcacataaacagaaccaacgacaaaaactacatgattatctcaagagatgcagaaaaggccttcgataaaattcaacaccccttcatgctaaaaactctcaatgaactaggtactgatgtaacatatctcaaaataataagagctatctatgacaaacccacagccagtatcatactgaatggacaaaagctggaagcattgcctttgaaaatcggcacaagataa

SEQ ID NO: 6998 - DNA, 383 bp, Homo sapiens
  SIMILAR (106)..(336): 251254mologous to Mus musculus immunoglobulin heavy chain variable region,accession number AF318430,Smith-Waterman Score=69.
tgctcacagtaagggcactgaaaggagcaagtttgtcaggtcactgcaatgagtaagccatgctttcaggtcttcctatctggtcagctgccttctggcactccagctggatttacgagccaaaattatggtttgaggtggtgtaattggctaagtctctggacaaaaattacccaaaataatctgaaactttactggccaaagcgggactcctttaaaattccaaaacttgccagtctacacacacaactggaaaaaagaaaataccaaacctcccagagacaatgggaagcccttttcagctgggactttgaaagtcctcaatggaatcaaggccgtcatcatctctcttctggaaaataactacaaagtgagtgagcaca

SEQ ID NO: 6999 - DNA, 762 bp, Homo sapiens
  SIMILAR (604)..(756): 881254mologous to Mus musculus VHSV-induced-like protein,accession number AF236064,Smith-Waterman Score=234.
atgaggcagcaccaggatttgcaaagcataaagccacatgcctgccatgtgcgtgactgtccacgggccagctgccagcctgagaatgacactcctcctgactctgcgtttcccatccccactccttgtcctggattccgcatcgcccaccctcttgggctactcccttattttggagaatcctttacaagcttcctgaaaaaaactgggactcctttaaaattccaaaacttgccagtctacacacacaactggaaaaaagaaaataccaaacctcccagagacaatgggaagcctttttcagttggtactttgaaagtcctcaatggaatcaaggcagtcatcatctctcttcgggaaaataactacaaagttgtaaatgcagctctctttctcttggtccttgaaaaggcctgtttcagggcagcagatatgaggcccaagaagctgctttttaaacagcctcctgatttgcttctgacgagcagtcaaagagacattctatgtgatgtcagagacaactgtgttagatgccaagaaaaccaagagaaagggaagcctggtgtgggaataaagtgtaaacagacccctccttgcaacatggtgttccagtgcctcttaattgagggtgagaattgtggagaagatgctctaagagaagcagaaagatttgttattggtgatgaagaatttgaaagattcttggagcgccacaaagaagtgtcctgcttggtgcctgaatctaaccagaaggttgtataa

SEQ ID NO: 7000 - DNA, 1686 bp, Homo sapiens
  SIMILAR (940)..(1674): 891254mologous to Homo sapiens putative p150,accession number U93565,Smith-Waterman Score=1073.
atgccattgggactgagtcctaatggatgcagaagaattccccagaatgaagatccaactgtgcccacaatgatcttagaaagaaacaaattcaactcagctggttcaaatgggaagcctttaataaaggtgctattttcagcagtatgggtggggctaacaagaccaacaagggtaactgggtcccagagacaagcaacagactacagcattactgcctttaggactgggggcaagggaaggaaatggcatcacaggagtccagtgagagctggagccaggttaagggactgctcctgggggtatgacaccactgtcaaagcaggtgtggagggtaaacctctccttccatctgcccttcagtctcaggtacctcctgttgttcaaacccaagcagaatctagctgtcaagggagcctcaaaagtgacattcacagggtcaacctctggggtacagagaaggtctggggatgcatccgtggagaggggaaagtggagaggagggattcctggcacttctctgatacccggagttactgggaacttatggaaagagaacagagagtcatgtctcccccaggaagctgccagtggagacacaggcaggaaaatcaggcccagagtctgccagcaacgtgttctgtgacctcgctggcagactatgatctggaattcagatctcctgatcttcagttcacatggggcagtccacgttctctgcaccctacaagggcaagggcagagcatttctggtcagtttctccatggtgcctcccacccctttgtaaagtggatggacatgatggaattcagttgtctcaccctgatagcctgggtgttgatattcactttacccgcactcagacacaggcgaccttgaagcagttctcggtgttcccaccccctcccaggatcctgatcaccacactcatttcaacacttcccaagtccatgtctctagcccaagtgggcctgcatttccagctgcctgttagacacaacaaaaaagagaattttagaccaatatccctgatgaacatcgatgcaaaaatcctcaataaaatactggcaaaccgaatccagcagcacatcaaaaagcttatccaccatgatcaagtgggcttcatccctgggatgcaaggctcattcaacatacgcaaatcaataaatgtaatccagtatataaacagaaccaacgaaaaaaaccatatgattatctcaatagatgcagaaaaggcctttgacaaaattcaacaatgcttcatgctaaaaacgctcaataaattaggtattgatgggatgtacctcaaaataataagagctatctatgacaaacccacagccagtatcatactgaatgggcaaaaactggaagcattccctttgaaaactggcacaagacagggatgccctctctcaccactcctattcaacatagtgttggaagttctggccagggcaatcaggcaggagaaagaaataaagggtattcagttgagaaaagaggaagtcaaattgtccctctttgcagatgacatgattgtgtatctagaaaaccccatcgtctcagcccaaaatctccttaagctgataggcaacttcagcaaagtctcaggatacaaaatcaatgtgcaaaaatcacaagcattcttatacaccaataacagacaaacagccaaatcatga

SEQ ID NO: 7001 - DNA, 975 bp, Homo sapiens
  SIMILAR (391)..(786): 751254mologous to Mus musculus Pro-Pol-dUTPase polyprotein,accession number Y12713,Smith-Waterman Score=564.
atggacatagagacagaaacaatagacagtgggaactaccggaagtggcagggaggaagaggaacaagggctgaacaactaccagttgggtattattctcactacctaggtgctggcatcaatcataccccaaacctcagtgtcacacaatatacccatgacaaaaacctgcacacttttccaagtagaaaatcaaagaagacatcaaaatgtgacatcatcattaagcagaaacggcataaatctccaaaggagaaggctctgcaacaggtccaggctgctgtgcaagctgttctgccacttgggccatatgatccagcagatccaatggtgcttgaggtgccagtagcagatagggatgctgtttggagcctttgccaggcccccatagccacccctgtcattgcccaatgggcccatgaacaaagtggccatggtggcagggatggaggttacacatgggctcagcaacatggacttccatcctccaaggctaaactggctacggccactgctgagtgcccaatttgccagcagcagagagcaacactgagccctcgatgtggcaccattcctcggggtgatcagccagctacctggtggcagaaagggaagaggtttgtcctcactggaatagacacttactgtggatatgggtctgcctattctgcacgcaatgcttctgccaagactaccatccacggactcacggaatgccttttccactgtcttggtattccacacagcattgcctctgaccgaggcactcactttatggataaagaagctccaagtgcttcagttttgggactcgcactggctctccttgctcctcagcttgcagacagcctattggaggaccctgtgattgttaaggctgacccattgatccttggtcctgtgaactgtcccctggcccaagtaaccaagaccactctggctcaggttcaccttggaaatgatgcacgcaaatag

SEQ ID NO: 7002 - DNA, 432 bp, Homo sapiens
  SIMILAR (166)..(429): 821254mologous to Mus musculus Pro-Pol-dUTPase polyprotein,accession number Y12713,Smith-Waterman Score=382.
tggggtccagaacaggaaaaggctctgcaactagtccaggctgctgtgcaagctgctctgccacttgggtcatatgacccagcagatccaatggtgcttgaggtgtcagtggcagatagggatgctgtttgcagcctttggcaggctcccataggtgaatcacaccataaagtgggtcgtgcacagcagcattccatcatcaaatggaagtggtatatatgtgatcgggctcgagcaagtcctgaaggcacaagtaagttacatgaggaagtggcccaaatgcccatggtctccactcctgccaccctgccttctctccccaagcctgcactgatggccttatggagagttccctatgatcagttgacagaggaagagaagactagggactggttcacagatggttctgcaggatatgcaggcaccacctga

SEQ ID NO: 7003 - DNA, 753 bp, Homo sapiens
  SIMILAR (3)..(38): 751254mologous to Mus musculus Pro-Pol-dUTPase polyprotein,accession number Y12713,Smith-Waterman Score=45.
atgatcaaacgttttggggactactggaaactggctcagctgatgttgattccaggggacccaaaatgtcactgtggtcctccagttaaagtaggggcttatggaggtcaggaaattaaaggagttttagctcaggtccaaattacagtgggtccagtgggtacgcggactcatcctgtggtcatttccccagtgccagaatgcataattggaatagacatacttagcagctggcagaaccctcacactggctccctgactggtagggtgagggtgattatggtggaaaaggccaaatggaagccattagagctgcctctacctagaaaaatagtaaatcaaaaacaatattgcatccctggagggattgcagagattagtgccaccatcaaggacctgaaagacacaggggtgatgattcccaccacatccccattcaactctcccatttggcctgtgcagaagacagatggatcttggagaattacagtggattatcaagtggtgactccaattgcagctgctgtaccagatgtggtttcattgcttgagcaaattaacacatctcctggtacctggcaacacattactcatttggatgtgttactctggcggatttatcaagtgacccaaaaggctgccagttttgagtggggtccagaacaggagaaggctctgcaacaggtccaggctgctgtgcaagctgctctgccacttgggccatatgacccagcagatccaatggtgcttgag

SEQ ID NO: 7004 - DNA, 430 bp, Homo sapiens
  SIMILAR (215)..(430): 841254mologous to Mus musculus Pro-Pol-dUTPase polyprotein,accession number Y12713,Smith-Waterman Score=346.
ttttccaagtagaaaatcaaagaagacatcaaaatgtgacatcatcattaagcagaaacggcataaatctccaaaggagaaggctctgcaacaggtccaggctgctgtgcaagctgttctgccacttgggccatatgatccagcagatccaatggtgcttgaggtgccagtagcagatagggatgctgtttggagcctttgccaggcccccatagccacccctgtcattgcccaatgggcccatgaacaaagtggccatggtggcagggatggaggttacacatgggctcagcaacatggacttccatcctccaaggctaaactggctacggccactgctgagtgcccaatttgccagcagcagagagcaacactgagccctcgatgtggcaccattcctcggggtgatcagccagctacctggtggcag

SEQ ID NO: 7005 - DNA, 1518 bp, Homo sapiens; identical to SEQ ID NO: 4264
  SIMILAR (223)..(939): 761254mologous to Mus musculus Pro-Pol-dUTPase polyprotein,accession number Y12713,Smith-Waterman Score=953.

SEQ ID NO: 7006 - DNA, 1523 bp, Homo sapiens
  SIMILAR (1033)..(1509): 701254mologous to Mus musculus Pro-Pol-dUTPase polyprotein,accession number Y12713,Smith-Waterman Score=540.
atgggagaagagcgtagatggaggcccagcagcaacgggaagcatggtgcatttgcggaactggacaaaggctggttggtgtggctggaaggaaaaggtgtaattggggcaagaagaagctggagagcacacagtgccctgataaaaatatgtgttcaacagataaaggactcccttcctggtaaaatgagtaagggactcttacaacagcaacaaaaacctaagcacctgctccatgatctgtataaggcaatgagcaccagatggggagtgcagaaagccaggctcaactgcacagctttgccaccaactggctgtgtgactttggacccatcgttcctcactgagcctcagtttccccggcagctgtcagaagacctgcttctcacgcgtgaggccctggagaaggaggtgcagctgcggcgacagctccagcaggagaaggaggagctgttgtaccgggtccttggggccaatgcctcgcctgccttccctctggcccctgtcactcccactgaggtggagaaggaaagggagctagagcttcgagacagactggatgagcagcaaagggtcctggaaggaaagaatgaagaggccctgcaagaccctagattggtagatccactgacatcttgcactgtgcactttgaaaagccacagatgctcaacgccagactatggaagcatgcagggagggaggctgtagcctgcaaagtcagagggtcagagctgcccaagacaatgggaacctaccccttgcatcagcatgacctggatgtgagacatggagtcaaaggagatcattttggagctttaagatttgattgccctgctggattttggacttgcatggggcctttagccccttcattttggccaatttctcccatttggaatggaccaccacttgatatcagcggataccctgccacttctacacagaagtccactatgtgtctgaggatcattgatactcgactgcatccagagagtcgactcaagcagcagtcaaactttgcactgaacgctagggagaaggctctgcaacaggtccaggctgctgtgcaagctgctctgccacttgggccctatgacccagcagatccaatggtacttgaggtgtcactggcagatagggatgctgtttggagcctttggcaggcccccataggtgaatcacagcaaagacctctgggattttggggcaaggccctgccatcttccgcagataacaactctcctttggagagacagctcttggcccgttactgggctttggtggaaactgaatatttgactatgggtcatcaagtcaccatgtgacctaactgcccatcatgaactgggtgctttctgacccatctagccataaagtggtttatgcatggcagcattccatcatcaaatggaagtgatcgagcttgagcaggtcttgcaggcacaagtaagttacatgaggaagtggctcaaatgcccatagtctccactcctgccaccctgccctcgtgccgaattcttgc

SEQ ID NO: 7007 - DNA, 2193 bp, Homo sapiens
  SIMILAR (64)..(657): 781254mologous to Mus musculus Pro-Pol-dUTPase polyprotein,accession number Y12713,Smith-Waterman Score=825.
atgagctacattcgaaaagaactgcttgagttttctaatttatataagcagaaatctggatacctctggccttttaccagggtaactgttcattggggaaaaggaaatgatcagacatttcgaggactattggacattggctctgagctgatgatggttccaggggacccaaaatgtcattgtggtcctccagttaaagcaggagcctatggaagtcacataattaatagcgttttagctcaggtccaacttacagtgggtccagtgggtccgcggacttgtcttgtggtcatttccccagtgtcagagggcataatcggcatagacatacttagcagctggcagaacccccatattggctccctgactggtagggtgagggctattatggtgggaaaggccaaatggaagccattagagctgcctgtacctagaaaaatagtaaatcaaaagcaatattgcatctctagaggaattgtggagattcgtgctaccaccaaggacttgaaagatgcagggttggtgattcccaccaaatacccattcaactctcccatttggcctctgcagaagacaggtgggtcttggagaatgacaatgaattatcgtgagcttaaccaagtggtgactccaattgcagctgctgtaccagatgtatatcaaccctccggctttgcggctttgtgtcatcatcttattcacagagatcttgatcacttttcacttccacaagatatgacgctggtcaactgcattgatgacattatgctgattggatccagtgagcaagaagtagcaaactcactggacttactggagagacatctgcatgacagaggatgggaaataaatctgactcaaattcaggaactttctaccttagtaaaatttctaggggtccagtggtgtggggcttgtccagatattccttctaaggtgaaggataagttactgcatttggcccctcctacagccaagaaagagacacaacacctagtgggcctatttggattttggaggcaacacattcctcatttgggtgtgtttctttggcccatttatcaagtgacccaaaaggctgctagttttgagtggggtccagaacaggagaaggccctacaacaggtccaggatgctgtgcaagctgctctgccacttgggccatatgacccagcatatgggtccacccatgttatcgcccaatgggcccataagcaaagtggccatggtggcagggatggatgtgacatacgggctcagcaacatggacttccactcaccaaggctgacctggctgcagctactgctgagtgtccaatttgccaacagcagagaccaacagtgagccctcgatatggcaccatttctcagggtgatcagccagctacctggtggcagcttgattatactgaacctcttccaccatggaaagggcagaggtttgtcctcactagaatagacacttactccagatatgggtttgcctatcctgcaggcaatgcttctgccaaaaccatcaaccgtggattcatagaatgccttatccacagccctgccaggattcacgggtacaggaatcaaagggtggaagtggaagtggcaccactcaccatcacccttagagattcactagcaaaatttttgcttcctgttcctgaaacgttatgttctcctggcctggagatcttagttccagagggaggaatactgccaccaggagaaacaacgattccattaaactataagttaagattgccatctggacactttgggctcctcctacctttaagtcaacaggctaaaaaggaagttacaatgttgattggggtgattcacccggactatcaagatgaaatcattctactactccacaacggaggtgagatagataccagtcagttgggagactcaaggacctcggacaaagagtcagaccaagacacactggggcagaggttgagtcatcaagactcctggtggctccaagcccatggctttgctgggtactgccgataccactctcacgggctggaagaaagttcctgcagctcttccaggctggtgctgcatgctggtggctctacaggactggagtctcagagccatcctatttccccaggtccactaggctttgcccttgtggcagctctctgcagtagcctggaccccataattccactgagcattgcctga

SEQ ID NO: 7008 - DNA, 430 bp, Homo sapiens
  SIMILAR (296)..(415): 351254mologous to Homo sapiens Partial amino acid sequence of TR-interacting protein S203a,accession number Y40574,Smith- Waterman Score=70.
tcgatacgacttttttttttcatgttctccagatgtcctttatttatattcgtattcataagttctcatactacttctggtctttttagtagctcttttagggctgtagccacagaacggtcattctagtgattctgagcagggtggagaggagtgcagcatccctgggcgggtgggtcagtgaagacacgcccagctcacctgatattctgtgactggttgcagaacacaagtccctctcgaaattgtttaggtttgtggggagatatctgtaagacagagtgagaaagccttatggaaaaggccaagaagtgctcagcaggcctagcagaacgctcaggaatcccacccacaccatccctcatttctgggtctttcttcctggacatctcaggcctcagacctgcatccaggagctggagcacgcagt

SEQ ID NO: 7009 - DNA, 666 bp, Homo sapiens
  SIMILAR (1)..(102): 441254mologous to Mus musculus SMT3 isopeptidase 1,accession number AF194031,Smith-Waterman Score=76.
gtccactggtctctcattactgtgacactctctaatcgaattatttcattttatgattcccaaggcattcattttaagttttgtgtagagaatataaggaaagtatttgctgactgaagccagagaaaaaaatagacctgaatttcttcagggttggcagactgctgttacgaagtgtattccacaacagaaaaacgacagtgactgtggagtctttgtgctccagtactgcaagtgccttgccttagagcagcctttccagttttcacaagaagacatgccccgagtgcgggaagaggatttacaaggagctatgtgagtgccggctcatggactgaaactcagcagggactctggggaagtctgaccaagttgggagcagatggtttgttacttggaatctccaaacacttagttgaatttttacagatatttcagatcagtgggtgttggggccactattgttacctccaaattttattttttgcccttaattccatttctcccagctaccatgtactattgtttaatgttcagtttggtttcatttttaattttatggttctgtgcgtcccccatatttaatatttattattcaaacgcatgcatatagacagagcatgcagtgaagagtattaaaaaaaaaagcttagtaaaaaaaaaaaa

SEQ ID NO: 7010 - DNA, 862 bp, Homo sapiens
  SIMILAR (187)..(444): 481254mologous to Homo sapiens melanotransferrin,accession number K03200,Smith-Waterman Score=162.
atgtactgcaagtgcctcgccttagagcagcctttccagttttcacaagaagacatgccccgagtgcggaagaggatttacaaggagctatactttcagctgttttatctatctatgttagatgttgaaagggaagcaaaatccaggatcaaatctatctggctgcttttctggttaaaaaacgacgctgagcaggtcgacgctgtgaccctgagtggcgaggacatttacacggcggggaagacgtacggcctggttcccgcagccggggagcactatgcccatgcgctctttccagaaaggcagcacacgcatgtctctgccgtggccccagatcctccccgcgccgccgttttgagcgttcacactcattacccagcctcctggccaaaatcctcccgggacaccccacctggactgctgcgaacgggcctccacccgcctccccggacccgcagcgccccccgctccctcagggttctggggtgaaggggtctgaatagcaccaggggaggcggcagggcggtcctgtcctacctgcgcccgagcactgctgagacgacataccttccaccgccgcctcgtagttctgccccagccaggcgcgatatctccccacaaacctaaactatttggagagggacttgtgttctgcaaccattgccaaaatatcatgtgagctgggcgtggcttaactgacccacccgcccagggatgctgctctcctctccaccctgctaataattaatagaatgatcgttttgtggctacaacactaaaagagctactaaaaagaccagaagtagtatgagaacttatgaatacgaatataaataaaggacatctggagaacaaaaaaaaa

SEQ ID NO: 7011 - DNA, 1215 bp, Homo sapiens
  SIMILAR (1)..(405): 911254mologous to Homo sapiens putative p150,accession number U93568,Smith-Waterman Score=643.
atgagtgaattcccattcacaattgcttcaaagagaataaaatacctagaaatccaacttacaagggatgtgaaggacctcttcaaggagaactacaaaccactgctcaaggaaataaaagaggatacaagcaaatggaagaacattccatgctcatgggttggaagaatcaatatcatgaaaatggccatactgcccaaggcaatttatagattcaatgccatccccatcaagctaccaaagactttcttcacagaattggaaaaaactgctttaaggttcatatggaaccaaagaagagcccgcattgccaagtcaatcctaagccaaaagaacaaagctggaggcatcacgctacctgacttcaaactatattgcaaggctacagtaaccaaaacagcatgccaggaggtggcggtagtaaccaatggcaaaatcctgagacactgcctctatcagcttctcattgtcctgcggacgcttcctggatctaatctgatgcttatgaaagtgatttccttctttcgaaaacaccaggcccaaacaaaaactaacttcatcctgcagataaaaactgtcagtggccagtcacagacctctgaaatgtccttcctgactgttagctccacagcattcctacagctcccgccgcagttccgccctccggagggttccaacagcagcccagtgcgcctccccagccccaggctccctccactccagcactggatgagtacagtgtcctgggctaaagttgatctatcccagaccctcaccttcagcagcatcagtggccctcacagcagctctccctcctctgtattcctacttagtggcagctgtggcctgcagcacccagaaacagtgaggctgtcctccagctgcactgagtggttctgcctgtcgatggcctgccagcctgccgtgggccactatcagtctgctcttacaccgaccagcagcatcagcaccccctgggagtttgtagaattcctggacactaacccagatctgctgaaccagaatccacagtttagcaggactgcccaggctctcctacttcgctatctctccatcgctggcattcatacggcctcacccatctccccgagggacagctgctcccagaaccaccctgcagctgagcagcaagatgagcagaattttccctgtgagcaggagacaaggctaaagctgcatgtgtgtcaatcgtga

SEQ ID NO: 7012 - DNA, 453 bp, Homo sapiens
  SIMILAR (61)..(405): 651254mologous to Homo sapiens cAMP-specific phoshodiesterase HPDE4D3 variant,accession number U50159,Smith-Waterman Score=349.
atgcaccccagtggagttgaaattgagttgagatcaaatgcagcaggtgttgctcagagaatttgttttgatgtggacaatggcacatctgcgggacggagtcccttggatcccatgaccagcccaggatccgggctaattctccaagcaaattttgtccacagtcaacgacgggagtccttcctgtatcgatccgacagcgattatgacctctctccaaagtctatgtcccggaactcctccattgccagtgatatcgctggctcaggactcagcaagtctttctctttgggagagacaaggctcgccaggactagtgaagatgactctggttcacttcctggtaaccagggaagccacttcacccagcagcaacgatcttgtggcctcatcaccatcctcaagcttgcagactgtgctaggccctccctgccaggctatgaaagaagatag

SEQ ID NO: 7013 - DNA, 3341 bp, Homo sapiens
  SIMILAR (1141)..(2517): 971254mologous to Homo sapiens putative p150,accession number U93563,Smith-Waterman Score=2349.
atggggaaaaaacagaacagaaaaactggaaactctaaaaatcagagcgcctctcctcctccaaaggaacgcagctcctcaccagcaacggaacaaagctggatggagaatgactttgacgagctgagagaagaaggcttcagactatcaaattactctgagctaccggaggacattcaaaccaaaggcaaagaagttgaaaactttgaaaaaaatttagaagaatgtataactagaataaccaataagagaaactttaaaccaacaaagatcaaaagagacaaagaaggccattacataatggtaaagggatcaattcaacaagaagagctaactatcctaaatatatatgcacctacaggagcacccagattcataaagcaagtcctgagtgaccgacaaagagacttagacttccacacattaataatgggagactttaacaccccactgtcaacattagacagatctacaagacagaaagtcaacaaggatacccaggaattgaactcagctctgcaccaagcggacctaatagacatctacagaactctccactccaaatcaacagaatatagatttttttcagcaccacaccacacctattccaaaattgaccacttacttggaagtaaagctttcctcagcaaatgcaaaagaacagaaattataacaaactatctctcagaccacagtgcaatcaaactagaactcaggattaagaatctcactcaaaaccgctcaactacatggaaactgaacaacctgctcctgaatgactactgggtacataacgaaatgaaggcagaaatgaagatgttctttgaaaccaacgagaacaaagacacaacataccagaatctctgggacgcattcaaagcagtgtgtagagggaaatttatagcactaaatgcccacaagagaaagcaggaaagatccaaaattgacaccctaacatcacaattaaaagaactagaaaagcaagagcaaacacattcaaaagctagcagaagactaaaccaggaagaagttgaatctctgaatagaccaataacaggatctgaaattgtggcaataatcaatagcttaccaacaaaaagagtccaggaccagatggattcacagccaaattctaccagagtgttggaagttctggccagggcaattaggcaggagaaggaaatcaggggtattcaattaggaaaagaggaagtcaaattgtccctgtttgcagatgacatgattgtatatctagaaaaccccattgtctcagcccaaaatctccttaagctgataagcaacttcagcaaagtctcaggatacaaaatcaatgtacaaaaatcacaagcattcttatacaccaacaacagacaaacagagagccaaatcatgagtgaactcccattcacaattgcttcaaagagaataaaatacctaggaatccaacttacaagggatgtgaaggacctcttcaaggagaactacaaaccactgctcaaggaaataaaagaggatacaaacaaatggaagaacattccatgctcatgggtaggaagaatcaatatcgtgaaaatggccatactgcccaaggtaatttacagattcaatgccatccccatcaagctaccaatgactttcttcacagaattggaaaaaactactttaaagttcatatggaaccaaaaaagagcccgcatcgccaagtcaatcctaagccaaaagaacaaagctggaggcatcacgctacctgacttcaaactatactacaaggctacagtaaccaaaacagcatggtactggtaccaaaacagagaaatagatcaatggaacagaacagagccctcagaaataacgccgcatatctacaactatctgatctttgacaaacctgagaaaaacaagcaatggggaaaggattccctatttaataaatggtgctgggaaaactggctagccatatgtagaaagctgaaactggatcccttccttacaccttatacaaaaatcaattcaagatggattaaagacttaaacgttagacctaaaaccataaaaaccctagaagaaaacctaggcattaccattcaggacataggcatgggcaaggacttcatgtctaaaacaccaaaagcaatggcaacaaaatccaaaattgataaatgggatctaattaaactaaagagcttctgcacagcaaaaaaaactaacatcagagtgaacagacaacctacaaaatgggagaaaattttcgcaacctacttatctgacaaagggctaatatccagaatctacaatgaactcaaacaaatttacaagaaaaaaacaaacaaccccatcaaaaagtgggcgaaggacatgaacagacacttctcaaaagaagacatttatgcagccaaaaaacacatgaaaaaatgctcaccatcactggccatcagagaaatgcaaatcaaaaccacaatgagataccatctcacaccagttagaatggtgatcattcaaaagtcaggaaacaacaggtccctcatgtatccaaggagattacgcattcagccacgacaatgtactgacaataatgaaaaaagcacatggaacaaccacaggcagaaagattacaaactctgcaataaatataaaggtattggttttataaggtggcctgcaggctacggaccagcacagagctctggcaaatgtggaatgccaggagatgtacaaaaaaatcaagtttcttggtataaagttcaaaatgctttgagtagagttgttcaggaggtcctcagtggcactgccactcactggttgggacgtttttgttctctgtcctcctgtgtggaagatgacaaggacggctttgtgcaacttctgttgtatgcgctgcttttcaaccccttggatgagatactcatacaaggaacgaaaaacctaaaaaagttctcagatgaccccaaaaggctcatagagggcttccccaaattggctcttacatttagattaatttggaaggacataaatgtactcctgggacaagcccttttacaagaggaaagacagaccatctgcggagcagcaatccactgtcgaaatgacttacacctggaaaatgccaactaccctggaggggctacagctgttccccagctggaccccaatcaggactacaatgccaaagcgggaatatgggccaggaaccataggctcttgtgtctaatagagacaacgacgcaacaaccgaccaacgcacacagtccacaaacacaacgacaacaacacgacacagacaaaccacaaccgaacccaccagccaaaacaaccggtgttcctgtatcttttctggcttttct

SEQ ID NO: 7014 - DNA, 1785 bp, Homo sapiens
  SIMILAR (277)..(579): 581254mologous to Homo sapiens putative p150,accession number U93565,Smith-Waterman Score=307.
atgcccatcaatgacagactggataaagaaaatgtagcacgtatataccatggaatactatgcagccataaaaagggtgagttcatgtccttagcagggacatgggtgaaactggaaaccatcattctcagcaaactaacacaagaacagaaaaccaacaccgcatgttctgagttggacaatgagaacatatggacacaggcaggggaacatcacacactggggcctgttgtggcctgttttgttgcctgccatatggtttatcctggagaatgctggttctttgaaaagataaataaaattgatagcccactagcaagattaaccaagaaaagaagagagaaaatccatataacctcactgagaaacaaaacaggagatattaaaacggacaccactgcaatacaaaagatcattcaaggctgcaatgaacacctttatgcacataaactagaaaaactagaagatatggataaattcttggaaaaatacaaccctcctagcttaaatcaggaagaattagataccctgaacagaccaataacaagcagagagattgaaatgctagtggatagcatattagacagcaccgagagtcttgcagaatattctgttgcagaaatagaatgttgcagaaatattctattggacagtgctgttctagagtctaaaacatttacttctatgtgccttcagaatagtctaaatccatttgagcatacagaaagcggcatgcagattcctcagttcatcctggtgggcgacagcagaggtggaggacttcagagtctgtaccgagtagacctaagtcactgtggcccttttggacaggaatccacaggagggatgacaaggggactcagatgcaggttttcctctgttcctctgaccatctacattcttaacatatactgggacctccagtgctatgtccagagaaaggaaggcccagttcccttacagctgctggctagggataagatcctcacctacctaaagggatatggagaatgggaatttgagagaaaggaaaaccatttcattgctggaatgctccaaacaaaggtcactgtaagatcacagtgtcaaaggaaaaacctaaaaaagttctcagatgaccccaaaaggctcatagagggcttccccaaattggctcttacatttagattaatttggaaggacataaatgtactcctgggacaagcccttttacaagaggaaagacagaccatctgcggagcagcaatccactgtcgaaatgacttacacctggaaaatgccaactaccctggaggggctacagctgttccccagctggaccccaatcaggactacaatgccaaagcgggaatatgggccaggaaccataggctcttgtgtctaatagaggaaagccagcagtcctacctcagggttttagagatgccccacacttatttggacaagacccagcaaagaaatctaaccaagctatatcttgagtggggacaacttctgctgtatgtagatggcttactcatctgctccccctccataaagcttgcacaacaatatgcagtacaaaccttaaacttcctagcaaaatcgctggctcaggactcagcaagtctttctctttgggagagacaaggctcgccaggactagtgaagatgactctggttcacttcctggtaaccagggaaggtgacagagcatgtggcacctccttggacatcatgaaatttaaaaccaatgtgacactgactcccacagtgacctacagtggctcatcctggctgttctag

SEQ ID NO: 7015 - DNA, 1239 bp, Homo sapiens
  SIMILAR (250)..(858): 681254mologous to Homo sapiens triple LIM domain protein,accession number AJ011654,Smith-Waterman Score=816.
  misc_feature (1)...(1239): n = a,t,c or g
atggtgacttggaacttcatccaggagagaaatggcagtggcatggaccagtgtgatgatggtggaggaaagatattagatcctgtgtatattttgacagtagagctaacgggatttgccaagggctggaaaatgttcagtgtcaaggaccagagtgtaaatgtattaggctttgcaggctatcctctaataacccagacagctagaaagggtgcagggaagattccaacttgggccagccttagacagtatcagaaagggcttggttcaaagtaccagttaagaagggctctcaggcctgactgtgctctaggcaatggacagggggttcgatattgcaactccctggatgaggaagagaagagggagctgaagcttttcagcagccagaggaaacgcgaaaacttgggccgcgggaatgtcaggcctttcccagtcaccatgacaggagctatttgtgaacagtgcggaggccagatcaatggtggagacatcgctgtgtttgcgtcacgcgctggccacggcgtttgctggcacccgccgtgcttcgtatgcactgtctgcaatgagctcctggtggatctgatctacttttaccaagatgggaagatatactgtggcaggcaccatgctgagtgcctgaagccgcgctgtgctgcctgcgatgagatcatctttgcagatgaatgcacagaagctgaggggcgacactggcacatgaaacacttttgctgcttcgagtgtgagacagtgctgggcggccagcgctacatcatgaaggagggaagaccctactgttgccactgcttcgagtccttgtatgcagaatattgtgacacctgtgcccaacatataggacatgctggcagcttcatcaaggaatgccgagaagactattacccggggaggctgagatctcaggagagctacagtgatatgtctagtcagagtttcagtgagacccgaggcagcatccaagtccccaaatatgaggaggaagaggaagaggaagggggcttgtccactcagcagtgtcggacccgtcatcccatcagttccctgaaatacacagaggacatgacgcccacagagcagacccctcggggctccatggaatccctggccctgtctaatgcaacangacatgctcagcagggccatatgtcggtccacaagggattgaaaatgaaaacaaactggtccttcaccactgatagcttgagaagagtagcgctctaa

SEQ ID NO: 7016 - DNA, 2391 bp, Homo sapiens
  SIMILAR (1)..(900): 681254mologous to Homo sapiens triple LIM domain protein,accession number AJ011654,Smith-Waterman Score=1229.
gtacaccagtactatagctgtctcccagaagagaaagtcccttatgtcaacagtcctggagagaaactgcgaatcaagcagctactacaccagctgccgccacatgacaatgaggttcgatattgcaactccctggatgaggaagagaagagggagctgaagcttttcagcagccagaggaaacgcgaaaacttgggccgcgggaatgtcaggcctttcccagtcaccatgacaggagctatttgtgaacagtgcggaggccagatcaatggtggagacatcgctgtgtttgcgtcacgcgctggccacggcgtttgctggcacccgccgtgcttcgtatgcactgtctgcaatgagctcctggtggatctgatctacttttaccaagatgggaagatatactgtggcaggcaccatgctgagtgcctgaagccgcgctgtgctgcctgcgatgagatcatctttgcagatgaatgcacagaagctgaggggcgacactggcacatgaaacacttttgctgcttcgagtgtgagacagtgctgggcggccagcgctacatcatgaaggagggaagaccctactgttgccactgcttcgagtccttgtatgcagaatattgtgacacctgtgcccaacatataggtatcgaccaaggtcaaatgacctatgacggccaacactggcatgccactgagacctgtttctgctgtgctcactgcaagaaatccctcctggggcggccattcctcccgaagcagggccagatattctgctcacgggcctgcagtgctggggaagaccccaatggttctgactcctctgattccgccttccagaacgccagggccaaggagtcccggcgcagtgccaaaattggcaagaacaagggcaagacggaggagcccatgctgaaccagcacagccagctgcaagtgagttctaaccggctgtcagccgacgtagaccccctgtcactgcagatggacatgctcagcctgtccagccagacacccagcctcaaccgggaccccatctggaggagccgggaagagccctaccattatgggaacaagatggagcagaaccagacccagagccctctgcagctcctcagccagtgcaacatcagaacttcctacagtccaggagggcaaggggctggggcccagcccgaaatgtggggcaagcacttcagcaaccccaaaaggagctcgtcactggccatgacaggacatgctggcagcttcatcaaggaatgccgagaagactattacccggggaggctgagatctcaggagagctacagtgatatgtctagtcagagtttcagtgagacccgaggcagcatccaagtccccaaatatgaggaggaagaggaagaggaagggggcttgtccactcagcagtgtcggacccgtcatcccatcagttccctgaaatacacagaggacatgacgcccacagagcagacccctcggggctccatggaatccctggccctgtctaatgcaacaggcctctctgctgatggtggtgccaagcgccaggagcacctatcccgattttccatgcctgacctcagcaaagactctggaatgaatgtgtctgagaagctgagcaacatgggcactcttaactcgtccatgcagttccggagcgcagagtcagttcgcagcctgctctctgcccagcagtaccaggagatggagggaaacctccaccagctcagcaaccccattggctacagagacctgcagtcccacggaaggatgcatcagagctttgattttgatggagggatggcgggcagcaagctgccagggcaggagggcgtgaggatccagcccatgagtgaacgcacccggagaagagctacttcacgcgacgacaaccgccgtttccgacctcacaggtccaggcgttcccgacgctctcgctccgacaacgccctccacctggccagcgaacgcgaggccatctcccggttaaaagataggccccctctgagagccagggaggactatgaccaatttatgcgccagcggagcttccaggagagcatggggcatgggtcccggagggacctgtacggccagtgccctaggactgtgtcggacctggctttgcagaatgcctttggggaccgctggggaccctacttcgccgagtatgattggtgttccacctgctcctcctcttcagagtctgacaacgagggctatttcctaggagaacccatcccccagccagcgcgcctgcgatacgtcacaagcgatgagctgctgcacaaatacagctcctacggcctccccaaatcttccacattaggtggcagaggacagttgcacagcaggaaaagacagaagagcaaaaactgtatcatttcttaa

SEQ ID NO: 7017 - DNA, 810 bp, Homo sapiens
  SIMILAR (58)..(645): 671254mologous to Homo sapiens triple LIM domain protein,accession number AJ011654,Smith-Waterman Score=714.
atgacttcaaagcagtcattttttggatctttaaaggcatcaaaatcaactgaagaactggctgaaaatgcagattcttgggcctcccagaagttctggttcactaggtctgggacaggactggggaacttgcaggtacaccagtactatagctgtctcccagaagagaaagtcccttatgtcaacagtcctggagagaaactgcgaatcaagcagctactacaccagctgccgccacatgacaatgaggttcgatattgcaactccctggatgaggaagagaagagggagctgaagcttttcagcagccagaggaaacgcgaaaacttgggccgcgggaatgtcaggcctttcccagtcaccatgacaggagctatttgtgaacagtgcggaggccagatcaatggtggagacatcgctgtgtttgcgtcacgcgctggccacggcgtttgctggcacccgccgtgcttcgtatgcactgtctgcaatgagctcctggtggatctgatctacttttaccaagatgggaagatatactgtggcaggcaccatgctgagtgcctgaagccgcgctgtgctgcctgcgatgagccaacacatggtcttctggctttctgcactgaagaaagccataggcaacttcattttcttgcattaacccttttgggagagaagccccacccatccctggtttctagaatgtctggggttgcggcctgctttactgagcgtggaggtctcatagcttcctgttgggaaggcagtttctgtatccatgaagatccccaagtgacatataactggccctaa

SEQ ID NO: 7018 - DNA, 2668 bp, Homo sapiens
  SIMILAR (722)..(1120): 761254mologous to Homo sapiens triple LIM domain protein,accession number AJ011654,Smith-Waterman Score=634.
tcaaacgacctcactgaggcggcatatagcctctccccggatcaaaaacggatgctggatctgttcggtgaccagatcagaaaaactggagggccccctacagggaacatggacgggatctggcgagaaccatggtgctaaatatggccgaaataattccggaatgaccccctgttcacaaatagctcctgtcatggtgactgggaaaggcctgacattcccgcggcccaagttttcgcgtttcctctggctgctgaaaagcttcagctccctcttctcttcctcatccagggagttgcaatatcgaacctcattgtcatgtggcggcagctggtgtagtagctgcttgattcgcagtttctctccaggactgttgacataagggactttctcttctgggagacagctatagtactggtgtaccccctgtccattgcctagagcacagtcaggcctgagagcccttcttaactggtactttgaaccaagccctttctgatactgtctaaggctggcccaagttggaatcttccctgcaccctctagggcatggccagtagatctggaccccgagtcaaggctctgttgtttcccatctctgggttcacttgccaaccccactgcagtcggattggaggaagacagagagcaagacgttggaacaagcagcaggggtggagcctgggacacaaggatcaagagggaacttgagaaaatgagtgagaagtgcggaggccagatcaatggtggagacatcgctgtgtttgcgtcacgcgctggccacggcgtttgctggcacccgccgtgcttcgtatgcactgtctgcaatgagctcctggtggatctgatctacttttaccaagatgggaagatatactgtggcaggcaccatgctgagtgcctgaagccgcgctgtgctgcctgcgatgagatcatctttgcagatgaatgcacagaagctgaggggcgacactggcacatgaaacacttttgctgcttcgagtgtgagacagtgctgggcggccagcgctacatcatgaaggagggaagaccctactgttgccactgcttcgagtccttgtatgcagaatattgtgacacctgtgcccaacatataggtgaggcaatatttggcagtcagcttggtccttctgtgatgcggtcacctttgttttggggagtggggatagccgcagctgctctggatgctgtgctgattagagctcaccaaaggacccagggatgccatcatgagctctctgcactcttggcatttgagaaagggagtgagaagaaggaggaggaagaaggaggacaagtctccagaagttcttccttgaaagtccaggctcaggaactctcagccactgaagataaaggccacattagtccctttttctgggaagccgtgtatcattacgcatcaggagaatgcaggggtcctggtccaccctacagtcatagcttgaggctatattcccagcaggctctccccacgggaaggggccccagcagctcccagtttccattctgccagttttactgctgctataaaaagagcctgctgtgtgactgccttagcaaaagtcctgccttagaaaaagcaatgagaggtatcgaccaaggtcaaatgacctatgatggccaacactggcatgccactgagacctgtttctgctgtgctcactgcaagaaatccctcctggggcggccattcctcccgaagcagggccagatattctgctcacgggcctgcagtgctggggaagaccccaatggttctgactcctctgattccgccttccagaacgccagggccaaggagtcccggcgcagtgccaaaattggcaagaacaagggcaagacggaggagcccatgctgaaccagcacagccagctgcaagtgagttctaaccggctgtcagccgacgtagaccccctgtcactgcagatggacatgctcagcctgtccagccagacacccagcctcaaccgggaccccatctggaggagccgggaagagccctaccattatgggaacaagatggagcagaaccagacccagagccctctgcagctcctcagccagtgcaacatcagaacttcctacagtccaggagggcaaggggctggggcccagcccgaaatgtggggcaagcacttcagcaaccccaaaaggagctcgtcactggccatgacaggacatgctggcagcttcatcaaggaatgccgagaagactattacccggggaggctgagatctcaggagagctacagtgatatgtctagtcagagtttcagtgagacccgaggcagcatccaagtccccaaatatgaggaggaagaggaagaggaagggggcttgtccactcagcagtgtcggacccgtcatcccatcagttccctgaaatacacagaggacatgacgcccacagagcagacccctcggggctccatggaatccctggccctgtctaatgcaacaggcactaagacctgcagcgtgacattccaagcaaaagagacatgcagataccaggatgctcaatttgggaaagtaaaagccagagtcaaagaaagacaatcactgtggagtaaattccagggctcctgtggaatctgcctttattcccataaatacatacttaaatcaagcagttcctcttag

SEQ ID NO: 7019 - DNA, 2434 bp, Homo sapiens
  SIMILAR (877)..(1938): 971254mologous to Mus musculus Ten-m2,accession number AB025411,Smith-Waterman Score=1804.
atggggttctctatgttggccaggattctgatgcagaatgcttctttgagaacctctgattcagggatgtacagaacagggattcctaactgtcttggtcagtttgggctgctacaacaaaaataccatagactagggggcttaaacaacaaacatttatttctcgcagtcctggaggctgggaagtccaagatcaaggcaccagcagattcagtgtctgatggcctggtggattgtttggaccctgactgctgcctgcagtcagcctgtcagaacagcctgctctgccgggggtcccgggacccactggacatcattcagcagggccagacggattggcccgcagtgaagtccttctatgaccgtatcaagctcttggcaggcaaggatagcacccacatcattcctggagagaaccctttcaacagcagtgaacacttaagccctggccatgccagccatgtcctccacagaagcctgagccggcatgcctgggtccatggaagaaatctcttgtccattgactatgatcgaaatattcggactgaaaagatctatgatgaccaccggaagttcaccctgaggatcatttatgaccaggtgggccgccccttcctctggctgcccagcagcgggctggcagctgtcaacgtgtcatacttcttcaatgggcgcctggctgggcttcagcgtggggccatgagcgagaggacagacatcgacaagcaaggccgcatcgtgtcccgcatgttcgctgacgggaaagtgtggagctactcctaccttgacaaggatggatgtgggaaaaaaagcacgggctgcttaagaaaatcaaggctctgctaccaaaggcagaaatctgattcaggacatatagctttcatccagtatgaggctgcatcccccggagagcagcagttatatgttttcaacgctgatggcatccaccaatacactgtgagcctggtgacaggggagtacttgtacattttcacatatagtactgacaatgatgtcactgaattgattgacaataatgggaattccctgaagatccgtcgggacagcagtggcatgccccgtcacctgctcatgcctgacaaccagatcatcaccctcaccgtgggcaccaatggaggcctcaaagtcgtgtccacacagaacctggagcttggtctcatgacctatgatggcaacactgggctcctggccaccaagagcgatgaaacaggatggacgactttctatgactatgaccacgaaggccgcctgaccaacgtgacgcgccccacgggggtggtaaccagtctgcaccgggaaatggagaaatctattaccattgacattgagaactccaaccgtgatgatgacgtcactgtcatcaccaacctctcttcagtagaggcctcctacacagtggtacaagatcaagttcggaacagctaccagctctgtaataatggtaccctgagggtgatgtatgctaatgggatgggtatcagcttccacagcgagccccatgtcctagcgggcaccatcacccccaccattggacgctgcaacatctccctgcctatggagaatggcttaaactccattgagtggcgcctaagaaaggaacagattaaaggcaaagtcaccatctttggcaggaagctccgggtccatggaagaaatctcttgtccattgactatgatcgaaatattcggactgaaaagatctatgatgaccaccggaagttcaccctgaggatcatttatgaccaggtgggccgccccttcctctggctgcccagcagcgggctggcagctgtcaacgtgtcatacttcttcaatgggcgcctggctgggcttcagcgtggggccatgagcgagaggacagacatcgacaagcaaggccgcatcgtgtcccgcatgttcgctgacgggaaatggtggcagattattgctgaatccggcataaaacagatccataccgctttgcataatgaagttatccgccatgcgccgcatctggtaacgcttgaagacaggataactggcccacgcttcgccgtagctgcgggcgttgaccagaacatcaatcagggcatcgacatcacgataaccaagattcactcccttgccccgccagcggatggatggtatgcgcggcattccccaccagcgcaagccctggctgcacgtactgcaacgcatggcgacgcgtcagcggaaacgcaccagcggcaagcggtgtaacaacgtacctgtgaaacagcagcatcaaatggatgctgcatatctacccaattttgcagctggagtggacctttctgttcgtgaaatccaggcctctcatttcactgatgaaattgagaaccagcctgctctggttagccagctgctcccagaaggtggagtttatgccaaacagtctcctaagctgccatga

SEQ ID NO: 7020 - DNA, 444 bp, Homo sapiens
  SIMILAR (1)..(279): 931254mologous to Escherichia coli 46 KD MEMBRANE PROTEIN,accession number D90861,Smith-Waterman Score=415.
atggaaacaggtttggaaaaagttgcggacaatagtgaaatcagaatgttggttttgttgatgatgaccgtcgcggggcttggcgcgtttatgagttcaaccggcgttgtcgctatctttattcccgtggtgttaagcgttgccatgcgtatgcaaacgtcgccgtcacgtctgatgatgccgttaagttttgccgggctgattagcggcatgatgacgctggtggcgacgccgccgaacctggtagtcaacagtgaattgctgcgtgaaggctatcacgcctgataattggagtgcacacactaatagtttctgtgcgttctgttccacgttgatactgtatgtgtattgccatatggtctcataagtgcgtgtactaaaggtgactacacgagtttggtctggtctcgctggttctccggtgtatagctctaaatggctcat

SEQ ID NO: 7021 - DNA, 430 bp, Homo sapiens
  SIMILAR (67)..(426): 841254mologous to Escherichia coli K12 methylmalonyl-CoA mutase (MCM),accession number AE000375,Smith-Waterman Score=518.
tggatttggcgcacaggacccgaaatcactggcgctgcgtacccactgccagacctcaggctggagctgactgaacaggatccgtataacaacgttatccgcaccaccattgaagcgctggctgcgacgctgggcggtactcagtcactgcataccaacgtctttgacgaagcgcttggtttgcctaccgatttctcagcacgcattgcccgcaacacccagatcatcatccaggaagaatcagaactctgccgcaccgtcgatccactggccggatcctatggaggagctattatccaacagatcgacgtagccggtggattggcgaaacggatcgaagcaggtctgtcaaaacgaatgatcgaagaagcctcagcgcgcgaacaggcgctgatcgaccagggcaagcgtgtcatcgttggggtcacaa

SEQ ID NO: 7022 - DNA, 1983 bp, Homo sapiens
  SIMILAR (832)..(1530): 1001254mologous to Escherichia coli K12 methylmalonyl-CoA mutase (MCM),accession number AE000375,Smith-Waterman Score=1146.
atggtaacgctgattctctacttccgtttctatcgcctcaatggtgacacgctgcgcaggatccagatccatctgctggataaatatcgcaaagtaccgcccgagcctgttcatgctgatattccggtcggtgcacgccgtttttccagaccttgttcttggttcctccgcattacaaaacgcggttatcgccgtacggtgcatgcaatggccgggcaaaaagagaagctgcttggcgcagggatgagcgattatctggcgaaaccgattgaagaagagcgattgcataatttgttgttgcgctacaagcctggcagcggtatttcctctcgcgtcgtgacgcccgaagtcaacgaaattgtggtgaacccgaatgcgaccctcgactggcaactggcactacgccaggcagcaggaaaaaccgatttagcgcgcgatatgctgcaaatgttactcgatttcctgcctgaagttcgcaacaaagttgaggaacagctggttggagaaaacccggaaggcctggttgatttgattcataaactgcatggcagttgcggctatagcggtgtgccacgtatgaagaatctctgccaactgatcgaacaacagctacgtagcggtactaaagaagaagatttggaaccggagctgctggaactgttggacgagatggataatgtcgcgcgcgaagccagcaaaattctcgggccggataagacgcatttgcgtcgcatccggcgtgatgtgcttgccaccgatcccaggcctgccagagacaggcgaaaagcgtgcctgcatgcctgcgtactaaggaccccgcctcttggcgccgccagagctattatccaacagatcgacgaagccggtggcatggcgaaagcgatcgaagcaggtctgccaaaacgaatgatcgaagaggcctcagcgcgcgaacagtcgctgatcgaccagggcaagcgtgtcatcgttggtgtcaacaagtacaaactggatcacgaagacgaaaccgatgtacttgagatcgacaacgtgatggtgcgtaacgagcaaattgcttcgctggaacgcattcgcgccacccgtgatgatgccgccgtaaccgccgcgttgaacgccctgactcacgccgcacagcataacgaaaacctgctggctgccgctgttaatgccgctcgcgttcgcgccaccctgggtgaaatttccgatgcgctggaagtcgctttcgaccgttatctggtgccaagccagtgtgttaccggcgtgattgcgcaaagctatcatcagtctgagaaatcggcctccgagttcgatgccattgttgcgcaaacggagcagttccttgccgacaatggtcgtcgcccgcgcattctgatcgctaagatgggccaggatggacacgatcgcggcgcgaaagtgatcgccagcgcctattccgatctcggtttcgacgtagatttaagcccgatgttctctacacctgaagagatcgcccgcctggccgtagaaaacgacgttcacgtagtgggcgccatcctcactggctgccggccgcagtcggtaacctcgcgcatacagccgggcagtgacgtcatcgtctgcgcggaaatggacgaacagtggggctatgtcggggctaaatcgcgccagcgctggctgttttacgcgtatgacagtctccggaagacggttgttgcgcacgtattcggtgaacgcactatggcgacgctggggcgtcttatgagcctgctgtcaccctttgacgtggtgatatggatgacggatggctggccgctgtatgaatcccgcctgaagggaaagctgcacgtaatcagcaagcgatatacgcagcgaattgagcggcataacctgaatctgaggcagcacctggcacggctgggacggaagtcgctgtcgttctcaaaatcggtggagctgcatgacaaagtcatcgggcattatctgaacataaaacactatcaataa

SEQ ID NO: 7023 - DNA, 357 bp, Homo sapiens
  SIMILAR (1)..(168): 981254mologous to Escherichia coli K12 methylmalonyl-CoA mutase (MCM),accession number AE000375,Smith-Waterman Score=271.
atggcgaaagcgatcgaagcaggtctgccacaacgaatgatcgaagaggcctcagcgcgcgaacagtcgctgatcgaccagggcaagcgtgtcatcgttggtgtcaacaagtacaaactggatcacgaagacgaaaccgatgtacttgagatcgacaacgtgatggtcggtcctgtcagccttctggccatcggggtcctcaccgtgcactgcatggtcatcctgttgaactgtgctcaacacctcagccagagggctcccgttttcttgtcccatatcagcttcccagggtgtgtgatagttctggctgcctcagagggcctggagctgcgcaaaagcactagacattatttctag

SEQ ID NO: 7024 - DNA, 1116 bp, Homo sapiens
  SIMILAR (1)..(987): 921254mologous to Escherichia coli K12 methylmalonyl-CoA mutase (MCM),accession number AE000375,Smith-Waterman Score=1545.
atgaaggccgcagtgcaaccagtaccgccgttttatatcgtcgccgcagaagagcaaggtgttacacctgataaactgaccgccaccattcaccacgatattctcacagagtacctctgccgcaacacctatatttacccaccaaaaccgtcaatgcgcattatcgccgacatcatcgcctgtatcagcggttaccacatgggtgaagcgggtgccaactgcgtgcagcaggtagcatttacgctcgctgatgggattgagtacatcaaagcagcaatctctgccggactgaaaattgatgacttcgctcctcgcctgtcgttcttcttcggcatcggcatggatctgtttatgaacgtcgccatcttgcgtgcggcacgttatttatggagcgaagcggtcagtggatttggcgcacaggacccgaaatcactggcgctgcgtacccactgccagacctcaggctggagcctgactgaacaggatccgtataacaacgttatccgcaccaccattgaagcgctggctgcgacgctgggcggtactcagtcactgcataccaacgtctttgacgaagcgcttggtttgcctaccgatttctcagcacgcattgcccgcaacacccagatcatcatccaggaagaatcagaactctgccgcaccgtcgatccactggccggatcctattacattgagtcgctgaccgatcaaatcgtcaaacaagccagagctattatccaacagatcgacgaagccggtggcatggcgaaagcgatcgaagcaggtctggcaaaacgaatgatcgaagaggcctcagcgcgcgaacagtcgctgatcgaccagggcaagcgtgtcatcgttggtgtcaacaagtacaaactggatcccgaagacgaaaccgatgtacttgagatcgacaacgtgatggtgcgtaacgagcaaattggttcgctggaacgcattcgcgccacccgtgatgatgccgcctccgacacccgtgaaatagtagatttgaccaacggaaatattaaaacgttcaacggcagcatcatcatatatgcgagatttgacaccggtcgtcacctgtttagcggaggcaatacggtcaagaccgcc

SEQ ID NO: 7025 - DNA, 453 bp, Homo sapiens
  SIMILAR (1)..(231): 961254mologous to Escherichia coli K12 putative transport system permease protein,accession number AE000413,Smith-Waterman Score=358.
atggtgatgctgctggggatcgcgataactcacgacctgcgtcatcgtgatgaaaatgacattgatgccagcgggctttcggtgtttgaagaacgcacgtcacggattatcaaaaacttaccctatatcgccatcgtgggagcattgattgccgccgttgccagcatgaagatttttgctggcagtgaagtgtcgatcttcacactggagaaagcatattccacaaccattgaagtttttgagcaaggcaaagattataatgagttacagtctagaaacatcagtgccatgacagtatcacatccccctttcgctagctcggataatagcgaagaggtccgcaccgatgcgtcttcccaacagttgcgcatcctggatggcgaatggggcctgatgcggattttctacttacgcatctgtaggcgatgtcacaccgcatatggggcactctaa

SEQ ID NO: 7026 - DNA, 255 bp, Homo sapiens
  SIMILAR (1)..(252): 1001254mologous to Escherichia coli damX,accession number U18997,Smith-Waterman Score=436.
atggatgaattcaaaccagaagacgagctgaaacccgatcccagcgatcgtcgtactggtcgttctcgtcaatcttctgaacgttctgagcgtactgaacgtggcgaaccgcagatcaattttgatgatattgaacttgatgacactgacgatcgccgtccgactcgtgcgcaaaaagagcgcaatgaggaaccggaaatcgaggaagaaattgacgaatccgaagatgaaaccgtggatgaagagcgcgtatag

SEQ ID NO: 7027 - DNA, 242 bp, Homo sapiens
  SIMILAR (1)..(240): 971254mologous to Escherichia coli dipeptide-binding protein,accession number L08399,Smith-Waterman Score=416.
gaagaagcgaaagccttgctgaaagaagcggttctggaaaaaggtttctccatcgacctgtgggcgatgccggtacaacgtccgtataacccgaacgctcgccgcatggcggagatgattcaggcagactgggcgaaagtcggcgtgcaggccaaaattgtcacctacgaatggggtgagtacctcaagcgtgcgaaagatggcgagcaccagacggtaatgatgggctggactggcgataa

SEQ ID NO: 7028 - DNA, 242 bp, Homo sapiens; identical to SEQ ID NO: 7027
  SIMILAR (1)..(240): 971254mologous to Escherichia coli dipeptide-binding protein,accession number L08399,Smith-Waterman Score=416.

SEQ ID NO: 7029 - DNA, 9231 bp, Homo sapiens
atggcgtgcgtcttgcgcaactgtgttccgtgttacgtatatcgtctcgacaaccagcaagagaacatctggcctgcgggcaccactgctacagtggtggtcactggcaaacagatcgcgacgaaagccaggattcgttccttcacctggaaacgccatcgctgggcggtactgacagcggcgattgttgccgccggtccggcctttgctgcgggaggtgaaccgtattctggcgctattcgctatcgtggctttttgcgcatcatcggcacatttattggctgtattgccggactggtgatcatcattgcgatgatccgcgcaccattattgatgattctggtgtgctgtatctgggccggtttttgtacctggatatcctcgctggtacgaatagaaaactcgtatgcgtgggggctggccggttataccgcgctgatcattgtgatcaccattcagccggaaccattgcttacgccgcagtttgccgtcgaacgttgtagcgagatcgttatcggtattgtgtgtgcgattatggcggatttgctcttttctccgcgatcgatcaaacaagaagtggatcgagagctggaaagtttgctggtcgcgcaatatcaattaatgcaactctgtatcaagcatggcgatggtgaagttgtcgataaagcctcggggcgacctgaaaccaaacctgggctgccgcaggatggcgcgttttatgcccttggtgtgcatacgatggaccagattatttctctgttcggtcgcccggatcacgtcgcttatgacatccgcagcctgcgtaataaagccaatcctgacgacacctttgaagcgcaactgttttatggcgacctgaaagccatcgtcaaaaccagccatctggtgaaaatcgattatccgaaatttatcgttcacggtaagaaaggttcgtttattaaatacggtatcgaccagcaggaaaccagcctgaaggctaatattatgccgggcgaaccgggattcgcagcggatgattcggtcggtgtgctggagtatgtcaatgacgagggcgtgacggtcagagaagagatgaagccggagatgggcgattacgggcgcgtttatgatgcgttgtatcaaaccatcacccacgatttacgatatcggcacaaaaacctttatcgtcgtaaactagcttcgcagcgggtgacagaacatgtaaaccgggcaggcttaagatactcgtatcagtatgagaaagactgcatcaccatcactgacagcttggcccacaataaagtgctgcacacgcagggtgaagccggtctgaagcgggtggtgaaaaagaaacacgcggacggcagcgtcacgcagagtcagtttgacgccgtgggcaggctcagggcacagacggatgccgcaggcaggacaacagagtacagcccggatgtggtgacgggcctcatcacgcgcataaccacgccggatggcagggcatcggcgttttactataaccaccacaaccagttaacgtcagccaccgggcctgacgggttggaattgcgccgggaatatgatgaattgggccgtctgattcaggaaactgcccctgacggcgatatcacccgctaccgttatgataatccacacagtgacttaccctgcgcaacggaagatgccaccggcagccggaaaaccatgacgtggagccgttacggtcagttgctgagcttcaccgactgttccggttatgtaacccgttatgaccatgaccgcttcgggcagatgacggcggtgcaccgcgggtgggaaacaggacatttggttgaagggctgggagaagcacaggcctggcaagccccgttgtggaaggcgctggtggaatatacccatcaactcgggcaaccgcgctggcaccgcgccaatctctatcagcgctttatcgaaacgctggagtccgcgacgacctgcccgccggggttaccttcgcgcgtctttatatgcggtatttccgcgttaccgcctgtttatctccaggcgctacaggcgctgggtaaacatattgaaatccatctcctgtttaccaacccctgccgttattactggggcgatattcaagatcctgcttatctggcgaaactgctgacccgtcagcgtcgacacagttttgaagatcgcgacttgccgctatttcgtgatagcgaaaatgccggacagctctttaacagcgatggtgaacaggatgtcggcaacccgctcctggcttcatggggtaagcttgggcgcgactacatttatctcctttctgacctggagagcagccaggagctggacgcctttgtcgatgtcacgccagataacctgtctgcatcaacatgtcagtgctcgacacttcatggacactggaaaaccgcgccgttgcatggtgtgaacatgcgacagagttttcccgtagcgataacaaacgcccgcttgatccacctggatagccagtactcaccttccacgtattgccatagcccgcagcgtgaacctctgaagtcttacacgatcgcctgcgtggtagacgtcacgctgaatgctgataatttcatcgtgagggataacggccccggtgtgacaccagaggcactggcgcgaattggcgaacgcttctatcgcccacccggacaaaccgctaccggcagcgggcttgggctatcgattgtccagcgaatcgccaaattgcatggcatgaatgttgaatttgggaatgcggaacaaggtggatttgaggcgaagattttactaatagcaaaatataaaccgtccccaaaaaagccaccaaccacaaaccagacaaataccgagcgagaatacatatacccaaaaacgatcgacggtcaccgagtggtcaatgaccaggtcgaccgtatcgccgccgaggcgtttaaccgcttcgcgcattgccgccagatcaacaacggcaggtacgccggtaaagtcctgcatcagcacccttgccgggcggtaggcaatttcacggtcagcatgggcatttttcagccatcctgccagcgcgtggatatcctcttcggtaaccgagttaccatcctgccagcgcagcagcagttcggcattgcacagggcggacccgttctgccgttattaggcctaccagagtcatcttgcgcggaccgccaattttgggaagcgcttacgcagcgcgtcgatcacatcagacgtgtcatccaccgacagcgtgatctgggtcataaaggagagcttctcttcgtttttgaccgtcagtttccacacatcgtccggcgattcgaccagatacattcccccttccgggttactgtactggcccattgtcccttccacttccgggtgcccggcgtgaccgatgagaatagattcttcgccacggcgactggcgcgggcgacttccatatgcactttggtcaccagcggacaggtggcatcaaacaccgtcaaatcgcgactttttgcttcgttacgtaccgcctgagaaacaccgtgtgcggagaaaatcaggatcgcgccgtccggtacttcgctaatctgctcaataaagatagccccacgctcacgcaagctatcgaccacatagcggttatgtaccacttcgtgacggacatatatcggtgcgccgtaaatggccagcgcgttttcaacaatgctgatagcgcggtctaccccggcacaaaaaccacgcggagaacttcccaggggaaaggccggtaccacgtgagggaaccgggggggccgacgatgttgcgcgtggcggaactgcccagcgaggctggtatccctgatggcgttttcaatgtcgtcaccgggtcaggtgctgtatgcggcgcggccctgacgtcacatcctcatgttgcgaaaatcagttttaccggttcaaccgcgacgggaaaaggtattgccagaactgctgctgatcacttaacgcgtgtaacgctggaactggtcggtaaaaacccggcaattgtattaaaagatgctgatccgcaatgggttattgaaggcttgatgaccggaagcttcctgaatcaagggcaagtatgcgccgccagttcgcgaatttatattgaagcgccgttgtttgacacgctggttagtggatttgagcaggcggtaaaatcgttgcaagtgggaccggggatgtcacctgttgcacagattaaccctttggtttctcgtgcgcactgcgacaaatgtgttcattcctccgacgatgcgcaggcacagcaagcagagctgattcgcgggtcgaatggaccagccggagaggggtattatgttgcgccaacgctggtggtaaatcccgatgctaaattgcgcttaactcgtgaagaggtgtttggtccggtggtaaacctggtgcgagtagcggatggagaagaggcgttacaactggcaaacgacacggaatatggcttaactgccagtgtctggacgcaaaatctctcccaggctctggaatatagcgatcgcttacaggcagggacggtgtgggtaaacagccataccttaattgacgctaacttaccgtttggtgggatgaagcagtcaggaacgggccgtgattttggccccgactggctggacggttggtgtgaaactaagtcggtcgctgtgtacgcgcccctagcgttggcgtttcgtcaaagaagttccatggtttcagcagagtatgtacccacttcggtcggcataatcggccactcttcggcgcgggccacatgtgtggtgccggtggtcatccagacaacggcgtcggtgttgtccagcgactcacctgtgttccccaacccaattcaggctttgcttcatgccgcttacgctaacgcctcgttgtatgctctgcgatctgccgcgcataaactgttgaattacgcgcagcaggcgcgggaatacctggattttcgtgcgcacgggttaaacgtcgcttgtgaacaattgcggcaaaatatccaccagatcgaagaaagtttgcagctattgcaactcaatcaggcgcaggtgagcggcgagattaaacatgaaatcgagctggccctgacctccgccaaccactttctgcgtcaacagcaagatgcgctgaaggtgcagttagccgccttgtttcaggatgattcggagccgttaagcgagattcgtacccgctgtgagacactgttacagacggcgcagaacaccatcagtcgcgactttacgctgcgttttgccgagcttgaatccaccctttgccgggtgttaaccgatgttattcgccccattgagcaacaagtcaaaatggaattgagcgagtcagggtttcgtcctgggtttcattttcctgtttttcacggcgtagttccccacttcaacactcgccagctgttcagtgaagtcatttcgcgccaggaagcaacggacgagcagagcacgcgtttaggcgttggatgcgaaatgaagatatctcttgtagttcctgtcttcaatgaagaagaagcgataccaattttttataaaacggtacgtgaattcgaagaattgaagtcatatgaagtggaaatcgttttcataaatgacggcagcaaagacgctacggagtcaatcattaatgctctggctgtttcagatcctctagttgttccgctgtcatttacacgcaactttggtaaagaaccagcattgtttgcagggttagaccatgcaaccggggatgcgataatcccaattgatgttgacctgcaagacccgattgaggttattcctcatcttattgaaaaatggcaagcaggtgctgatatggttcttgctaaaagatctgaccgctcaactgatggacgcctgaagcgaaaaacggctgagtggttctataagctccacaataaaataagcaatcctaatggccaatcacggtttttgatgcactcgcgcagcgttttgtggcttcgcagaggaaatcgaggaacttcgccatggaccggcgtctttgtcgtaatagagaacgggggtcgagctgttgaatggctgggagaattgctcatcgtttcatgccggatgcggcgtaaacgccttatcacggcctacaagatcatgcaaattcaacatattgccactcacccagtaggcctgataagcgcagcgcaatcaggcagggatcctctagagtcactgacgcatgagctgctgctcggcgaccgcgtggttttttcagcccccgggtcgccatcaggtagtaacaacgtcgatcatgatcggccagcgatacctttgccatttacccaatcctgtcttttgaaatgttgtgtgcggatttgcatccgcctttcaacatatcaaaaaataatattgcggcaggtacagaagtaccgcgccaccgttaccgaatgtattccgatgatgatccgtacgttgatggtacagccgccttcagcgaacgatcagcaacaccgcctgcgggaagtgatgttttatctcaacttgtcggagcaggaaaaagatgcgttttgtgaacgcttcggcgttcgcttgctgacgtcttatgggatgacggaaaccattgtgggcattatcggcgatcgtcctggcgataaacgacgctggccgtcgattggtcgggtggggttttgctacgaagcggagatccgcgacgatcacaatcgcccgctcccggctggtgagatcggtgaaatctgcattaaaggcatacctgggaaaaccatcttcaaagagtactttctcaacccacaagccactgcgaaagtgctggaagccgatggctggctgcataccggcgataccggataccgcgacgaagaggactttttttatttcgtcgatcgccgctgcaatatgattaaacgtggcggcgagaatgtctcctgcgtggagctggaaaatattatcgccgcgcacccgaaaattcaggacatcgtggttgtgggtattaaagattcgattcgcgatgaagccatcaaagcatttgtggtgctgaatgaagtcaatgcactgctggatgacgcagaacttgcagcattgattgctgaacacgatctggtgctcgactgtacggataacgttgcggtacgtaatcaactgaacgcaggctgttttgccgcgaaggtaccgctggtttccggcgcggcaattcgtatggaaggtcaaatcaccgtctttacttatcaggacggtgaaccgtgctatcgctgccttagccgtttgtttggtgaaaatgcattaacctgcgtggaagcaggcgtaatggcaccgttgatcggcgtaattggttcgttgcaggcaatggaagcgatcaaaatgctggcaggttatggcaaaccggccagcgggaaaatcgtcatgtacgatgcgatgacctgtcagtttcgcgaaatgaaactgatgcgtaatccggggtgtgagcaatttatgaggatgcagaacgtccggttaaatcgacgttctgccaaacgctccctgccagtcctgctcaaacttcgccacagcggcatcaaccgccggatagctaatcatctgttgtgccacatccagtggcagacaaaggtgctgagattcccggaagtgcagatgcatgaaatcctgagtgactttgccagaatgattccagcagcactggataacgtgaagacttcattaccgacagattttccggagaacgtggtgacggcagttgaaagcaatgtgttgaggttgcatggacggttaagccgagaatacggtaatatttacacggaaacaccggtcaaagtgtctggctttaagcgcgtcatagacgagcaggactggacaatcactaaggtgacacattttctgaataatagcggcttcacgacgtcattagagcttgagcatgccgcacatgcgcgtacaagccgctatatcactgacacgacaaaagagcgttatcaccagtgtcagaacgtgaattgcagcgccacgttcatcacttatgagtcggtacagcgatacattgtgaagccgggagaagtccacgtcgcagcctggatcggaacagtgcatacagccgtctttgcggatcagccattccagtttgtcgttctgctccacttccgagaagcgcattaccgtccacgtagaacactatatggggagaagatgcgcggaattctctgtacctctggaccggatgaaacaccggcggtacatgcaacagaagcctttggccctgtcgcaacgctgatgccagcactaaaccagcgacatgctctgcaactggcttgtgcaggcggcggtagccttgcgggaacgctggtgacggctgatccgcaaattgcgcgtcagtttattgccgacgcggcacgtacgcatgggcgaattcagatcctcaatgaagagtcggcaaaagaatccaccgggcatggctccccactgccacaactggtacatggtgggcctggtcgcgcaggaggcggtgaagaattaggcggtttacgagcggtgaaacattacatgcagcgaaccgctgttcagggtagtccgacgatgcttgccgctatcagtaaacagtgggtgcgcggtgcgaaagtcgaagaagatcgtattcatccgttccgcaaatattttgaggagctacaaccaggcgacagcctgttgactccccgccgcacaatgacagaggccgatattgttaactttgcttgcctcagcggcgatcatttctatgcacatatggataagattgctgctgccgaatctattttcggtgagcgggtggtgcatgggtattttgtgctttctgcggctgcgggtctgtttgtcgatgccggtgtcggtccggtcattgctaactacgggctggacagcttgcgttttatcgaacccgtaaagccaggcgataccatccaggtgcgtctcaccttggtacgcgagctgggtttaccactcgatgacgtgaaagttcgccaggctctgacctacgcggtgaacaaagacgcgatcatcaaagcggtttatcagggcgcgggcgtatcagcgaaaaacctgatcccgccaaccatgtggggctataacgacgacgttcaggactacacctacgatcctgaaaaagcgaaagccttgctgaaagaagcgggtctggaaaaaggtttctccatcgacctgtgggcgatgccggtacaacgtccgtatacgcttcttcgggagccccaatgttgtttccccgccggggtcaccgaatttgttgccccccatcgcgtaatcttatag

SEQ ID NO: 7030 - DNA, 665 bp, Homo sapiens
  SIMILAR (3)..(428): 901254mologous to Escherichia coli K12 putative periplasmic binding protein,accession number AE000488,Smith-Waterman Score=619.
agcggagtgggctggcgctggatctacccaactttctcccctcgcagatgatagcgcaacgtgcgcgtggcgaagaggaagcgcatcatcacagtagcccggaaggagcaattgaagtcgatgaaagcgaagtcgatctcgatgccatcagtgcgcaatccttgcggctggtgcgctcaattttgatgttgatcgccctgctttctgtcattgtgctgtggtcagaaatccattccgctttcggcttcctcgaaaatatttcgctgtgggatgtcacctccacggtacagggcgtaaaaagtctggagccaattaccctcggtgcggtgctgattgccattctggtgtttatcatcaccacgcagctggtgcgcaacttgcccgcgctgctggaactggcgattttgcagcacctggatttaacgccggtcgtggcactggatcaggttcctgacgaagcattcgccagcaaagcggtgggtgacggtgtggcggtgaaaccgacagataaaatcgtcgtatcaccagccgcagcgggaccccggaaagccgagcaggcccagacctgcggtccagctccgtgggccgcccacaccggctctgggtcaaagaatcgcgtggttcaaatcgggactcagcttcctacaagccagcccagtctctag

SEQ ID NO: 7031 - DNA, 719 bp, Homo sapiens
  SIMILAR (420)..(662): 1001254mologous to Escherichia coli K12 flavoprotein affecting synthesis of DNA and pantothenate metabolism,accession number AE000441,Smith-Waterman Score=423.
ccgctttgaccatgattacgagattcatgtccgtacccggagatcacgaaagctgtgatacgcccttatgtttaccgctttatccccttgggcaaataatgaaccacgatatcccgctaaaatattttgatattgccgatgagtacgcgaccgaatgcgcagagcctgtcgcagaggctgaacgcacaccgctggcccactacttccagttactgctcacccgtttgatgaacaatgaagagatcagcgaagaagcccaacatgaaatggctgctgaagcggggattaatcccgtacgcattgatgagatcgcagagtttttgaatcaatgggaaatgattaaacaccgacagattcacgaaggtgaacgccagttgcttttccagcaagcaaccaatcacgcgagcttcaagggcaccgtgctccccgccatgaaccagcagatgtaccgtgccgctgccacgcagcataatttagaggtgcttgcttcccgtggtttgctcatctgggggccagacagtggcagtcaggcttgtggtgatatcggtcctgggcgaatgctcgatccgttaaccattgtggatatggcggtagcgcatttttcgcccgtcaacgacctgaaacatctgaacattatgattaccgccggcccgacgcgtgaagaaagccctttactcagcccggagatgacgagggaatttttacaaagcctcatttga

SEQ ID NO: 7032 - DNA, 1038 bp, Homo sapiens
  SIMILAR (453)..(515): 571254mologous to Escherichia coli ugpC protein (AA 1- 356),accession number X13141,Smith-Waterman Score=57.
tcattggggcgtggctggcctgttggtgttgcgtgttggtgggtgttgtgtgggtcggttggtgcttttgcttggtgtcgtgtgccggtttgtggcgtcgtttggttgcggtccgtctgtggggctgttcgctggtggtttctggtgcactgggttggtggtcggtggggtcacgcggccgttgtggtgccgtcggagttccgtgccgggtggtgcccttgttttgtatgggtggcccgcttggtggtggcgctgtcggtgtgcgctagggctggtcggttgtttcaggatgggtgtgcttttggtgcttggcttgccatggtggcttctcttgcgtgctcctggattattaccggacttgtgcacttgcgatgggtgatggacacgctggagagcctcggcagcagataacctggcgcacggacgctggggcgagcagaagctggtggtcacgactggcgcatcaggagcgcccgacaggcaggcagcacgctgtgctgcatctgctaaaatcagctggtacagatccaagggttccaaacacccgcttaccccaaaggaggtcgaaaaaacaggctgggggctgaaaattcccggcatggccaacaacaattgcccgagcgcgttaaagaagcggcgcgcattctggagctggacggtctgctcaaacgtcgcccgcgcgagctttccggcggtcagcgccagcgtgtggcgatggcccgcgcgattgtgcgcgatccggcggtgttcctgtttgatgagccgctctctaacctcgatgccaagctgcgcgtgcagatgcgtcttgaactgcaacagttgcaccgtcgcgatcaggttgaagcgatgacgctcgcccagcgagtaatggtgatgaacggcggtgttgccgaacagattggcacaccagttgaagtcgatggtgatgacacgctggagatcctcggcgcagataacctggcgcacgacgctgggcgagcagaagctggtggcgactggcgcatcaggagcgcccgacgcagcagcacctgtgcgcat

SEQ ID NO: 7033 - DNA, 920 bp, Homo sapiens
  SIMILAR (604)..(918): 871254mologous to Escherichia coli ugpC protein (AA 1- 356),accession number X13141,Smith-Waterman Score=470.
tcattggggcgtggctggcctgttggtgttgcgtgttggtgggtgttgtgtgggtcggttggtgcttttgcttggtgtcgtgtgccggtttgtggcgtcgtttggttgcggtccgtctgtggggctgttcgctggtggtttctggtgcactgggttggtggtcggtggggtcacgcggccgttgtggtgccgtcggagttccgtgccgggtggtgcccttgttttgtatgggtggcccgcttggtggtggcgctgtcggtgtgcgctagggctggtcggttgtttcaggatgggtgtgcttttggtgcttggcttgccatggtggcttctcttgcgtgctcctggattattaccggacttgtgcacttgcgatgggtgatggacacgctggagagcctcggcagcagataacctggcgcacggacgctggggcgagcagaagctggtggtcacgactggcgcatcaggagcgcccgacaggcaggcagcacgctgtggctgcatctggcggaaaatcagctggtacagatccaagggttccaaacacccgcttaccccaaaggaggtcgaaaaaacaggctgggggctgaaaattcccggcatggccaacaacaattgcccgagcgcgttaaagaagcggcgcgcattctggagctggacggtctgctcaaacgtcgcccgcgcgagctttccggcggtcagcgccagcgtgtggcgatggcccgcgcgattgtgcgcgatccggcggtgttcctgtttgatgagccgctctctaacctcgatgccaagctgcgcgtgcagatgcgtcttgaactgcaacagttgcaccgtcgcgatcaggttgaagcgatgacgctcgcccagcgagtaatggtgatgaacggcggtgttgccgaacagattggcacaccagttgaagt

SEQ ID NO: 7034 - DNA, 261 bp, Homo sapiens
atgtgtatcctggaatgtaaaattaaagtaaatgaaaaagaggaaggagaaaaacaagaagaggaagaagaagaagaaggagaaagaggaggaggaggaggaggaaggtggaggagaaaacggcgagtcattttacacggtaccatgctggcagccgctgagtcagcacggtatatcgtgcatggatcccgaggcagttatgtgaaatatgggacctgcaagcattggcaaaagccctttttgggggccactctgggatga

SEQ ID NO: 7035 - DNA, 266 bp, Homo sapiens
  SIMILAR (3)..(185): 961254mologous to Escherichia coli member of DEAD helicase family,accession number M87049,Smith-Waterman Score=301.
tgggctttattaaagatatccgctggctgttccgccgtatgccgcctgcaaaccagcgcctcaacatgctgttctccgccacgctttcgtaccgggtacgtgaactggcgttcgagcagatgaacaatgccgaatatattgaagtggaaccggaacagaaaacgggcccccgtattaaagtagagcgcaaggcccttatagatggataacgccaggcttttcccactcacgccgatgtacaggacggcacagtgaatctcgtaatc

SEQ ID NO: 7036 - DNA, 431 bp, Homo sapiens
  SIMILAR (182)..(367): 331254mologous to Homo sapiens Polypeptide fragment encoded by gene 170,accession number W89033,Smith-Waterman Score=71.
gtttctatgtatggggtttgttgtgtagggtgaggctgtcttgaaaatgtaactttccagaagcaaagaatagtagaagcgctaaatagataccatggaaggaatctgctggtggtgccagattaggaatcttgctacctctttccactggacaccatctgccccacctataaccccacgagagtcagataatccttccccagctgtccctgtcgtcctgagtctcagcccttgccctggagccagaattgccactgggagggcttgtcctggggccctcagtgatcacacagtgattgcaggtgttggtcccagtcccaagtgagccccctgcatcctggctggcacaaggacctttcttcctccttttcacagacaccaatgagtgcctcagccttgcaggaacctgcctaccaggcacttgccagaac

SEQ ID NO: 7037 - DNA, 396 bp, Homo sapiens
  SIMILAR (1)..(270): 871254mologous to Escherichia coli dihydrolipoamide succinyltransferase,accession number J01619,Smith-Waterman Score= 387.
atgccgtgttcaacgccgcgcgggcccggtgaacccccgcttctgggggaggtcgaacccctcggcatggcagacatcgagaagaaaatcaaagagctggcagtcaaaggccgtgacggcaagctgaccgttgaagatctgaccggtggtaacttcaccatcaccaacggtggtgtgttcggttccctgatgtctacgccgatcatcaacccgccgcagagcgcaattctgggtatgcacgctatcaaagatcgtccgatggcggtgaatataaccccacgagagtcagataatccttccccagctgtccctgtcgtcctgagtctcagcccttgccctggagccagaatgccactgggagggcttgtcctggggccctcagtgatcacacagtga

SEQ ID NO: 7038 - DNA, 690 bp, Homo sapiens
  SIMILAR (19)..(399): 851254mologous to Escherichia coli hydrogenase-2 large subunit,accession number U09177,Smith-Waterman Score=592.
atggttgcaccagtttatatccgggaccaatacagtgcactgatcaccaatatcggcaaaggcgatcacaccacctttgtgaagccgaacattccggcaacgggtgaattcaaaggtgttggcttcctcgaagcgccgcgcggtatgctctctcactggatggttattaaagacggtatcatcagcaactaccaggcggttgttccatcaacctggaactctggtccgcgtaacttcaatgatgacgtcggtccttacgagcagtcgctggtgggtacaccggttgccgatccgaataaaccgctggaagtggtgcgtaccattcactcctttgacccgtgcatggcctgggtcggcaatattttgctgaccgatgaagccatcggtgtgcggattgtcgaagcgttagagcaacgatacattctgccggattatgttgagatcctcgatggcggcacggcgggaatggagctgcttggcgacatggcaaatcgcgatcatttgattattgcggatgccattgtctcgaaaaagaacgcgccgggaacgatgatgatcctgcgggatgaagaagttccggcgttgtttaccaacaaaatctctccgcatcagcttggcctggccgacgtcttgtcggacctgcgcttcacccggcgagtttccgaaaaagctaccgtgggtgcaggctag

SEQ ID NO: 7039 - DNA, 224 bp, Homo sapiens
  SIMILAR (2)..(112): 1001254mologous to Escherichia coli hydrogenase-2 large subunit,accession number U09177,Smith-Waterman Score=193.
gaataaaccgctggaagtggtgcgtaccattcactcctttgacccgtgcatggcctgtgcggtacacgtagtggatgctgacggcaacgaagtggtttcagtgaaggttctgtaatgcgtattttagtcttaggggtcggcaatattttgctgaccgatgaagccatcggtgtgcggattgtcgaagctttagagcatcgctccattctgccggcttatgttga

SEQ ID NO: 7040 - DNA, 239 bp, Homo sapiens
  SIMILAR (1)..(237): 981254mologous to Escherichia coli hybD,accession number U09177,Smith-Waterman Score=389.
gatggcggcacggcgggaatggagctgcttgtcgacatggcaaatcgcgatcatttgattattgcggatgccattgtctcgaaaaagaacgcgccgggaacgatgatgatcctgcgggatgaagaagttccggcgttgtttaccaacaaaatctctccgcatcagcttggcctggccgacgtcttgtcggccctgcgcttcaccggcgagtttccgaaaaagctgaccctggtcggcgt

SEQ ID NO: 7041 - DNA, 1065 bp, Homo sapiens
  SIMILAR (517)..(618): 941254mologous to Escherichia coli aminomethyltransferase,accession number X73958,Smith-Waterman Score =166.
atggagggcaagcagtctagcctgggatcggcggggcagcctgagaggaacagtgtggcattgatttctggaggtaagcatgagctagcgggaggaaggaaaaaggacgagaaagggttttccctttttgaaggaaggagaacgggacgacatgaaatgctacaaggagtaaaaactccaggaggcctccccagaagccgagcagatgctggcactgtacctcctgtacaccgctacctctactttcacaaacagtatcgcctccagaaagtgcatcaaatgggttctcttgtcccgtggcttcgaggtggtagcctgtcaatgggtggaggtggctggaggtggtggagagtgggtgagaccctcactaatgcagaactgataggaccccaagatcttggcagcttaactcaagacaagcgcattctccctcttgtgaagtccaaccagggacctgggtcttacctgttctgtaaaaaagggctttggtttgggggaacccgaaatttgtggcacgcttacgatctgtttattgccaccactggttataccggtgaagcgggctatgaaattgcgctgcccaatgaaaaagcggccgatttctggcgtgcgctgatggttacaacaagtgttggaataacaaagaacccccagataacacaatcgccatttctccaagcagaatgcttgttaaagatgcttttggacaaattgaatgctttaaatgtttgtgacatggttgaagttgattttgctgaacaagtttactttcagtgttatttaagctgcatcgatagaggatccctccgggtgcccctgctagagccattgctcctgggtcctcttagtatctctagcacagcattcatcaactcgaattggagcaatgggaacgcgtcatgcagacagtgtatcatgtttaccttgggttccttggtgtctagcatggtgcctctgcagacaattgggactcaatacacaagcgcgtgtgcacggggaaagcgaaaaggcaaggtgacaggaccactgacatttcacggtccacataagaaacagaacttgtga

SEQ ID NO: 7042 - DNA, 221 bp, Homo sapiens
  SIMILAR (1)..(219): 911254mologous to synthetic construct L-2amino-4- methylphosphinobutyric acid-specific transaminase,accession number A07633,Smith-Waterman Score=331.
gcgggcggcttcccgctggcgggcgtcaccgggcgcgcggaagtaatggatgccgtcgctccaggcggtctgggcggcacctatgcgggtaacccgattgcctgcgtggctgcgctggaagtgttgaaggtgtttgagcaggaaaatctgctgcaaaaagccaacgatctggggcacaagttgaaaaacgtatttctggccatagccgaaccactcccgga

SEQ ID NO: 7043 - DNA, 1067 bp, Homo sapiens
  SIMILAR (436)..(1065): 971254mologous to Homo sapiens putative p150,accession number U93574,Smith-Waterman Score=1036.
atggataaattccttgacacagacactctcccaagactaaaccaggaagaagttgaatctatgaatagaccaataacaggatctgaaattgtggcaataatcaatagcttaccaaccaaaaagaggccaggaccagatggattcacagccaaattctaccagaggtacaaggagaaacgggtaccattccttctgaaacgattccaatcaatagaaaaagagggaatcctccctaactcattttatgaggccagcaacattttgataccaaagccaggcagagacacaacaaaaaaagagaattttagaacaatatccttgatgaacattgatgcaaaaatcctcaataaaatactggcaaaacgaatccagcagcacatcaaaaagcttatccaccatgatcaagtgggcttcatccctgggatgcaaggctgggcaattagacagaagaaggaaataaagggtattcaattaggaaaagaggaagtcaaattgtccctgtttgcagacgacatgattgtatatctagaaaaccccattgtctcagcccaaaatctccttaagctgataagcaacttcagcaaagtctcaggatacaaaatcaatgtaccaaaatcacaagcattcttatacaccaacaacagacaaacacagagccaaatcatgagtgaactcccattcacaattgcttcaaagagaataaaatacctaggaatccaacttacaagggatgtgaaggacctcttcaaggagaactacaaaccactgctcaatgaaataaaagaggatacaaacaaatggaagaacattccatgctcatgggtaggaagaatcaatatcgtgaaaatggccatactgcccaaggtaatttacagattcaatgccatccccatcaagctaccaatgactttcttcacagaattggaaaaaactactttaaagttcatatggaaccaaaaaagagcccgcattgccaagtcaatcctaaggcaaaagaacaaagctggaggcatcacactacctgacttcaaactatactacaaggctacagtaaccaaaacagcatg

SEQ ID NO: 7044 - DNA, 1548 bp, Homo sapiens
  SIMILAR (1)..(1041): 961254mologous to Homo sapiens putative p150,accession number U93563,Smith-Waterman Score=1742.
atgggagactttaacaccccactgtcaacattagacagatcaatgagacagaaagtcaacaaggatacccaggaattgaactcagctctgcaccaagcagacctaatagacatctacagaactctccaccccaaatcaacagaatatacatttttttcagcaccacaccacacctattctaaaattgaccacatacttggaagtaaagctctcctcagcaaatgtaaaagaacagagattataacaaactatctctcagaccacagtgcaatcaaactagaactcaggattaagaatctcactcaaaaccactcaactacatggaaactgaacaacctgctcctgagtgactactgggtacataacgaaatgaaggcagaaataaagatgttctttgaaaccaacgagaacaaagacacaacataccagaatctctgggacgcattcaaagcagtgtgtagagggaaatttatagcactaaatgcccacaagagaaagcaggaaagatccaaaattgacaccctaacatcacaattaaaagaactagaaaagcaagagcaaacacattcaaaagctagcagaaggcaagaaataactaaaatcagagcagaactgaaggaaatagagacacaaaaaacccttcaaaaaattaatgaatccaggagctggttttttgaaaggatcaacaaaattgatagaccgctagccagactaataaagaaaaaaagagagaagaatcaaatagacacaataaaaaatgataaaggggatatcaccaccgatcccacagaaatacaaactaccatcagagaatactacaaacacctctacgcaaataaactagaaaatctagaagaaatggataaattcctcgacacatacactctcccaagactaaaccaggaagaagttgaatctctgaatagaccaataacaggagctgaaaatgtggcaataatcaatagtttaccaaccaaaaagagtccaggaccagatggattcacagccgaattctaccagaggtacaaggaggaactgctgataagcaacttcagcaaagtctcaggatacaaaatcaatgtacgaaaatcacaagcattcttatacaccgacaacagacaaacagagagccaaatcatgagtgaactcccattcacaattgcttcaaagagaataaaatacctaggaatccaacttacaagggatgtgaaggacctcttcaaggagaactacaaaccactgctcaaggaaataaaagaggatacaaacaaatggaagaacattccatggtcatgggtaggaagaatcaatatcgtgaaaatggccatactgcccaaggtaatttacagattcaatgccatccccatcaagctaccaatgactttcttcacagaattggaaaaaactactttaaagttcatatggaaccaaaaaagagcccgcatcgccaaggcaatcctaagccaaaagaacaaagctggaggcatcacactacctgacttcaaactatactacaaggctacagtaaccaaaacagcatggtactag

SEQ ID NO: 7045 - DNA, 2823 bp, Homo sapiens; identical to SEQ ID NO: 6307
  SIMILAR (1225)..(2475): 951254mologous to Homo sapiens putative p150,accession number U93563,Smith-Waterman Score=2086.

SEQ ID NO: 7046 - DNA, 1223 bp, Homo sapiens
  SIMILAR (292)..(1221): 971254mologous to Homo sapiens putative p150,accession number U93564,Smith-Waterman Score=1532.
atggagctgaaaaccaaggctcgagaactacgtgaagaatgcagaagcctcaggagccgatgcgatcaactggaagaaagggtatcagcaatggaagatgaaatgaatgaaatgaagcgagaagggaagtttagagaaaaaagaataaaaagaaatgagcaaagcctccaagaaatatgggactatgtgaaaagaccaaatctacgtctgattggtgtacctgaaagtgatgtggagaatggaaccaagttggaaaacactctgcaggatattatccaggagaacttccccaatctagcaaagcaggccaaccatataaacagagccaaagacaaaaaccacatgattatctcaatagatgcagaaaaagcctttgacaaaattcaacaacccttcatgctaaaaactctcaataaattaggtattgatgggacgtatttcaaaataataagagctatctatgacaaacccacagccaatatcatactgaatgggcaaaaactggaagcattccctttgaaaactggcacaagacagggatgccctctctcaccgctcctattcaacatagtgttggaagttctggccagggcaatcaggcaggagaaggaaataaagggtattcaattaggaaaagaggaagtcaaattgtccctgtttgcagacgacatgattgtttatctagaaaaccccattgtctcagcccaaaatctccttaagctgataagcaacttcagcaaagtctcaggatacaaaatcaatgtacaaaaatcacaagcattcttatacaccaacaacagacaaacagagagccaaatcatgggtgaactcccattcacaattgcttcaaagagaataaaatacctaggaatccaacttacaagggatgtgaaggacctcttcaaggagaactacaaaccactgctcaaggaaataaaagaggacacaaacaaatggaagaacattccatgctcatgggtaggaagaatcaatatcgtgaaaatggccatactgcccaaggtaatttacagattcaatgccatccccatcaagctaccaatgactttcttcacagaattggaaaaaactactttaaagttcatatggaaccaaaaaagagcccgcattgccaagtcaatcctaagccaaaagaacaaagctggaggcatcacactaccttacttcaaactatactacaaggctacagtaaccaaaacagcatg

SEQ ID NO: 7047 - DNA, 3090 bp, Homo sapiens
  SIMILAR (547)..(2625): 961254mologous to Homo sapiens putative p150,accession number U93567,Smith-Waterman Score=3410.
atggaacaaagctggatggagaacgactttgaccagctgagagaagaaggcttcagaggatcaaattactctgagctacgggaggacattcaaaccaaaggcaaagaagttgaaaactttgaaaaaaatttagaagaatgtataactagaataaccaatacagagaagtgcttaaaggagctgatggagctgaaaaccaaggctcgagaactacgtgaagaatgcagaagcctcaggagccgatgcgatcaactggaagaaagggtgtcagtgatggaagatgaaatgaatgaaatgaaaccaaatctacgtctgattggtgtacctgaaactaacggggagaatggaaccaagttggaaaacactctgcaggatattatccaggagaacttccccaatctagcaaggcaggccaacgttcagaatcaggaaatacagagaacaccacaaagatactcctcgagaagagcaactccacgacacataattgtcagattcaccaaagttgaaatgaaggaaaaaatgttaagggcagccagagagaaagcaccacaccacacctattccaaaattgaccacatacttggaagtaaagctctcctcagcaaatgtaaaagaacagaaattataacaaactatctctcagaccacagtgcaatcaaactagaactcaggattaagaatctcactcaaaaccgctcaactacatggaaactgaacaacctgctcctgaatgactactgcgtacataacgaaatgaaggcagaaataaagatgttctttgaaaccaacgagaacaaagacacaacataccagaatctctgggacgcattcaaagcagtgtgtagagggaaacttatagcactaaatgcccacaagagaaagcaggaaagatccaaaattgacaccctaacatcacaattaaaagaactagaaaagcaagagcaaacacattcaaaagctagcagaaggcaagaaataactaaaatcagagcagaactgaaggaaatagagacacaaaaaacccttcaaaaaattaatgaatccaggagctggttttttgaaaggatcaacaaaatatatagaccactagcaagactaataaagaaaaaaagagagaagaatcaaatagacgcaataaaaaatgataaaggggatatcaccaccgatcccacagaaatacaaattaccatcagagaatactacaaacacctctatgcaaataaactagaaaatctagaagaaatggataaattcctcaacacatacactctcccaagactaaaccaggaagaagttgaatctctgaatagaccaataacaggatctgaaattgtggcaataatcaatagcttaccaaccaaaaagagtccaggaccagatggattctcagccgaattctaccaaaggtacaaggaggaactggtaccattccttctgaaactattccaatcaatagaaaaagagggaatcctccctaactcattttatgaggccagcatcattctgataccaaagccgggcagagacacaaccaaaaaagagaattttagaccaatatccttgatgaacattgatgcaaaaatcctcaataaaatactggcaaaacgaatccagcagcacatcaaaaagcttatccaccatgatcaagtgggcttcatccctgggatgcaaggctggttcaatatatgcaaatcaataaatgtaatccagcatataaacagagccaaagacaaaaaccacatgattatctcaatagatgcagaaaaggcctttgacaaaattcaacaacccttcctgctaaaaactctcaataaattaggtattgatgggtcgtatttcaaaataataagagctatctatgacaaacccacagccaatatcatactgaatgggcaaaaactggaagcattccctttgaaaactggcacaagacagagatgccctctctcaccactcctattcaacatagtgttggaagttctggccagggcaatcaggcaggagaaggaaataaagggtattcaattaggaaaagaggaagtcaaattgtccctgtttgcagacgacatgattgtatatctagaaaaccccactgtctcagcccaaaatctccttaagctgataagcaacttcagcaaagtctcaggatacaaaatcaatgtacaaaaatcacaagaattcttatacaccaacaacatacaaacagagagtcaaatcatgagtgaactcccattcacaattgcttcaaagagaataaaatacctaggaatccaacttacaagggatgtgaagaacctcttcaaggagaactacaaaccactgctcaatgaaataaaagaggatacaaacaaatggaagaacattccatgctcatgggtaggaagaatcaatatcgtgaaaatggccatactgcccaaggtaatttacagattcaatgccatccccatcaagctaccaatgcctttcttcacagaattggaaaaagctactttaaagttcatatggaaccaaaaaagagcccgcattgccaagtcaatcctaagccaaaagaacaaagctggaggcatcacactacctgacttcaaactatactacaaggctacagtaaccaaaacagcatggcttcagcacgcagtgccggctaatgatggcaccacaagatccccatcaatagacagcattcagaaggaccccagcgagtttgcctggcgtgatcctgagttgcctgaggtcattcacatccttcagcaccagttcccatctgttcaggcaaatgcagcagcctacctgcagcacctgtggtttggtgacaacaacgtgaagatgaaggtgtgtaggttatggggaatcaagcttctggtttaccttttgggccacagagttttggaagttcagaagaatgcttgtgatgcccttcgaaatctctttttcggcaagtctacaggtgaaaataaaataacaatgaaggatgttgccacattggatctgagtttcattctcagcaaactaacacaggaacagaaaaccaaatacctcattgttctcactcataagtgggagttgaacaatgagaacacatggacatga

SEQ ID NO: 7048 - DNA, 1182 bp, Homo sapiens
  SIMILAR (1)..(1074): 631254mologous to Homo sapiens putative p150,accession number U93563,Smith-Waterman Score=995.
atggataaattcctcgacacatacactctcccaagactaaaccaggaagaagttgaatctctgaatagaccaataacaggatctgaaattgtggcaataatcaatagcttaccaaccaaaaagagtccaggaccagatggattcacagctgaattctaccagaggtacaaggaggaactggtaccattccttctgaaactattccaatcaatagaaaaagagggaatcctccctaactcattttatgaggccagcatcattctgataccaaagccaggcagagacacaacaaagaaagagaattttagaccaatatccttgatgaacattgatgcaaaaatcctctataaaatactggcaaaacgaatccagcagcacatcaaaaagcttatccaccatgatcaagtgggcttcatccctgggatgcaaggctggttcaatatacgcaaatcaataaatgtaatccagcatataaacagagccaaagacaaaaaccacatgattatctcaatagatgcagaaaaagcctttgacaaaattcaacaacccttcatgctaaaaactctcaataaattagcccaaaatctccttaagctgataagcaacttcaacaaagtctcaggatacaaaatcaatgtacaaaaatcacaagcattcttatacaccagcaacagacaaacagagagccaaatcatgagtgaactcccattcacaattgcttcaaagagaataaaatacctaggaatccaacttacaagggatgtgaaggacctcttcaaggagaactacaaaccactgctcaaggaaataaaagaggatacaaacaaatggaagaacattccatgctcatgggtaggaagaatcaatatcgtgaaaatggccatactgcccaaggtaatttacagattcaatgccatccccatcaagctaccaatgactttcttcacagaattggaaaaaactactttaaagttcatatggaaccaaaaaagagcccacatcgccaagtcaatcctaagccaaaagaacaaagctggaggcatcacactacctgacttcaaactatactacaaggctacagtaaccaaaacagcatggtactgctaccaaaacagacatatagatcaatggaacagagccctcagaaataacgccgcatatctacaactatctgatctttga

SEQ ID NO: 7049 - DNA, 1722 bp, Homo sapiens
  SIMILAR (25)..(636): 981254mologous to Escherichia coli O157:H7 Z5347 gene product,accession number AE005614,Smith-Waterman Score=1057.
atggactggtacctggacacacagcagaggtttaaatttcttatgtaccaggttgttgcgtctgatttagatggcacgttactttctcccgaccatacgttatccccttacgccaaagaaactctgaagctgctcaccgcgcgcggcatcaactttgtgtttgcgaccggtcgtcaccacgttgatgtggggcaaattcgcgataatctggagattaagtcttacatgattacctccaatggtgcgcgcgttcacgatctggatggtaatctgatttttgctcataacctggatcgcgacattgccagcgatctgtttggcgtagtcaacgacaatccggacatcattactaacgtttatcgcgacgacgaatggtttatgaatcgccatcgcccggaagagatgcgcttttttaaagaagcggtgttccaatatgcgctgtatgagcctggattactggagccggaaggcgtcagcaaagtgttcttcacctgcgattcccatgaacaactgctgccgctggagcaggcgattaacgctcgttggggcgatcgcgtcaacgtcagtttctctaccttaacctgtctggaagtgatggcgggcggcgtttcaaaaggccatgcgctggaagctttagagcacagggcggacatcaaaattggcggcgattttgagttccaataccccccgagggacaacacaaacaaccaattacggcattgcgatgatttagtgactaaatttttgacccgcatgtcaccgttggctccgcgcattgggcaatactggttgcaactgcctgccacattcggcccacgggagctgcctgcgctttggcattttctcgattctcttcctggcgaatttaattatggcgtggaagtccgccatccacagtttttcgccaaaggagaagaggaacaaacgcttaatcgcggtttacatcagcgcggcgttaatcgggtgattttagacagccgcccggttcatgcagcacgtccacacagtgaagctattcgcgacgctcaacgaaaaaaacctaaagttccggtacatgctgtactgacggcgacaaatccgctgatccgttttatcggtagtgatgatatgacgcaaaaccgggaattatttcaggtctggttacaaaaattagcgcagtggcatcagaccactacgccttatctttttttacatacgccagacattgcccaggcaccggaactgagatcggagcagttccggctattccacagcaatcttctcttttctgaatttgccacctatcatagacaggtgccatcggccattttaaagggagtttgtatggtaagcgcgctgtacgccgttttaagtgcgttgttattaatgaagttctcttttgatgtcgttcgcctgcgaatgcagtaccgcgttgcctatggcgacggcggttttagcgaactgcaaagcgctattcgcattcatggtaacgcggtggaatatattcccatcgcgattgtgctgatgctgtttatggaaatgaatggcgcagaaacctggatggtgcatatttgcggcatcgttttgcttgctggtcgtctgatgcaatattacgggtttcatcaccgtctgtttcgctggcgacgtttcggcatgagcgctacctggtgtgcgctggtgctgatggtgctggcgaatctttggtatatgccctgggagttggtttctccctggttaatttag

SEQ ID NO: 7050 - DNA, 3519 bp, Homo sapiens
  SIMILAR (712)..(2625): 701254mologous to Homo sapiens putative p150,accession number U93563,Smith-Waterman Score=2109.
atggggaaaaaacagagcagaaaaactgcaaactctaaaaagcagagcacctctcctcctccaaaggaacacagttcctcaccagcaacggaacaaagctggacggagaatgactttgacgagctgagagaagaaggcttcagacgatcaaattactctgagctacgggaggacattcaaaccaaaggcaaagaagttgaaaactttgaaaaaaatttagaagaatgtataactacaataaccaatacagagaagtgcttaaaggagctgatggagctgaaagccaaggctcaagaactacgtgaagaatgcagaagcctcaggagccgatgcaatcaactggaagaaagggtatcagcgatggaagatgaaatgaatgaaatgaagcgagaagggaagtttagagaaaaaagaataaaaagaaatgagcaaagcctccaagaaatatgggactatgtgaaaagaccaaatctacgtctgactggtgtacctgaaagtgatggggagaatggaaccaagttggaaaacactctacaggatattatccaggagaacttccccaatctagcaaggcaggccaacattcagattcaggaaatacagagaatgccacaaagatactcctcgagaagagcaacaccaagacacataattgtcagattcaccaaagttgaaatgaaggaaaaaatgttaagggcagccagagagaaagacagatcaacgagacagaaagtcaacaagaatacccaggaattgaactcagctctccaccaagcggacctaatagacatctacagaactctccaccccaaatcaacagaatatacgtttttttcagcaccacaccacacctattccaaaattggccacatagttggaagtaaagctctcctcagcaaatgtaaaagaacagaaattataacaaactatctctcagaccacagtgcaatcaaactagaactcaggattaagaatctcactcaaaaccgctcaactacatggaaactgaacaacctgctcctgaatgactactgggtacataacgaaatgaaggcagaaataaagatgttctttgaaaccaacgagaacaaagacacaacataccagaatctctgggacacattcaaagcagtgtgtagagggaaatttatagcactaaatgcccacaagagaaagcaggaaagatccaaaattgacaccctaacatcacaattaaaagaactagaaaagcaaaagcaaacacattcaaaagctagcagaaggcaagaaataactaaaatcagagcagaactgaaggaaatagagacacaaaaaacccttcaaaaaattaacgaatccaggagctggttttttgaaaggatcaacaaaattgatagaccgctagcaagactaataaagaaaaaaagagagaagaatcaaatagatgcaataaaaaatgataaaagggatatcaccaccaatcccacagaaatacaaactaccatcagagaatactacaaacacgtctacgcaaataaaccagaaaatctagaagaaatggataaattcctcgacacatacactctcccaagactaaaccaggaagaagttgaatctctgaatagaccaataacaggagctgaaattgtggcaataatcaatagcttaccaacgaaaaagagtccaggaccagatggattcacagccaaattctaccagaggtacaaggaggaactggtaccattccttctgaaactattccaatcaatagaaaaagagggaatccttcctaactcattttatgaggccagcatcatcctgataccaaagccgggcagaaacacaaccaaaaaagagaattttagaccaatatccttgatgaacattgatgcaaaaatcctcaataaaatactggcaaaccgaatccagcagcacatcaaaaagcttatccaccatgatcaagtgggcttcatccctgggatgcaagggctggttcaatatacgcaaatcaataaattgttggaaattctggccaggacaattaggcaggagaaggaaataaagagtattcaattaggaaaagaggaagtcaaattgtccctgtttgcagacgacatgaccgtatatctacaaaaccccattgtctcagctcaaaatctccttaagctgataagcaacttcagcaaagtctcaggatacaaaatcaatgtacaaaaatcacaagcattcttatacaccaacaacagacaaacagagagccaaatcgtgagtgaactcccattcacaattgcttcaaagagaataaaatacctaggaatccaacttacaagggatgtgaaggacctcttcaaggagaactacaaactactgctcaaggaaataaaagaggacacaaacaaatggaagaacattccatgctcatgggtaggaagaatcaatatcgtgaaaatggccatactgcccaaggtaatttacagattcaatgccatccccatcaagctaccaatgactttcttcacagaattggaaaaaactactttaaagttcatatggaaccaaaaaagagcccgcattgccaagtcaatcctgagccaaaagaacaaagctggaggcatcacactacctgacttcaaactatactacaaggctacagtaaccaaaacagcatggtattttagcaaagcagtgctgctgccacctctcaacaccactgctatagtgtctatccacgatgaacaatggaatgctagaaggtcttctcttgctagccacaaagaagcagatgccaccatctgtgtgaccaccaaggtgtggagacgtaggaggcaaaaacggttttgtggactgggccgagggtccctgtgctgtgtgcagcctagggacttggtgccctgtgtcctagccactccagttgtggctgaaagtggccaatgtaaaactcagaccatggcttcagagagtgtactgctgtttcctgactttttaatgattgccattctaactggtgtgagatggtatctcattgtggttttgatttgcatttctctgatggccagtgatggtgttgtggcaccaaatgtagataagatactgtctgatagagaacaagaatttggaatattagcgacagaagaaggaaaaacagaaaaggcagccacgtatacaaggtgcatggatgaaattggaaatcgtcattctcagcaaactatcacaaggacaaaaaaccaaacaccgcatgttctcactcatagatgggaattaaacaatgagaacacatggacacaggaaggggaacatcacactctggggactgttgtggggtggggtgccttctacacagagtggaattgcatggaagttcacactgggcccacgctggcagtgtactggaatgaacacaaccagccaatccaaatttttgctaacaaggtaccagggaaatacaattatgttcacttcagcatcacagaaatggaaggaattcaatttctgcatggaatcccagaaattgaatcccagcatgggagaaagaaataaaac

SEQ ID NO: 7051 - DNA, 2643 bp, Homo sapiens
  SIMILAR (2439)..(2510): 701254mologous to Homo sapiens putative p150,accession number U93564,Smith-Waterman Score=108.
atgagtgaactcccattcacaattgctacaaagagaataaaatacctaggaatacaacttaaaagtgatgtgaaggacctcttcaaggagaactacaaaccactgctcaatgaaataagagaggacacatacaaatggaaaaacactccatgctcatggataggaagaatcaatatcatgaatatggccatactgcccaaagtaatttatggattcaatgctatcctcatcaagctaccattgactttcttcaccgaattagaaaaaactactttaaagttcacacagagcctaaaaagagcccatatagccaagacaatcctaagtaaaaagaacaaagctggaggcatcatgctacctgacttcaaactatactacaaggctacagtaaccaaaacagcatgcactattcacaatagcaaagacttggaaccaaccgaaatgcccagcaatgatacgctggataaagaaaatgtggcatatatacaccatggaatactatgtagccacagcaaaggacgagttcatatcctttgcagggacatggatgaagctggaaaccatcattctcggcaaactaacacaggaacagaaaaccaaacactgcatgttctcactcataagtgggagttgaacgatgagaacacatggacacagggaggggaacatcacatatcggggcctgtcagaaccaacaacaaaaaccacatgattatctcaataggtgcagaaaaggcctttgacaaaattcaacagcctttcatgctaaaaactctcaatcaactaggtattgatggaacatacctcaaaataataagagatatttttgacagacccatagccaatatcttactgaatgggcaaaaacgggaagcatcccctttgaaaactggcacaagacagggatgccctctcccaccactcctattcaacatagtgttggaaattctggccagggcaatcaggcaggagaaagaaataaagggtattcaattaggaaaagaggaagtcaaattgtccctgtttgcagatgacatgattatatatttagaaaaccccattgtctcagcccaaaatctccttaagctgataagcaacttcagcaaagtctcaggatacaaaatcaatgtgcaaaaatcacaagcattcttatacaccaataacagacaaacagagagccaaatcctgagtgaactcccattcacaattgcttcaaagagaataaaatacttaggaattcaacttacaagggatgtgaaggacctcttcaaggagaactacaaaccactgctcaacgagataaaagaggacacaaacaaatggaagaacattccatgcttatcgataggaaaaatcaatatcatgaaaatggccatactgcccaaagtaatttatagattcaatgccatccccatcaagctaccaatgactttcttcacagaattggaaaaaactactttaaagttcatatggaaccaaaaaagagcccgcattgccaagacaatcctaagccaaaagaacaaagatggaggcatcacactacctgacttcaaactatactacaaggctacagtaaccaaaacagcatggtaccagtaccaaaacagagatatagaccaatggaacagaacagagccctcagaaataataccacacgtctacaaccatctgatctttgacaaacctgacaaaaacaagaaatggggaaaggattccctatttaataaatggtgctgggaaaactggctagccatatgtggaaagctgaaactggatccgttccttacaccttatacaaaaattaattcaagatggattaaagacttaaatgttagacctaaaaccataaaaaccctagaagaaaacctaggcaataccattcaggacataggcatgggcaaggacttcatgtctaaaataccaaaagcaatggcaacaaaagccaaaattgacaaatggaatctaattgaactaaagagcttctgcacagcaaaagaaactaccatcagtgtgaacaggcaacctacagaatgggagaaaatttttgcaatctgcttatctgacaaagggctaatatccagaatctacaaagaactcaaacaaagacacaagaaaaaaacaaacaaccccatcaaaaagtgggcgaaggatatgaacagacacttctcaaaagaagacatttatgcagccaacagacacatgaaaaaatgctcatcatcactggccatcagagaaatgccaatcaaaaccacaatgagataccatctcacaccagttagaatggcgatcattaaaaagtcaggaaacaacagatgctggagaggatgtggagaaataggaacgctttcacactgttggtgggactgtaacctagttcaaccattgtggaaggcagtgtggcgattccttaaggatctagaactagaaataccatttgacccagccatctcattactgggttatacccaaaggattataaatcatgctgctataaagacacatgcacacaaagcactttcacatgcagacaacatcttccgctataattgcttcattgaccatctcttagaacttgccaatcaatcttccaaactgccacctctgtccctcaacagacaatgtgagaatatagatattttctga

SEQ ID NO: 7052 - DNA, 2575 bp, Homo sapiens
  SIMILAR (196)..(2280): 981254mologous to Homo sapiens putative p150,accession number U93567,Smith-Waterman Score=3485.
atgtcaagtgaatgggagtggttgaggtgctcagaagttaaaggtcagagagacgtgaggccagggtgtttggggtgggactttcgtgtgtatattgttgaggacacccaggatgaggacagaacttggagtgtcaaggaagcctgtgagctggtccttagagttcaggaaatgatcatcacaagggtggtagatgctgcaccacaccacacctattccaaaattgaccacatagttggaagtaaagctctcctcagcaaatgtaaaagaacagaaattataacaaactgtctctcagaccacagtgcaatcaaactagaactcaggattaagaatctcactcaaagccgctcaactacatggaaactgaacaacctgctcctgaatgactactgggtacataacgaaatgaaggcagaaataaagatgttctttgaaaccaacgagaacaaagacaccacataccagaatctctgggacgcattcaaagcagtgtgtagagggaaatttatagcactaaatgcctacaagagaaagcaggaaagatccaaaattgacaccctaacatcacaattaaaagaactagaaaagcaagagcaaacacattcaaaagctagcagaaggcaagaaataactaaaatcagagcagaactgaaggaaatagagacacaaaaaacccttcaaaaaatcaatgaatccaggagctggttttttgaaaggatcaacaaaattgatagaccgctagcaagactaataaagaaaaaaagagagaagaatcaaatagacgcaataaaaaatgataaaggggatatcaccaccgatcccacagaaatacaaactaccatcagagaatactacaaacaactctacgcaaataaactagaaaatctagaagaaatggatacattcctcgacacatacactctcccaagactaaaccaggaagaagttgaatctctgaatagaccaataacaggctctgaaattgtggcaataatcaatagtttaccaaccaaaaagagtccaggaccagatggattcacagccgaattctaccagaggtacaaggaggaactggtaccattccttctgaaactattccaatcaatagaaaaagagggaatcctccctaactcattttatgaggccagcatcattctgataccaaagccaggcagagacacaaccaaaaaagagaattttagaccaatatccttgatgaacattgatgcaaaaatcctcaataaaatactggcaaaccgaatccaacagcacatcaaaaagcttatccaccatgatcaagtgggcttcatccctgggatgcaaggctggttcaatatacgcaaatcaataaatgtaatccagcatataaacagagccaaagacaaaaaccacatgattatctcaatagatgcagaaaaggcctttgacaaaattcaacaacccttcatgctaaaaactctcaataaattaggtattgatgggacgtatgtcaaaataataagagctatctatgacaaacccacagccaatatcatactgaatgggcaaaaactggaagcattccctttgaaaactggcacaagacagggatgccctctctcaccgctcctattcaacatagtgttggaagttctggccagggcaatcaggcaggagaaggaaataaagggtattcaattaggaaaagaggaagtcaaattgtccctgtttgcagacgacatgattgtttatctagaaaaccccatcgtctcagcccaaaatctccttaagctgataagcaacttcagcaaagtctcaggatacaaaaaaaaaatcaatgtacaaaaatcacaagcattcttatacaccaataacagacaaacagagagccaaatcatgagtaaactcccattcacaattgcttcaaagagaataaaatacctaggaatccaacttacaagggacgtgaaggacctcttcaaggagaactacaaaccactgctcaaggaaataaaagaggatacaaacaaatggaagaacattccatgctcatgggtaggaagaatcaatatcgtgaaaatggccatactgcccaaggtaatttatagattcaatgccatccccatcaagctaccagtgactttcttcacagaattggaaaaaactactttaaagttcatatggaaccaaaaaagagcccgcatagccaagtcaatcctaagccaaaagaacaaagctggaggcatcacactacctgacttcaaactatactacaaggctacagtaaccaaaacagcatgttcccagtcagctcccatggaattaggcttcaggccaatccctgtggactcagggactaggaccatccctgaaccaggcctgaccccatggacccaggcttcaggatggacaccaaagacatgtgcttcaggcttcttcctacagatccagttgacaagtccactctggtggactccagtactaggcttgcaccacaaacccaggattcaggtctacacagaaggcccaagccccaggccagcgcctttagactcagatgccagctctacccacctgctgactcaggcatcag

SEQ ID NO: 7053 - DNA, 1088 bp, Homo sapiens
  SIMILAR (1)..(405): 861254mologous to Homo sapiens putative p150,accession number U93568,Smith-Waterman Score=618.
atgagcaagctcccattcataattgctacaaagagaatagaatacctaggaatacaacttacaagggatgtgaaggacctcttcaaggagaactacaaaccactgctcaacgaaataaaagaggacacaaacaaatggaaaaacattccatgctcatggataggaagaatcaatatcatgaaaatggccatactgcccaaagaaatttatagattcaatgctatccccatcaagctgccactgactttcttcacagaattagaaaaaactacttcaaagttcataaggaaccaaaaaagagcccatatagccaagacaatcctaagcaaaaagaacaaagctggaggcatcacactacctgagttcaaactatactacaaggctacagtaaccaaaacaggatgtgtagggggatctgaccaaaagcgggtgagaaccaccgcccgcaatgccggggaactgggcttaaatctggtgattgccgaagacgcctgtagtgccgccagcgccgagcagcacaataacagtatcaaccatatctacccgcgcatcgcccgtgtgcgtagcgtggaagagatcctcaacgctttccggcgaccatttcgcatcaggcagcattacggccattgcgatgatttagtgactgaatttttgacccgcatgtcaccgttggctccgcgcattgggcaatactggctgcaactgcctgccacattcggcccacgggagctgcctgcgctttggccattttctcgattctcttcctggcgaatttacttatggcgtggaagtccgccatccaccagtttttcgccaaaggagaagaggaacaaacgcttaatcgcggtttacatcagcgcggcgttaatcgggtgattttagacagccgcccggttcatgcagcacgtccacacagtgaagctattcgggacgctcaacgaaacaaacctaaagttccggtacatgctgaactgacggcgacaaatccgctgatccgttttatcggtagtgatgatatgacgcaaaactgcctgtccaaaacaatccttaccctaaaagaacaaacctggagacatcatgctacctga

SEQ ID NO: 7054 - DNA, 3421 bp, Homo sapiens
  SIMILAR (2774)..(2941): 841254mologous to Homo sapiens putative p150,accession number U93568,Smith-Waterman Score=240.
  misc_feature (1)...(3421): n = a,t,c or g
atggggaaaaaacagaacagaaaaactggaaactctaaaacgcagagcgcctctcctcctccaaaggaacgcagttcctcaccagcaacagaacaaagctggatggagaatgattttgacgagctgagagaagaaggcttcagacgatcaaattactctgagctacgggaggacattcaaaccaaaggcaaagaagttgaaaactttgaaaaaaatttagaagaatgtataactagaataaccaatacagagaagtgcttaaaggagctgatggagctgaaaaccaaggctcgaaaactacgtgaagaatgcagaagcctcaggagccgatgcgatcaactggaagaaagggtatcagcaatggaagatgaaatgaatgaaatgaagcgagaagggaagtttagagaaaaaagaataaaaagaaatgagcaaagcctccaagaaatatgggactatgtgaaaagaccaaatctacgtctgattggtgtacctgaaagtgatgtggagaatggaaccaagttggaaaacactctgcaggatattatccaggagaacttccccaatctagcaaggcaggccaacgttcagattcaggaaatacagagaacaccacaaagatactcctcgagaagagcaactccaagacacataattgtcagattcaccaaagttgaaatgaaggaaaaaatgttaagggcagccagagagaaagacagatcaacgagacagaaagtcaacaaggatacccaggaattgaactcagctctgcaccaagcagacctaatagacatctacagaactctccaccccaaatcaacagaatatacatttttttcagcaccacaccacacctattccaaaattgaccacatagttggaagtaaagctctcctcagcaaatgtaaaagaacagaaattataacaaactatctctcagaccacagtgcaatcaaactagaactcaggattaagaatctcactcaaagccgctcaactacatggaaactgaacaacctgctcctgaatgactactgggtacataacgaaatgaaggcagaaataaagatgttctttgaaaccaatgagaacaaagacacaacataccagaatctctgggacgcactcaaagcagtgtgtagagggaaatttatagcactaaatgcccacaagggaaagcaggaaagatctgaaattgacaccctaacatcacaattaaaagaactagaaaagcaagagcaaacacattcaaaagctagcagaaggcaagaaataactaaaatcagagcagaactgaaggaaatagagacacaaaaaacccttcaaaaaatcaatgaatccaggagctggttttttgaaaggatcaacaaaattgatagaccgctagcaagactaataaagaaaaaaagagagaagaatcaaatagacacaataaaaaatgataaaggggatatcaccaccgatcccacagaaatacaaactaccatcagagaatactacaaacacctctacgcaaataaactagaaaatctagaagaaatggatacattccttgacacatacactctcccaagactaaaccaggaagaagttgaatctctgaatcgaccaataacaggctctgaaantgtggcaataatcaatagtttaccaaccaaaaagagtccaggaccagatggattcacagccgaattctaccagaggtacaaggaggaactggtaccattccttctgaaactattccaatcaatagaaaaagagggaatcctccctaactcattttatgaggccagcatcatactgataccaaagccgggcagagacacaaccaaaaaagagaattttagaccaatatccttgatgaacattgatgcaaaaatcctcaataaaatactggcaaaccgaatccagcagcacatcaaaaagcttatccaccatgatcaagtgggcttcatccctgggatgcaaggctggttcaatatacgcaaatcaataaatgtaatccagcatataaacagagccaaagacaaaaaccacatgattatctcaatagatgcagaaaaagcctttgacaaaattcaacaacccttcatgctaaaaactctcaataaattaggtattgatgggacgtatttcaaaataataagagctatctatgacaaacccacagccaatatcatactgaatgggcaaaaactggaagcattccctttgaaaaccggcacaagacagggatgccctctctcaccgctcctattcaacatagtgttggaagttctggccagggcaatcaggcaggagaaggaaataaaggctattcaattaggaaaagaggaagtcaaattgtccctgtttgcagacgacatgattgtttatctagaaaaccccatcgtctcagcccaaaatctccttaagctgataagcaacttcagcaaagtctcaggatacaaaatcagtgtgcaaaatttacaagcattcctgtacaccattaacagacaaacagatagccaaatcgtgagtgaactcccattcacaatggctaaaaagagaataaaatacctaggaatccaacatacaagggatgtgaaggacctcttcaaggagaactacaaaccactgctcaaggaaataaaagaggacacaaacaaatggaagaatattccatgctcatggataggaagaatcagtatcatgaaaatggccatactgcccaaagtaatttatagattcaatgccatccccatcaagctaccaatgactttcttcacagaattggaaaaaaactactttaaagttcatatggaaccaaaaaagagcccgcattgccaagtcaatcctaagacaaaagaacaaagctggaggcatcacactacctgacttcaaactatactacaaggctacggtatccaaaacagcatgtgggtaccagaagcagggagcagacacctcggagcctgcaggggcagtgaggggaaaccttccgaacttcccaagcccccaagagtgcagagatgccaggtccacagccatggcttggctggctgcagctgtgcctaagaagggaaagactcacattctcttgcctaatagtacaaggctagcctcagacattctgggagctggactggagaagcgatgttggggattcaccattcaatatgaactttgtgttcagtacagtctctctccttctttgtgtctggtgtctcagtgtcagactgctgttgtccaagcccccaagcaccgtggacatgttcagtggtgtctgatcccatcggcacagagcttggcttctcaggaggctcctcagagtcgcgtaaatagggtttccgatgcccggcctcaccagcttacagacgtgtctgaatctccttttcactcaggccacacttatattcactcttccctcctgaacattcgttag

SEQ ID NO: 7055 - DNA, 4107 bp, Homo sapiens
  SIMILAR (3585)..(3677): 581254mologous to Homo sapiens putative p150,accession number U93564,Smith-Waterman Score=76.
atggagctgaaaaccaaggctcgagaactacgtgaagaatgcagaagcctcaggagccgacgcaatcaactggaagaaagggtatcagcaatggaagatgaaatgaatgaaatgaagcgagaagggaagtttagagaaaaaagaataaaaagaaatgagcaaagcctccaagaaatatgggactatgtgaaaagaccaaatctacgtctgattggtgtacctgaaagtgatgcggagaatggaaccaagttggaaaacactctgcaggatattatccaggaggacttccccaatctagcaaggcaggccaacgttcagattcaggaaatacagagaacgccacaaagatactcctcgagaagagcaactccaagacacataattgtcagattcaccaaagttgaaatgaagcaaaaaatgttaagggcagccagagagaaagactttaaaccaacaaagatcaaaagagacaaagaaggccattacataatggtaaagggatcaattcaacaagaggagctaactatcctaaatatatatgcacccaatacaggagcacccagattcataaagcaagtcctgagtgacctacaaagagacttagactcccacacattaataatgggagactttaacaccccactgtcaacattagacagatcaacaagacagaaagtcaacaaggatacccaggaattgaactcagctctgcaccaagcagacctaatagacatctacagaactctccaccccaaatcaacagaatatacatttttttcagcaccacaccacacctattccaaaattgaccacatagttggaagtaaagctctcctcagcaaatgtaaaagaacacaaattataacaaactatctctcagaccacagtgcaatcaaactagaactcaggattaagaatctcactcaaagccgctcaactacatggaaactgaacaacctgctcctgaatgtctactgggtacataacgaaatgaaggcagaaataaagatgttctttgaaaccaatgagaacaaagacacaacataccagaatctctgggacacattcaaagcagtgtgtagagggaaatttatagcactaaatgcccacaagagaaagcaggaaagatccaaaattgacaccctaacatcacaattaaaagaactagagaagcaagagcaaacacattcaaaagctagcagaaggcaagaaataactaaaatcagagcagaactgaaggaaatagagacacaaaaaacccttcaaaaactcaatgaatccaggagctggttttttgaaaggatcaacaaaattgatagaccgctagcaagactaataaagaaaaaaagagagaagaatcaaatagacacaataaaaaatgataaaggggatatcaccaccgatcccacagaaatacaaactaccatcagagaatactacaaacacctctacgcatataaactagaaaatctagaagaaatggatacattcctcgacacatacactctcccaagactaaaccaggaagaagttgaatctctgaatagaccaataacaggatctgaaattgtggcaataatcaatagcttaccaaccaaaaagagtccaggaccagatggattcacagccaaattctaccagaggtacaaggaggagctggtaccattccttctgaaactattccaatcaatagaaaaagagggaatcctccctaactcattttatgatgccagcatcattctgataccaaagccgggcagagacacaaccaaaaaagagaattttagaccaatatccttgatgaatattgatgcaaaaatcctcaataaaatactggcaaaccgaatccagcagcacatcaaaaagcttatccaccatgatcaagtgggcttcatccctgggatgcaaggctggttcaatatacgcaaatcaataaatgtaatccagcatataaacagagccaaagacaaaaaccacatgattatctcaatagatgcagaaaaagcctttgacaaaattcaacaacccttcatgctaaaaactctcaataaattaggtattgatgggacgtatttcaaaataataagagctatctatgacaaacccacagccaatatcatactgaatgggcaaagactggaagcattccctttgaaaactggcacaagacagggatgccctctctcaccactcctattcaacatagtgttggaagttctggccagggcaatcaggcaggagaaggaaataaagggtattcaattaggaaaagaggaagtcaaattgtccctgtttgcagacgacatgattgtttatctagaaaaccccatcgtctcagcccaaaatctccttaagctgataagcaacttcagcaaagtctcaggatacaaaatcaatgtacaaaaatcacaagcattcctatacaccaacaacagacaaacagagagccaaatcatgagtgaactcccagttcacaattgcttcaaagagaataaaatacctaggaatccaacttacaagggatgtgaaggacctcttcaaggagaactacaaaccactgctcaaggaaataaaagaggatacaaacaaatggaagaacattccatggctcatgggtaggaagaatcaatatcgtgaaaatggccatacttgcccaaggtaatttacagattcaatgccatccccatcaagctaccaatgactttcttcacagaattggaaaaaactactttaaagttcatatggaaccaaaaaagagcccgcatcgccaagtcaatcctaagcaaaaaggaacaaagctggaggtatcacactacctgacttcaaactatactacaaggctacagtaaccaaaacagcattgtacttgtaccaaaacagagatgtagatcaatggaacagaacagagccctcagaaataatgctgcatatctacaactatctgatctttgacaaacctgacaaaaacaagcaatggggaaaggattccctatgtaataaatggtgctgggaaaactggctagccatatgtagaaacctgaaactggatcccttccttacaccttatacaaaaatcaattcaagatggattaaagacttacatgttagacctaaaaccataaaaaccctagaagaaaacctaggcaatcccattcaggacataggcatgggcaaggacttcatgtctaaaacaccaaaagcaatggcaacaaaagccaaaattgacaaatgggatctaattaaactaaagagcttctgcacagcaaaagaaactaccatcagagtgaacaggcaacctacagaatgggagaaaattttcgcaacctactcatctgacaaagggctaatatccagaatctacaatgaactcaaacaaatttacaagaaaaaaacaaacaaccccatcaacaagtgggtgaaggatatgaacagacacttctcaaaagaagacatttatgcagccaaaaaacacatgaaaaaatgctcatcatcactggccatcagagaaatgcaaatcaaaaccacaatgagataccatctcacaccagttagaatggcaatcattaaaaagtcaggaaacaacaggtgctggagaggatgtggagaaatagattttcagcaaactaacacaggaacagaaaaccaaacgctgcatattctcactcataagtgggagttgaacaatgagaccacacggacacagggaggggaacatcatacactggggcttgtcgaagggtggggggctaggggagggatagcattgggagatatacctaatgcaagatgacgggttagtgcctggttggaatggatcaaatattccatccacacgttaaaaaaaagcaattgttatgcttgtgcacatggcaagccagaggcccagattgtcccctttccactaaggtggtcctccagtcaaccaggtgtgggctgcatggtaacccttttccaggattctacagcctggagtaataagtcatgccaagctctctctgctgtatcccggaagctgactggtccacgcacagccgaagcatgagaaaactcattgcggggactcattttccttaaaattcagacttgtacagtaaggacttattaact

SEQ ID NO: 7056 - DNA, 307 bp, Homo sapiens
  SIMILAR (152)..(286): 971254mologous to Escherichia coli O157:H7 putative pyruvate formate-lyase 2,accession number AE005263,Smith-Waterman Score=234.
tacaaaaggctatgtcattcgattgtaccatgaggccacaacagacacttatagagccacctactacgctggtgatgcttgcagaaacgggtacagtgtttcaccagaatgatgtgaagattccagatgctaaacatgtatttaccacgaaatcgtcgacaccatgctggaagagaacgtgcacgatattctctgctcggcgctggtggatgactgtattgagcgagcgaaaagtatcaagcaaggcggcgcgaaatatgactgggtttctggcctgcaggtcggacgaaatcgtcgacccgggaaa

SEQ ID NO: 7057 - DNA, 943 bp, Homo sapiens
  SIMILAR (258)..(728): 761254mologous to Homo sapiens Similar to hypothetical protein FLJ20533,accession number BC002748,Smith-Waterman Score= 567.
gcggccgccgcgctccgaggtccccgggcctctgtctcccgggcgtcctccagcagcgggccttcggggccggtagccggctggagtacggggccttcgggagccgcgcgccttctccggcgtccgggtcgagcgcagatccctgtttattgggaaggatatgttcgattcttaaatacgccatctgacaaatcagaagatggaaggctaatttatactggcaatatggcccgagcagtgtttggtaagtaattggaggtgtgaaatgtttctcttattctacgagtctgattggccttacatttctgccatacatttttacacaaaataatgctatttctgaaagtgtgcctctgcctattcaaatcatattctatggcatcatgggaagctttacggtgatcaccccagtgctgcttcactttattacaaaaggctatgtcattcgattgtaccatgaggccacaacagacacttataaagccattacctacaatgctatgcttgcagaaacgagtacagtgtttcaccagaatgatgtgaagattccagatgctaaacatgtatttaccacattttaatgctaaaacaaaatcactgttagttaatccagtgctctttccaaaccgtgaagactatatccatctaatgggttatgacaaagaagaatttattttgtatatgggaaggaaaccagtgaagagaaacggccattaaaggtggacaaatggaggcctatttgtttagtgttcgtgctttaaatgtgatttacgttttaatgtataataataaaattgccttttgcattccgttagtgactgattgttaaaaataatttgaaattatcaaagcttttaatttccagagaatgatgtttgtttataataaaacaagctatgtttggaaaccaaaatgtagtatctaccattcgtgttttagaaag

SEQ ID NO: 7058 - DNA, 1398 bp, Homo sapiens
  SIMILAR (693)..(115): 911254mologous to Escherichia coli similar to,accession number D90856,Smith-Waterman Score=920.
ttacttttcacatatattagttgaccgatccttaaactgaggcactataacggcattgcccagaaggggccgtttatgttgccagacagcgctactgattaagcggattttggtccagcgcgtgtgtatttgcaccgataagcccatctcttttgccagatccggacgcgcacctgtggcgtagaactgaatctcatcacgaacagcgccgcctaaaagtttataaaccggaagcccgaccactttgccgaacagatcccacagagccagatcgacacaagaaatcgtattcatcaccaggccaccagagccggagtaatacagggtggcactgagcatttgatcgtggatcagtttgatatcactgacacatttaccctcaatgaaacggttaagatgtttttcgacaataaaacagcccatttcaccggctgtcgaaacggcgaatccggtctggccgttttctgcttcgacttcaacaaccaacgtgccaagaacgttaatgccaaatgactggcgtgactgctcgtaatcgcggtatttactcatcggggtggcaatatgatcgtctatccagtgattcgccccctggtcgtgataatcaccgccgccagcgcctttttctgctgtcgcaccgccagtaaaccaggcgcgaactttggcatcgagcatcagcgttttggcaatttctagcatctgcttgtggctgatagataaattcgccactttctcatctagatcaactttcaagcccacgcgtaataacatcatggcggcgcggacacgcatttctcgccagtcgataatattgacgccacagatttttttcgtcagatgacgaccaatatataaattttccagtacggttaattcatcaataacgctgagttcctggtgaaatacatgcattacacagtgcggacaggcaacatgaaaacgcatgaaatgcccggactcgctggcagcacgctcaatctggcaggtcccctttgtttttggcgttgagccgcgaatagatttgggccagacagacccctcaatacgtttatcacccaggaacgtcggggatccctctttctcaatatcttcatcgaatgccgccagttcatcgtaaccggcgacatcgaccgatttctcacgatagtttttcgccgctttaccacccagacaccagaacccgcgaccgttggagaagcgtttcatactgagcgtattgtcccggtgcttttttccataccagggggccagcgccagaagtgacggaatatcgcgaatcgtcggctcaacatgcgaaattcccttatctggctgcctactgatggtgacgccgaaaacagcatgacgatggcataacgagggatgctggacgcggtacgcgacgacgcaagccaccagcat

SEQ ID NO: 7059 - DNA, 1062 bp, Homo sapiens
  SIMILAR (604)..(1020): 911254mologous to Escherichia coli similar to,accession number D90856,Smith-Waterman Score=704.
tcaaggtccgactctagagtatcccctcgggtcaaactgcggacgcatcgttgaacaatccgggctggtcatcaggaattctttgaatggcgtattggtgaaggtgatcaccgcatggtgagagtaaacagacgaaccgtgcggcaccaccagttgccccctggatttggcgattgcggcaatttccaccagcgtggttaaaccaccgcaccagccaacatccggctgcataatgtcgataccggtttctgaaagcgtacgaaaagattgcagtgtgccgtggtgctcaccgctggtgaccatcattccgactggcgcgttgcgtttcagttcgcgataactttcatactgctgtggcggcaggcactcttcgatccatttcaggttatagggcgcgcaagcgtgggccagtttggtcgcatagttcacgtcctgactcatccagcagtcgagcattaaccagaaatcctcaccgcatttttcacgcatatccgcgaccatagcggcatctttgcggatccccgcatcgccatcatgtggcccccagtgcgtcggcattttgccaccgataaagcccatctcttttgccagatccggacgcgcacgttggttgttgaagtcgaagcagaaaacggccagaccggattcgccgtttcgacagccggtgaaatgggctgttttattgtcgaaaaacatcttaaccgtttcattgagggtaaatgtgtcagtgatatcaaactgatccacgatcaaatgctcagtgccaccctgtattactccggctctggtggcctggtgatgaatacgatttcttgtgtcgatctggctctgtgggatctgttcggcaaagtggtcgggcttccggtttataaagccacaggtgcgcgtccggatctggcaaaagagatgggctttatcggtggcaaaatgccgacgcactgggggccacatgatggcgatgcggggatccgcaaagatgccgctatggtcgcggatatgcgtgaaaaatgcggtgaggatttggtagactaattttatacgaatgatttttcggacaggcat

SEQ ID NO: 7060 - DNA, 657 bp, Homo sapiens
  SIMILAR (163)..(459): 1001254mologous to Homo sapiens cadherin-9,accession number AB035302,Smith-Waterman Score=510.
atggacatagagaatgaaaaattagatagtgaatacttggaaagaacctgtgaagatgttgttttacacagcaaaagtaattttgcagatgtgattaaggttaaaacactgaaacagggaattatccctgattatcaagaactcttcttttctacctctctaaagcttcacactgaccaagataaaggagatggaaatttaaaatacatactaacaggagatggggctggcagtctatttgttatagatgaaaatacaggagacattcatgctgcaaagaaactagacagagaagaaaaatctctgtacattcttcgtgccaaggctatagacagaaaaactgggcggcaggtggaaccggaatcggaatttatcattaaaatacatgatatcaatgacaatgagccaaaatttacaaaagacttatacactgccagtgttcctgaaatgtctggagtcgaactgatgttgaacatcgccatcatgtggcccccagtgcgtcggcattttgccaccgataaagcccatctcttttgccagatccggacgcgcacctgtggcctggtgatgaatacgatttcttgtgtcgatctggctctgtgggatctgttcggcaaagttagaaataaccttagtgggacaaaatataatgaataa

SEQ ID NO: 7061 - DNA, 3705 bp, Homo sapiens
  SIMILAR (116)..(2773): 1001254mologous to Homo sapiens phosphodiesterase,accession number L20965,Smith-Waterman Score=4602.
ggaattcccggccgggcgcacccgcggggccctgggctcgctggcttgcgcgcagctgagcggggtgtaggttggaagggccagggcccctggggcgcaagtgggggccggcgccatggaacccccgaccgtcccctcggaaaggagcctgtctctgtcactgcccgggccccgggagggccaggccaccctgaagcctcccccgcagcacctgtggcggcagcctcggacccccatccgtatccagcagcgcggctactccgacagcgcggagcgcgccgagcgggagcggcagccgcaccggcccatagagcgcgccgatgccatggacaccagcgaccggcccggcctgcgcacgacccgcatgtcctggccctcgtccttccatggcactggcaccggcagcggcggcgcgggcggaggcagcagcaggcgcttcgaggcagagaatgggccgacaccatctcctggccgcagccccctggactcgcaggcgagcccaggactcgtgctgcacgccggggcggccaccagccagcgccgggagtccttcctgtaccgctcagacagcgactatgacatgtcacccaagaccatgtcccggaactcatcggtcaccagcgaggcgcacgctgaagacctcatcgtaacaccatttgctcaggtgctggccagcctccggagcgtccgtagcaacttctcactcctgaccaatgtgcccgttcccagtaacaagcggtccccgctgggcggccccacccctgtctgcaaggccacgctgtcagaagaaacgtgtcagcagttggcccgggagactctggaggagctggactggtgtctggagcagctggagaccatgcagacctatcgctctgtcagcgagatggcctcgcacaagttcaaaaggatgttgaaccgtgagctcacacacctgtcagaaatgagcaggtccggaaaccaggtctcagagtacatttccacaacattcctggacaaacagaatgaagtggagatcccatcacccacgatgaaggaacgagaaaaacagcaagcgccgcgaccaagaccctcccagccgcccccgccccctgtaccacacttacagcccatgtcccaaatcacagggttgaaaaagttgatgcatagtaacagcctgaacaactctaacattccccgatttggggtgaagaccgatcaagaagagctcctggcccaagaactggagaacctgaacaagtggggcctgaacatcttttgcgtgtcggattacgctggaggccgctcactcacctgcatcatgtacatgatattccaggagcgggacctgctgaagaaattccgcatcccggtggacacgatggtgacatacatgctgacgctggaggatcactaccacgctgacgtggcctaccataacagcctgcacgcagctgacgtgctgcagtccacccacgtactgctggccacgcctgcactagatgcagtgttcacggacctggagattctcgccgccctcttcgcggctgccatccacgatgtggatcaccctggggtctccaaccagttcctcatcaacaccaattcggagctggcgctcatgtacaacgatgagtcggtgctcgagaatcaccacctggccgtgggcttcaagctgctgcaggaggacaactgcgacatcttccagaacctcagcaagcgccagcggcagagcctacgcaagatggtcatcgacatggtgctggccacggacatgtccaagcacatgaccctcctggctgacctgaagaccatggtggagaccaagaaagtgaccagctcaggggtcctcctgctagataactactccgaccgcatccaggtcctccggaacatggtgcactgtgccgacctcagcaaccccaccaagccgctggagctgtaccgccagtggacagaccgcatcatggccgagttcttccagcagggtgaccgagagcgcgagcgtggcatggaaatcagccccatgtgtgacaagcacactgcctccgtggagaagtctcaggtgggttttattgactacattgtgcacccattgtgggagacctgggcggaccttgtccacccagatgcccaggagatcttggacactttggaggacaaccgggactggtactacagcgccatccggcagagcccatctccgccacccgaggaggagtcaagggggccaggccacccacccctgcctgacaagttccagtttgagctgacgctggaggaggaagaggaggaagaaatatcaatggcccagataccgtgcacagcccaagaggcattgactgcgcagggattgtcaggagtcgaggaagctctggatgcaaccatagcctgggaggcatccccggcccaggagtcgttggaagttatggcacaggaagcatccctggaggccgagctggaggcagtgtatttgacacagcaggcacagtccacaggcagtgcacctgtggctccggatgagttctcgtcccgggaggaattcgtggttgctgtaagccacagcagcccctctgccctggctcttcaaagcccccttctccctgcttggaggaccctgtctgtttcagagcatgccccgggcctcccgggcctcccctccacggcggccgaggtggaggcccaacgagagcaccaggctgccaagagggcttgcagtgcctgcgcagggacatttggggaggacacatccgcactcccagctcctggtggcggggggtcaggtggagaccctacctgatccccagacctctgtccctgttcccctccactcctcccctcactcccctgctcccccgaccacctcctcctctgcctcaaagactcttgtcctcttgtccctcctgagaaaaaagaaaacgaaaagtggggtttttttctgttttctttttttcccctttccccctgcccccacccacggggcctttttttggaggtgggggctggggaatgaggggctgaggtcccggaaggattttatttttttgaattttaattgtaacatttttagaaaaagaacaaaaaaagaaaaaaaaaagaaagaaacacagcaactgtagatgctcctgttcctggttcccgctttccacttccaaatccctcccctcaccttcccccactgccccccaagttccaggctcagtcttccagccgcctggggagtctctacctgggcccaagcaggtgtggggcctccttctgggcttttcttctgaatttagaggatttctagaacgtggtcaggaatagccattctaggcggggctggggccagggtggggggcagtcactgtgggaggtcccagctccagcccccctctggtttgctgcctcctctcccctctaaaaaagtcttccgcttgattttgcacaatcccggcgatactcctggcgatactgactagaagtcagggagctgggggagctgttcactttaggatacggggggatggaagggagcgttcacaccgccagcctcgggcctgggatttgaggagggccctagacctcctccactctccatcccctttcccttccactttgggttcactttgaattttctccgttttttggggcagtggctctgatccactcacccccccgccccgtaagttatagccactgtggaaagtagtatgaaagttcctcaagaaactaaaaatggaattc

SEQ ID NO: 7062 - DNA, 1016 bp, Homo sapiens
ctttggtttccgggacaaatttccacataaacagtgctgccagaacgcccatacaaccgtaaatccagtaggagaaaccgttgtggaaatgggccaccagccaggagtttttgtccatcatcgggaaggtccaggagacgaagtagttcgccagccactgggccgccaccgcgattgccagcgctttaccacgaatagcattcgggaagatttccgacagcagtacccagcataccggaccccaggacatggcaaaggcggcaacatagaacagcatcgacagtagcgccacaatacccggtgcctgagtgtaaaacgcggtaccgaggctaaacataccgattgccattccgagtgcgccgataatttgcagtggcttacgaccaaatttatccaccgtcataattgccagaacggtgaaagtgaggttgataactccgacaataatggacagtccactcccttttgcctgttctataaaagtcgccgtctgtcgcagccagtaatcttccccggttaaccacgggaaatttttcgggaacgcgggatcagcccaacgccgcattagccaggcaagataataaaccaaacgcatggcgcgtaaaggttcaatcagtccgatttcagcggtgtcgaactcgctaaattcttcataagcttcaataatagtttccagttgcatccgctgctcggctttatcgccattgagcaacatccacaaatcctgaacggctggaccattacgtgcatcatccagatcaacaaacattggaccatcgcgccagaaaatattcccggcgtggcagtctccatgtagccgcagaacggtgaaatcttcccgccagtgtgctggtaacggcggcaatcagctcatctgtcgctttcaggaatgccgctttcaacccggaaggtatcagtgtagcgtcctcaaacagcttgcgtggctcaatgagatattcgttcaaaccgatggtcgggcgatggataaaaagctgtttgcgccccgtctggtgcat

SEQ ID NO: 7063 - DNA, 2853 bp, Homo sapiens
  SIMILAR (768)..(46): 921254mologous to Escherichia coli No definition line found,accession number U00039,Smith-Waterman Score=1135.
  misc_feature (1)...(2853): n = a,t,c or g
ctagcgtaatctccgcatacctttatcgtactctgggaggcacagcttattatgcagaatgatcagatgcttaccatccgggttgcgccctagcgattgctgcatttcgtctaccagcaacatatcatctaccggcttgccacgattacgtggctccgcaccaatctgctcacgataagcaatgttgtccgccatcgtgttgctgtagaaccacatttcgctctgcatagcgtagagggcggggctgaatccaaacagcttcagaacctttttaatgntctgttcttttaatgtgcgctgcggattatcttccgcgcccccctgacgtacaaacatgcaacgcagtacgagtttggttgcggtatcacaggagtaaccacggaacgccgccagatttttctcctgggccagtttcggcgtggtattacgctcatagccgaaaatacccatatggtcccaacgcgtggtttcaccgatgataaacacgacataagtgtcctcaacgttttgcggtgcctgataagtgaatttcttcgccggattaagcaatgaattattatcggaagattcatcgacccgcgcccaggcatacagccccaacgcagaaagcccgtttgatggcagataagagttcgctacgacaccgccataactcggcaaataaacgccggtccgcctctccactttcttctgctggatatccagcaaacgaatccgtgcccaaaacctaatacccgccagtacgacgaacggccagctgcgaatacgccaacgccgcattagccaggcaagataataaaccaaacgcatggcgcgtaaaggttcaatcagtccgatttcagcggtgtcgaactcgctaaattcttcataagcttcaataatagtttccagttgcatccgctgctcggctttatcgccattgagcaacatccacaaatcctgaacggctggaccatggggtgcatcatccagaaaaacaaacattggtttatcgcgccagagaatattcccggcgtggcagtctccatgtagccgcagaacggtgaaatcttctcgccagtgtgctgtaacggcggcaatcagctcatctgtcgctttcaggaatgccgctttcaacccggaaggtatcagtgtagcgtcctcaaacagcttgcgtggctcaatgagatattcgttcaaaccgatggtcgggcgatggataaaaagctgtttgcgccccgtctggtgcatacgccctaaataacgcccaaccgcttccatctgatcgatattatcagcttcgaactggcgaccaccgacgcttggacaaacagcgaaataaaatccctgatgattccataaagtctgacccgtaaaggccacaggtgctgcgaccggaacttcatcatttaccagctggcaacgcaaattcgatgtcttcgaggatttgatcggcttgtcaacgtttccaggcgataaaattttgacgacaaaacgtcgacgatcttcggcctgaaattgattggccacggttttccaaagttggttaacgggggtaagaaccggaattccccccggatttcccatgtgcaaaacagagcggtcccatgatgggtttcccgggtggtaatttccttgaagaccgttgcggggaccgcagaaaagggttcggatttttcgtgtaggtttctcttttttctcttcttccaccaaaagccttgttagagtaatgtcgaactcatactttccttgaggcccttggatatgcatctggtaatttttagtttctgatataccatgagatactgacaactcgcaaccttcttttttggtgggggcctccccggtgggtctgccccctgggaccccccgggtgaggcttgtttgtgggtccttgttcgcctccctggtagaacagtctgggtcatccagtttgttcagttgagaagtttctttgcccccccctttgcgcacaatggtagagcctcgagtggtcgtgtctcggtccattacggaatagcgcaaaccgccgaatgggcagcagagatttgtggtgttggcgcacggaaaatccgcgagctggcggctattttccaccaaaataccatcatgcattttgccaatggtggtaccccacgcggcgttctgcggtgctctcttccatgcaaggcagcttgccgggtggctgccgatgcggtggatatacatcctgttgcccgcattgttgaagcactggaaaaccctggtggcgcatatcaacacaacggtatgaaccgacatttcccggatattcgttttatctggtgggcgggcggtgccaactttactcatcatcaggataccaatcgcctgatacgtgcctggcaaaatgattcctattttagaaaagggcgtataaaagccaaaatgggtccaaaacttttctaaagcttgtttccggatttcaaccagtgcctccagcaccactttccagtcatcaaccacgccaacatctgcctgtggaaataccgcagcgctggcgtcatgattaatcgccaccacaaacttgctattgcgtacgcccgccattaacgctgctgcgccagaagcgccaacaacaatacacacctcaggtgccagcagatgtccggaaataccaatcactttttcagcatcaacgcacacgttcatccatcggggccgactgtatgccacttcggctcccagctttcctgcagcatagcgattcctggtatctgctctccgccgggggctaaaggtccatttggcatcctgggaccggtgaccgttttctaaatcaaattctcgttgggcggcctggtcccaccaaggtgcggggtggggcttgggtaagggtgtgggtttcttccccat

SEQ ID NO: 7064 - DNA, 726 bp, Homo sapiens
  SIMILAR (1)..(378): 891254mologous to Homo sapiens phosphodiesterase,accession number L20965,Smith-Waterman Score=581.
atggaacccccgaccgtcccctcggaaaggagcctgtctctgtcactgcccgggccccgggagggccaggccaccctgaagcctcccccgcagcacctgtggcggcagcctcggacccccatccgtatccagcagcgcggctactccgacagcgcggagcgcgccgagcgggagcggcagccgcaccggcccatagagcgcgccgatgccatggacaccagcgaccggcccggcctgcgcacgacccgcatgtcctggccctcgtccttccatggcactggcaccggcagcggcggcgcgggcggaggcagcagcaggcgggaagcttccgctgaaacccaactggggcccattatgggggccatgcctgcaggttcagcgggatgcggcattgccgaaatgatcatctcccagacccagcgcgaaggattaagcgaggaagcggcgcggcagaaagtctttatggtcgatcgctttggcttgctgactgacaagatctgctcggatcttagcatgcctgcaggtccttggaaacctaatggtccagccgttcaggatttgtggatgttgctcaatggcgataaagccgagcagcggatgcaactggaaactattattgaagcttatgaagaatttagcgagttcgacaccgctgaaatcggactgattgaacctttacgcgccatgcagtcatatggactgggcagccccatatggtccttctaa

SEQ ID NO: 7065 - DNA, 138 bp, Homo sapiens
gatacagctacgcgtcagacactgctcggcaatagcctggtcgttgtagcaccgaaagccagcgtgcagaaagatttcaccatcgacagcaaaaccaactggacttcactgctgaatggcggtcgcctggcggttggc

SEQ ID NO: 7066 - DNA, 381 bp, Homo sapiens
  SIMILAR (381)..(154): 891254mologous to Escherichia coli Orf48,accession number L13279,Smith-Waterman Score=378.
tccttagcagtctgcggtgccgcacggcggaagaagcgtttttcccagccgataatcaacatcagcgcagcaaacaacagcaaatatgtcaccagcaggccacccatcggaccaaaggttttcagcaggttgattttgtcccagtcggtggccaacggcggaaccaaattcttcccagtattacgccagaatcgtgaagccgttcacattgcccagaccgacccaccagtagtgcacctggccttctaccgcgcggtacatccagccggtttcgcagccgccagccagcacgatgccaaaaccaaacagtaaaccaccaattaccgcgtttggtcccgcccacatgattttgggttcaacgcctaactgtacgtaactgaa

SEQ ID NO: 7067 - DNA, 1524 bp, Homo sapiens
  SIMILAR (1)..(1158): 911254mologous to Homo sapiens putative p150,accession number U93572,Smith-Waterman Score=1849.
atgattgtatatctagaaaaccccatcgtctcagcccaaaatctcctcaaactgataggcagcttcagcaaagtctcaggatacaaaatcaatgtacaaaaatcacaggcattcttatacaccaataacagacaaacagagagccaaatcatgagtgaactcccattcacaattgcttcaaagagaataaaatacctaggaatccaacttacaagggatgtgaaggacctcttcaaggagaactacaaaccactgctcaacgaaataaaagaggatacaaagaaatggaagaacattccatgctcatgggtaggaagaatcaatatcgtgaaaatggccatactgcccaaggtaatttatagattcaatgccgtccccatcaagctaccaatgactttcttcacagaattgaaaaaaactactttaaagttcatatggaaccaaaaaagagcccgcatcgccaagtcaatcctaagccaaaagaacaaagctggaggcatcacgctacctgacttcaaactatactacaaggctacagtcaccaaaacagcatgggactggtaccaaaacagagatatagatcaatgcaacagaacagagccctcagaaataacacctcatatctacaactatctgatctgtgacaaacctgagaaaaacaagcaatggggaaaggtttccctatttaataaatggtgctgggaaaactggctagccatatgtagaaagctgaaactggatcccttccttacaccttatacaaaaattaattcaagatggattaaagacttaaatgttagacctaaagccataaaaaccctagaagaaaacctgggcaataccattcaggacataggcatggacaaggacttcatgtctaaaacaccaaaagcaatggcaacaaaagccaaaattgacaaatgggatctaattaaactaaagagcttctgcacagcaaaagaaactaccatcagagtgaacaggcaacctacacaatgggagaaaatttttgcaacctactcatctgacaaagggctaatatccagaatctacaatgcactcagacaaatttacaagaaaaaaacaaacaaccccatcaaaaaggacatggatgaaaccggaaaccaccattctcagcatactatcgcaaggacaaaaaaccaaacaccgcatgttctcactcatggatgggaactgaacaatgagaacacatggacacaggaaggggaacatcacactctggggactgttgtgtggaatcaaaagagccctagtccatcactaatgcagaaacacaagcacaatgctgagggtggaatactcacagagaaacgaccagatagaggttggaaaacaaaagcagccaatgtgactagcatcccttcaaaaactgagagggcatgggggataagacgcaggtggatttcagataatcaaagtcaccctgcatctcctattaagcagcttgaactttatcctgaaggctatgggacccccattaaagctgttaacacaggacagtga

SEQ ID NO: 7068 - DNA, 1521 bp, Homo sapiens
  SIMILAR (813)..(854): 921254mologous to Homo sapiens putative p150,accession number U93563,Smith-Waterman Score=69.
atgtggtacatgcatatgtatgtatggaatactgttcggccattaaaaaggaatgaagtggatccgttccaagatggccgaacaggaacagctctggtctgcagctcccagcatgatcgatgcagaagatgggtgatttctgcgtttccaactgaggatcgcagttcctcgccagcaatggaacaaagctggatggagaatgactttgatgagttgacagaagtaggcttcagaagactaaaccaggcagaagctgaatctctgaatagaccaataacaggctctgaaattgaggcaataataaagcctaccaaccaaaaagagtccaggaccagacggattcacagccaaattctaggagctgtgttggaagttctggccagggcaatcaggcaagagaaagaaataaagggtattcaattaggaaaagaggaagtcaaattgtccctgtttgcagatgacatgattgtatatctagaaaaccccatcgtctcagcccaaaatctccttaaactgataagcaacttcagcaaagtctcaggatacaaaatcaatgtgcaaaaatcacaagcattcctatacaccaataacagacaaacagagagccaaatcatgagtgaactcccattcacaattgcttcaaagagaataaaatacctaggaatccaacttacaagggatgcaaaggacgtcttcaaggagaactacaaaccactgctcaatgaaataaaagaggacacaaacaaatggaagaacattccatgctcatggataggaagaatcaatatcgtgaaaatggccatactgcccaggaattggaaaaaactacttcaaagttcatatggaaccaaaaaagcccgcatcaccaagacaatcctaagcaaaaagaacaaagctggaggcatcacgctacctaacttcaaactatactacaaggctacagtaaccaaaacagcatggtactggtaccaacacagagatatagaccaatggaacagaacagaggcctcagaagtaacaccacacatctacaaccatctgatctttgacaaacctgacaaaaacaagaaatggggaaaggattccctgtttaataaatggtgctgggaaaactggctagccatatgtagaaagctgaaactggatctcttccttacaccttatacaaaaattaatccaaggtggattaaagacttaaatcttagacctagaaccataaaaaccctagaagaaaacctaggcagtatctttagggacataggcatgagcaagggcttcatgactaaaacaccaaaagcaaaggcaacaaaagccaaaacagacaaatgggatctaattaaactaaagagcttctgcacggcaaaagaaactaccatcagagtgaacaggcaacctacagaatgggagaaaatttttgcaatctatccatctgacaaagggctaatatccagaatctataaagaactcaaacgaatttacaagaaaaaaacaaccccatcaaaaagtgggcaaagggtatga

SEQ ID NO: 7069 - DNA, 1497 bp, Homo sapiens
  SIMILAR (724)..(1488): 921254mologous to Homo sapiens putative p150,accession number U93563,Smith-Waterman Score=1210.
atggggaaaaaacagagcaggaaaactggaaactctaaaaagcagagcgcctctcctcctccaaaggaatgcagctcctcaccagcaatggaacaaagctggacagagaatcactttgatgagttgagagaaggcttcagacaacccaactactctgagctaaaggaggaaattcaaaccaatggcaaagaagttaaaaactttgaaaaaaaaatagacaaatggataactagaatgaccaatgcagagaagtccttaaaggagctgatggagctgaaagccaaggctcgagaactacgtgaagaatgcagaagcctcaggagccgatgtgatcaactggaagaaagggtatcagtgatggaagatgaaatgaataaaatgaagttcaacaaaattggcataccactagcaagactaataaagaagaaaagagagaagaatcaaatagacacaataaaaaatgacaaaggggatatcaccaccaatcgcacagaaatacaaactaccatcagagaatactataaacacctctatgcaaataaagtagaaaatctagaagaaatggataaattcctcgacacataccccctcccaagactaaaccaggaagaaattgaatctctgaatagaccaataacaggctctgaaattgtggcaataatcaatagcttaacaaccaaaaagagtccaggaccacatggattcacagccaaattctacaagagaaccaaagacaaaaaccacgtgagtatctcaatagatgcagaaaagacctttgacaaaattcaaaaacccttcatgctaaaaactctcaataaattaggtattgatgggacgtatctcaaaataataacagctatctatgacaaacccacagccaatatcacactgaatgggcaaaaactggaagcattccctttgaaaactggcacaaaacagggatgccctctctcaccactcctattcaacatagtgttggaagttctggcgagggcaattaggcaggagaaggaaataaagggtattcaattaggaaaagaggaagtcaaattgtccctgtttgcagacgacatgattgtatatctagaaaaccccattgtctcagcccaaaatctccttaagctgataagcaacttcagcaaagtctcaggatacaaaaccaatgtacaaaaatcacaagcattcttatacaccaataagagacaatcagagagccaaatcatgagtgaactcccattcacaattgcttcaaagagaataaaatacctaggaatccaacttacaagggacatgaaggacctcttcaaggagaactacaaaccactgctcaatgaaataaaagaggatacaagcaaatggaagaacattccatgctcatggttaggaagaatcaatatggtgaaaatggccatacagcccaaggtaatttatagattcaatgccatccccatcaagctaccaatgactttcttcacagaattggaaaaactactttaa

SEQ ID NO: 7070 - DNA, 1698 bp, Homo sapiens
  SIMILAR (586)..(1677): 921254mologous to Homo sapiens putative p150,accession number U93574,Smith-Waterman Score=1805.
atgatgggagactttaacaccccactgtcaacattagacagatcaatgagacagaaagttaacaaggatatccaggaattgaactcagctctgcaccacatggacctaatagacatctacagaactctccacccaaaatcaacagaatacacattcttctcagctccacaacgcacctattccaaaattgaccacatagttggaagtaaagcactcctcagcaaatgtaaaagaacagaaattataacaaactgtctctcagaccacagtgcaatcaaactagaactcaggattaagaaactcactcaaaaccactcaattacatggaaactgaacaactggctcctgaatgactactgggtacataacgaaatgaaggcagaaataaagatgttctttgaaaccaacgagatcaaagacacaacataccagaatctctgggacacattcaaagcaacactaaaccaggaagaagttgaatctctgaatagaccaataacaggctctgaaattcaggcaatgattaacagcttaggaaccaagaaactccaggaccagacggattcacagccaagttctaccagagatgacatgattgtatatctagaaaaccccatcgtctcagcccaaaatctccttaagctgataagcaacttcagcaaagtctcaggatacaaaatcaatgttcaaaaatcacaagcattcttatacaccaataacagacaaacagagagccaaatcatgagtaaactcccattcacaattgcatcaaagataataaaatacctaggagtccaacttacaagggatgtgaaggaccccttcaaggagaactacaaaccactgctcaacgaaataaaagaggacacaaacaaatggaagaacatcccatgctcatggataggaagaatcaatatcatgaaaatggccatactgcccaaggtaatttatagattcaatgccatccccatcaagctaccaatgactttcttcacagaattggaaaaaagtactctaaagttcatatggaaccaaaaaagagcctgcattgccaggtcaatcctaagccaaaggaacaaagctggaggcatcacactacctgacttcaaactatactacaaggctacagtaaccaaaacagcatggtactggtaccaaaacagagatatagaccaatggaacataacagagccctcagaaacaatgccacatatctaccactatctgatctttgagaaacctgacaaaaacaagaaatggggaaaggattccctatttaacaaatggtgctgggaaaactggctagccacatgtagaaagctgaaactggatcccttccttacaccttatacaaaaattaattcaagatggattaaagacttaaatgttagacctaaaaccataaacaccctagaagaaaacctaggcaataccattcaggacataggcatgggcaaggacttcatgtctaaaacaccaaaagcaatggcaacaaaagccaaaattgacaaatgggatctcattaaactaaagagcttctgcacagcaaaagaaactaccaccagagtgaacaggcaacctacagaatgggagaaaatttttgcaatctactcatctgacaaagggctaatatccagaatctacaaagaactcaaacaaatttacaagaaaaaaacaaccccatcaacaagtgggtga

SEQ ID NO: 7071 - DNA, 1725 bp, Homo sapiens
  SIMILAR (1616)..(1723): 941254mologous to Homo sapiens putative p150,accession number U93563,Smith-Waterman Score=203.
atggagctgaaaaccaaggctcgagaactacgtgaagaatgcagaagcctcaggagccgatgcgatcaactggaagaaagaccaaatctacgtctgattggtgtacctgaaagtgatggggagaatggaaccaagttggaaaacactctgcaggatattatccaggagaacttccccaatctagcaaagcaggtcaacgttcagattcaggaaatacagagaacgccacaaagatactccttgagaagagcaactccaagacacataattgtgagattcaccaaagttgaaatgaaggaaaaaatgttaagggcagccagagagaaaggtcgggttaccctcaaagggaagcccatcagactaacagcggatctctcggcagaaaccctacaagccagaagagagtgggggccaatattcaacattcttaaagaaaagaattttcaacccagaatttcatatccagccaaactaagcttcataagtgaaggagaaataaaatcctttacagacaagcaaatgctgagagattttgtcaccaccaggcctgccttacaagagctcctgaaggaagcactaaacatggaaaggaacaaccggagctggttttttgaaaagatcaacaaaattgatagaccactagcaagagtaataaagaagaaaagagagaagaatcaaatagacgcaataaaaaatgataaagaggatatcaccaccaatcccacagaaatacaaactatcatcagagaatactacaaacacctctacccaaataaactagaaaatctagaagaaatggatacattcctcgacacatacaccttcccaagactaaaccaggaagaagttgaatctctgaatacatcaataacaggctctgaaattgtggcaataatcagtatagcataccaaccaaaaaaagtccaggaccagatggatccacagccgaattctaccagagtgttggaagttctggccagggcaattaggcaggagaaggaaataaagggtattcaattaggaaaagaggaagtcaaattgtccctctttgcagatgacatgattgtatatctagaaaaccccattgtctcagcccaaaatctccttaagctgataagcaacttcagcaaagtctcaggatacaaaatcaatgtacaaaaatcacaagcattcttatacaccaacaacagacaaacagagagccaaatcatgagtgaactcccattcacaattgcttcaaagagaataaaatgcctaggaatccaacttacaagggatgtgaaggacctcttcaaggagaactacaaaccactgctcaaggaaataaaagaggatacaaacaaatggaagaacattccatgctcatgggtaggaagaatcaatatcgtgaaaatggccatactgcccaaggtaatttacagattcaatgccatccccatcaagctaccaatgactttcttcacagatttggaaaaaactactttaaatttcatatggaaccaaaaaagagcccgcatcaccaagtcaatcctaagccaaaagaacaaagccggaggcatcacactacctgacttcaaactatactacacggctacagtaaccaaaacagcatggtactggtaccaaaacagcatggtactggtaccaaaacagagatatagatcaatggaacagaacagagccctcagaaataacgccgcatgtctacaactatctgatctttga

SEQ ID NO: 7072 - DNA, 2481 bp, Homo sapiens; identical to SEQ ID NO: 4454
  SIMILAR (784)..(2460): 861254mologous to Homo sapiens putative p150,accession number U93563,Smith-Waterman Score=2393.

SEQ ID NO: 7073 - DNA, 1746 bp, Homo sapiens
  SIMILAR (418)..(1707): 921254mologous to Homo sapiens putative p150,accession number U93564,Smith-Waterman Score=2077.
atggagacacaaaaaacccttcaaaaaatcaatgaatcaaggagctggttttttgaaaagatcaacaaaattgatagaccgctagcaagactaataaagaaaaaaagagagaagaatcaaatagacacaataaaaaatgataaaggagatatcaccaccgatcccacagaaatacaaactaccatcagagaatactataaacacctctacgcaaataaactagaaaatctagaagaaatggataaattcctcgacacatacaccctcccaagactaaaccaggaagaagctgaatctcttaataaaccaataacaggccctgaaattgaggcaataattaatagcttaccaaccaaaaaaattccaggaccagatggattcacagccgaattctaccagaggtacaaggaggagctgcagcacatcaaaaagcttatccaccatgatcaagtgggcttcatccctgggatgcaaggctggttcaacatacacaaattaataaacgtaatccagtatataaacagaaccaaagacaaaaaccacatgattatctcaatagatgcagaaaaggcctctgacaaaattcaacagcccttcatgctaaaaactctcaataaattaggtattgatgggacatatctcaaaataataagagctatttatgacaaacccacagccaatatcatcctcaatgggcaaaaactggaagcattccctttgaaaactggcacaagacagggatgccttctctcaccactcctattcaatatagtgttggaagttctggccagggcaataagacaggagaaagaaaaaaagtgtattcgattaggaaaagaggaagtcaaattgtccctgtttgcagatgacatgattgtatatctagaaaaccccatcgtctcagcccaaaatctccttaagctgataagcaacttcagcaaagtctcaggatacaaaatcaatgtgcaaaaatcacaagcattcttatacaccaataacagacaaatagagagccaaatcatgagtgaactcccattcacaattgcttcaaagagaatacaatacctagggatccaacttacaagggatgtgaaggacctcttcaaggagaactacaaaccactgctcaacgaaataaaagaggatacaaacaaatggaagaacattccatgctcatggataggaagaatcaatatcatgaaaatggccatgctgcccaaggtaatttatagattcgatgccatccccatcaagctaccaatgactttcttcacagaattggaaaaaactactttaaagttcatatggaaccaaaaaagagcacgcatcgccaagtcaatcctaagccaaaagaacaaagctggaggcatcacactacctgacttcaaactatactacaaggctatagtaaccaaaacagcatggtactggtaccaaaagagagatgtagaccaatggaacagaatagagccctcagaaacaataccacacatctgcaaccatctgatctttgacaaacctgacaaaaacaagcaatggggaaaggattccctatttaataaatggtgctgggaaatctggctagccataggtagaaagcggaaactggatcccttccttacaccttacacaaaaattaattcaagatggattaaagacttcaacattagacctaaaaccataaaaaccctagaagaaagcctaggcaattcaagacataagcatgggcaagaaattcacgtctaa

SEQ ID NO: 7074 - DNA, 1911 bp, Homo sapiens
  SIMILAR (565)..(1284): 921254mologous to Homo sapiens unknown,accession number AF149422,Smith-Waterman Score=1144.
atggctaacaagaataaccaatgcagggaagtccttaaaggacctgatgagctgaaaaccatggcacgagaaccacatgacaaatgcacaagcttcagtagccaatttgatcaactggaagaaagggtatcagcgatggaagatcaaatgaatgaaatgaagcgagaagagaagtttagagaaaaaagaataaaaagaaatgaacaaaggctccaagaaatatgggactatgtgaaaagaccaaatctatgtctgattggtgtacctgaaagtgatggggagaatggaaccaagttggaaaacactctgcaggatattatccaggagaacttccccaacctagcaaggcaggccaacattcaaattcaggaaatacagagaatgccacaaagatactccttgagaagaacaactccaagacacataattgtcagattcaccaaagttgaaatgaaggaaaaaatgttaagggcagccagagagaaaggtcgggttacccacaaagggaagcccatcagactaacagctgatctctcggcagaaactctacaagccagaagagaatcaacaagacagaaagttaacaaagatatccaggaattgaactcagctcagcatcaagcagacctaacagacaactacagaactctccaccccaaatcaacagaatatacactcttctcagcaccacatcacacttattccaaaattgaccacatagttggaagtaaagcactcctcagcaaatgtaaaagaacagaaattataacaaactgtctctcagaccacagtgcaatcaaactagaactgaggattaagaaactcactcaaaacctctcaactacatggaaactgaacaacctgctcctgaatgactactgggtacataacgaaatgaaggcagaaataaagatgctctttgaaaccaatgagaacaaagacacaacataccagaatctctgggacacatttaaagcagtgtgtagagggaaatatatagcactaaatgcacacaagagaaagcaggaaagatctaaaattgacaccctaacgtcacaattaaaagaactagaaaagcaagagcaatcgcattcaaaagctagcagaaggcaagaaataactaagatcagagcagaactgaaggagatagagacacaaaaaactcttcaaaaaatcaatgaatccagggactggttttttgaaaagatcaacaaaattgatagacagctagcaagactaataaagaagaagagagagaagaatcaaatagacacaataaaaaatgtgttggaatttctggccaaggcaattaggcaggacaaggaaataaagggtattcaattaggaaaagaggaagtcaaattgttcctgtttgcagaagacatgattgtatatctagaaaaccccatcgtctcagcccaaaatctccttaagctgataagcaacttcagcaaagtctcaggatacaaaatcaatgtgcagaaatcacaagcattcttatacaccaataacagacaaacagagagccaaatcatgagtgaactcccattcacaattgcttcaaagagaataaaatacctaggaatccaacttacaagggatatgaaggacctcttcaaggagaactataaaccactgctcaacaaaataaaagaggatacaaagaaatggaagaacattccatgctcatgggtaggaagaatcaatatcatgaaaatggccatactgcccaaggtaatttatagattcaatgccatccccatcaagctaccaatgactttcttcacagaattggaaaaaactactttaaagttcacatggaaccaaaaaagagcccgcattgccatgtcaatcctaacccaaaagaacaaaattggaggcatcatgctacctgacttcaaactatactaa

SEQ ID NO: 7075 - DNA, 1497 bp, Homo sapiens
  SIMILAR (634)..(1494): 921254mologous to Homo sapiens putative p150,accession number U93572,Smith-Waterman Score=1361.
atgttctttgaaaccgacgagaacaaagatacaacatatcagaatccctgggacacatttaaagcagtgtgtagagggaaatttatagcactaaatgcccacaagagaaagcaggaaagatctaaaatcgacaacctaacatcacaattaaaagaactacagaatccagagcaaacacattcaaaagctagcagaagacaagaaataactaagatcagagcagaactgaaggagatagagacacaaaaaacccttcaaaaaatcaatgaatccaggagctggtattttgaaaagatcaacaaaattgatagaccactagcaagactaataaagaagaaaagagagaagaatcaaatagatgcaataaaaaatgataaaggggatatcaccactgatcccacagaaatacaaactaccatcacaggatactataaacacatctatgcaaataaactagaaaatctagaagaaatggataaattcctcaacacatacaccctcccaagactaaaccaggaagaacttgaatctctgaatagaccaataacaggctctgaaattgagacaataattaatagcttaccaaccaaaaaaagtccaggatcagatggattcacagccgaattctaccagaggcctggcagagacacaacaaaaaaagagaattttaggccaatattcctgatgaacattgatgtgaaaatcctcaataaaatactagcaaaccaaatccagcagcacatcaaaaagcttatgcaccaagatcaagtgggcttcatccctgggatgcaaggctggtccaacatacacaaatcaataaatgtaattcggcatataaacagaactgaagataaaaaccacatgattatctcactagatgcagaaaaggccttcgacaaaattcaacagcccttcatgctaaaaactctcaataaattaggtattgatgggacatatctcaaaataataagagctatctatgacaaacccacagccaatatcatactgaatgggcaaaaactggaagcattccctttgaaaaccagcacaagacagggatgccctctctcaccactcctattctacatagtgttggaagttctcgccaaggcaatcaggcaggagaaagaaataaaggatattcaattaggaaaagaggaagtcaaattgtccctgtttgcagatgacatgattgtatatctagaaaaccccattgtctcagcccaaaatctccttaaactcataagcaaattcagcaaagtctcaggatacaaaatcaatgtgcaaaaatcacaagcattcttatacaccaataacagacaaacagagagccaaatcatgagtgaactcccattcacaattgcttcaaagagaataaaatacccaggaatccaacttacaagggatgtgaaggacctcttcaaggagaactacaaaccactgctcaacaaaataaaagagaacacaaacaaatggaagaacattccatgctcatga

SEQ ID NO: 7076 - DNA, 1564 bp, Homo sapiens
  SIMILAR (476)..(1561): 941254mologous to Homo sapiens putative p150,accession number U93574,Smith-Waterman Score=1742.
aataaccaatgcagagaagtccttaaaggacctgatggagctgaaaaccatggcacaagaactacgtgacgaatgcacaagcctcagtagccgattcgatcaactggaagaaaaggtatcagtgatggaagatgaaattaatgaaatgaagcaagaagagaaggttagagaaaaaagaataaaaagaaatgaacaaagcctccaagaaatatgggactatgtgaaaagaccaaatctacatctgattggtgtacctgaaagtgacagggagaatggaaccaagttggaaaacactctgcaggatattatccaagagaacttccccaatctagcaaggcaggccaacattcaaattcaggaaatacagagaatgccacaaagatactcctcgagaagagcaactccaagacacataattgtcagattcaccaaagttgaaatgaaggaaaaaatgttaagggcagctagagagaaagaaatacaaactaccatcagagaatactataaacacctctacacaaataaactagaaaatctggaagaaatggataaattcctggacacatacagtctcccaagactaaaccaggaagaagttgaatctctgaagagaccaataacaggctctgaaattggggcaataattaatagcttaccaaccaaaaaaagtccaggaccagatggattcacagccgaattctaccagaggtacaagaaggagctggtaccattccttctgaaactattccaatcaacagaaaaagagagaatcctccctaactcattttatgaggccagcatcatcctgataccaaagcctggcagagacacaacaaaaaaagagaattttagaccaatatccctgatgaacatcaatgcaaaaatcctcaataaaatactggcaaaccaaatccagcagcacatcgaaaagcttatccaccatgatcaagtgggcttcatccctgggatgcaaggctggttcaacatacgcaaatcaataaacgtaatccagcatataaacagaaccaacgagaaaaaccacatgattatctcaatagatgcagaaaaggcctttgacaaaattcaacagcccttcatgctaaaaactctcaataaattaggtattgatgggacgtatctcaaaatagtaagagctatttatgacaaactcacagccaatatcatactgaatgggcaaaaattggaagcattccctttgaaaactggcacaagacagggatgccctctctcaccactcctattcaacatagtgttggaagttctggccagggcaatcaggcaagagaaagaaataaagggtattcaattaggaaaagagcaagtcaaattgtccctgtttgcagatgacatgattgtatatctagaaaaccccatcgtctcagcccaaaatctccttaagctgataagcaacttcagcaaagtctcaggatacaaaatcaatgtgcaaaaatcacaagcattcttatacaccaataacagacaaacagagagccaaatcatgagtgaactcccattcacaattgcttcaaagagaataaaatag

SEQ ID NO: 7077 - DNA, 1569 bp, Homo sapiens; identical to SEQ ID NO: 4267
  SIMILAR (381)..(431): 761254mologous to Homo sapiens putative p150,accession number U93572,Smith-Waterman Score=74.

SEQ ID NO: 7078 - DNA, 1596 bp, Homo sapiens
  SIMILAR (1)..(864): 951254mologous to Homo sapiens putative p150,accession number U93574,Smith-Waterman Score=1413.
atgaacattgatgcaaaaatcctcaataaaatactggcaaaacgaatccagcagcacatcaaaaagcttatccaccatgatcaagtgggcttcatctctgggatgcaaggctggttcaatatacgcaaatcaataaatgtaatccagcatataaacagaaccagagacaaaaaccacatgattgtctcaatagatgcagaaaaagcctttgacaaaattcaacaacccttcatgctaaaaactctcaataaattaggtattgatgggacgtatttcaaaataataagagctatctatgacaaacccacagccaatatcatactgaatgggcaaaaactggaagcattccctttgaaaactggcacaagacagggatgccctctctcaccactcctattcaacatagtgttggaagttctggccagggcaattaggcaggagaaggaaataaagggtattcaattaggaaaagaggaagtcaaattgaccatgtttgcagacaacatgattgtatatctagaaaaccccattgtctcagcccaaaatctccttaagctgataagcaacttcagcaaagtctcaggatacaaaatcaatgtacaaaaatcacaagcattcttatacaccaataacagacaaacagagagccaaatcatgagtgaactcccattcacaattgcttcaaagagaatcaaatacctaggaatccaacttacaagggatgtgaaggacctcttcaaggagaactacaaaccactgctcaaggaagtaaaagaggatacaaacaaatggaagaacattccatgctcatgggtaggaagaaacaatatcgtgaaaatggccacactgcccaagttcatatggaacctaaaaagagcccgcatcgccaagtcaatcataagccaaaagaacaaagctggaggcatcatgctacctgacttcaaactatacgacaaggctacagtaaccaaaacagcatggtactggtaccaaaacagagatatagatcaatgtaacagaacagagccctcagaaataatgccgcgtatctacaactatctgatctttgacaaacctgagaaaaacaagcaatggggaaaggattccctatttaataaatggtggtgggaaaactggctagccatatgtagaaagctgaaactggatcccttccttacaccttatacaaaaatcaattcaagatggattaaagacttaaacgttagacctaaaaccataaaaaccctagaagaaaacctaggcattaccattcaggacataggcatgggcaaggacttcatgtctaaaacaccaaaagcaatggcagcaaaagccaaaattgacaaatgggatctaattaaactaaagagcttctgcacagcaaaagaaactaccatcagagtgaacaggcaacctacaaaatgggagaaaattttcgcaacctactcatctgacaaagggctaatatccagaatctacaatgaactcaaacaaatttacaagaaaaaaacaaacaaccccatcaaaaagtgggcgaaggacatgaacagacacttctcaaaagaagacatttatgcagcccaaaaacacatgtaa

SEQ ID NO: 7079 - DNA, 1520 bp, Homo sapiens
  SIMILAR (151)..(1518): 941254mologous to Homo sapiens putative p150,accession number U93572,Smith-Waterman Score=2256.
atggataaattcctcgacacatacactctcccaagactaaaccaggaagaagtagaatctctgaatagaccaataacaggatctgaaattgtggcaataatcaatagcttaccaaccaaaaagagtccaggaccagatggattcacagccgaattctaccagagggcaataaggcaggagaaggaaataaagggtattcaattaggaaaagaggaagtcaaattgtccctgtttgcagatgacatgattgtatatctagaaaaccccatcgtctcagcccaaaatctccttaagctgataagcaacttcagcaaaatctcaggatacaaaatcaatgtacaaaaatcacaagcattcttatacaccaacaacagacaaacagagagccaaatcatgagtgaactcccattcacaattgcttcaaagagaataaaatacctaggaatccaatttacaagggacgtgaaggacctcttcaaggagaactacaaaccactgctcaaggaaataaaagaggatacaaacaaatggaaggacattccatgctcatgggtaagaagaatcaatatcgtgaaaatggccatactgcccaaggtaatttacagattcaatgccatccccatcaagctaccaatgactttcttcacagaattggaaaaaactactttaaagttcatatggaaccaaaaaagagcccgcatcaccaaatcaatcctaagccaaaagaacaaagctggaggcatcacactacctgacttcaaactatattgcaaggctacagtaaccaaaacagcatggtactggtaccgaaacagagatataggtcaacggaacagaacagagccctcagaaataacgccggatatctacaactatctgatctttgacaaacctgagaaaaacaagcaatggggaaaggattccctatttaataaatggtgctgggaaaattggctagccatatgtagaaagctgaaactggatcccttccttacaccttatacaaaaatcaattcaagatggattaaagacttaaaccttagacctaaaaccataaaaaccctagaagaaaacctaggcattaccattcaggacataggcatgggcaaggacttcatgtctaaaacaccaaaagcaatggcaacaaaagccaaaattgacaaattggatctaattaacctaaagagcttctgcacagcaaaagaaactatcatcagagtaaacaggcaacctacaaaatgggagaaaattttcacaacctactcatctgacaaagggctaatatccagaatctacaatgaactcaaacaaatttacaagaaaaaaacaaacaaccccatcaaaaagtgggcgaaggacatgaacagacacttctcaaaagaagacatttatgcagccaaaaaacacatgaaaaaatgctcatcatcactggccatcagagaaatgcaaatcaaaaccacaatgagataccatctcacaccagttagaatgacgatcattaaaaagtcaggaaacaacag

SEQ ID NO: 7080 - DNA, 2796 bp, Homo sapiens; identical to SEQ ID NO: 6723
  SIMILAR (283)..(1662): 581254mologous to Mus musculus endonuclease/reverse transcriptase,accession number AF016099,Smith-Waterman Score=1421.

SEQ ID NO: 7081 - DNA, 1689 bp, Homo sapiens
atggataaattcctggacacatacaccctcccaagactaaaccaggaagaagttgaatctctgaatagaccaataacaggctctgaaattgtggcaataatcaatagcttaccaaccaaaaagagtccaggaccagatggattcacagccgaattctaccagagccaatatcatactgaatgggcaaaaactggaagcattccctttgaaaaactggcacaagacagttttcaaaggaaaactttgaaacctctatcaccactcctattcaacatagtgttggaagttctggccagggcaattaggcaggagaaggaaataaagggtattcaattaggaaaagaggaaatcaaattgtccctgtttgcagatgacatgattgtatatctagaaaaccccattgtctcagcccaaaacctccttaagctgataagcaacttcagcaaagtctcaggatacaaaatcaatgtacaaaaatcacaagcattcttatacaccaataacagacaaacagagagccaaatcatgagtgaactcccattcacaattgcttcaaagagaataaaatacctaggaatccaacttacaagggatgtgaaggacctcttcaagcagaactacaaaccacggctcaaggaaataaaagaggatacaaacaaatggaagaacattccatgctcatgggtagaaagaatctatatcgtgaaaatggccatactgcccaaggtaatttatagattcagtgccatccccatcaagctaccaatgactttcttcacagaattggaaaaaactactttaaagttcatatggaaccaaaaaagagcccgcatcgccaagtcaatcctaagccaaaagaacaaagctggaggcatcacgctacctgacttcaaactatactataaggatacagtaaccaaaacagcatggtactggtaccaaaacagagatatagatcaatggaacagaacagagccctcagaaataatgccgcatatctacaactatctgatctttgacaaacctgagaaaaacaagcaatggggaaaggattccctatttaataaatggtgctgggaaaactggctagccttatgtagaaagctgaaactgaatcccttccttacaccttacacaaaaattaattcaagatggattaaagacttaaacgttagaccccaaaccataaaaaccctagaagaaaacctaggcattaccattcaggacataggcatgggcaaggacttcaggtctaaaacaccaaaagcaatggcaacaaaagccaaaagtgacaaatgggatctaattaaactaaagagcttctgcacagcaaaagaaactaccatcagaatgaacaggcaacctacaaaatgggagaaaattttcgcaacctactcatctgacaaagggctaatatccagaatctacaatgaactcaaacaaatttacaagaaaaaaacaaacaaccccatcaaaaagtgggcaaaggatattaacagacacttctcaaaagaagacatttatgcagccaaaagacacatgaaaaaatgctcatcatcactggccatcagacaaatgcaaatcaaaaccacaatgagataccatctcacaccagttagaatggcaatcattaaaaagtcaggaaacaacagggacatggatgaaattggaaatcatccttctcagtaa

SEQ ID NO: 7082 - DNA, 3027 bp, Homo sapiens
  SIMILAR (1453)..(2841): 941254mologous to Homo sapiens putative p150,accession number U93564,Smith-Waterman Score=2284.
atgggactggcatgtgattggtatgatgatgatgatgatgataacaatgataataaagaaaacattaacacttactatgtgtcagtacttgcaccacctctcaaaaaattatttaatcttcgtaaccgtcctatgagattgaaactgttactattcccattttcaggtgagaaaaagttagattgctacgatgtttttggaaattttacaatgggttctttgttaagtaacaagtcacagatcttgagaaaacacaatcaccctcccctcaactttttagaatttaatagccaaaagcactctgacatgagggaagcactccatcattatgatgggaagtgtcaggtgcacaagataaatgcaaatttcatggcaccactgcctcattcagccaagttttatgagactgagaaaacttggaaccttatgctgtggggccatttggttggcagggagaagaacagactttatccagcactgtctgttggcagctctggtgctagatttatacaaaagatacacattgcaggagaagttgcctacaaagtcagaacatctggcttcacactagcgcttcttcttggtcacttagtggccttgagcaggggcctgggtataattgtggccaaagtcttgccaaatccaggtaatgaggaatcacaggttctggtgcttaacagggagaaaaaagcagctgcagcctgtgccaccagcactccattgacatcagtaaagaaactccacacctgccggaggcaagaggtgtgcattttgggcctgaagcaaaaccgtacctactggaaactcactggagcctacacagaactgttggttgcaacagtggctgccacaggatatagaaatagaaaagcaagagcaaacacatcaaaagcaagcagaaggcaagaaataacaaaaatcggagcagaactggaggaaatagagacacaaaaaacccttcaaaaaatcaatgaatccaggagctggttttttgaaaagatcaacaaaagtgatagaccactagcaagactaataaagaagaaaagagagaagaatcaaatagacgccataaaaaatgataaaggggatatcaccaccgatcccacagaaatacaaactaccatcagagaatactgtaaacacctctatgcaaataaactagaaaatctagaagaaatgaataaattcctcgacacatacaccctcccaagactaaaccaggaagaagttgaatctctgaatagaccaataacaggctctgaaattgaggcaataatcaatagcttaccaaccaaaaaaagtccaggaccagatggattcacagccgaattctaccagaggtacaaagaggagctgcatataaacagaaccaaagacaaaaaccacatgattatctcaatagatgcagaaaaggcctttgacaaaattcaacaacgcttcatgctaaaaactctcaataaattagtgttggaagttctggccagggcaatcaggcaggagaaggaaataaagggtgttcaattaggaaaagaggaagtcaaattgtccctgtttgcagatgacatgattgtatatctagaaaaccccatcgtctcagcccaaaatctcctcaatctgataagcaacttcagcaaagtctcaggatacaaaatcaatgtacaaaaatcacaagcattcttatacaccaataacagacaaacagagagccaaatcatgagtgaactcccattcacaattgcttcaaagagaataaaatacctaggaatccaacttacaagggatgtgaaggacctcttcaaggagaactacaaaccactgctcaatgaaagaaaagaggatacaaacaaatggaagaacattccatgctcatgggtagaaagaatcaatatcgtgaaaatggccatactgcccaaggtcatttatagattcaatgccatccccatcaagctaccaatgactttcttcacagaattggaaaaaactactttaaagttcatatggaaccaaaaaagagcccgcatcgccaagtcaatcctaagccaaaagaacaaagctggaggcatcacgctacctgacttcaaactatactacaaggctacagtaaccaaaacagcatggtactcgtaccaaaacagagatatagaccaatggaacagaacagagccctcagaaatactgccacgtatctacaactatctgatctttgacaaacctgagaaaaacaagcaatggggaaaggattccctatttaataaatggtgctgggaaaactggctagccatatgtagaaagctgaaactggatcccttccttaaaccttatacaaaaattaagtcaggatggattaaagacttaaatgttagacctaaaaccataaaaaccctagaagaaaacctaggcattaccattcaggacataggcatgggcaaggacttcatgtctaaaacaccaaaagcaatggcaacaaaagcaaaaattgacaaatgggatctaattaaactaaagagcttctgcacagcaaaagaaactaccatcagagtgaaccggcaacctacagaaagggagaaaatttttgcaacctactcatctgacaaagggctaatatccagaatctacaaagaactcaaacaaatttacaagaaaagaacaaacaacctcatcaaaaagtgggtgaaggatatgaacagacacttctcaaaagaagacgtttatgcagccaaaaaacacatgaaaaaatgctcatcatcactggccatcagagaaatgcaaatcaaaaccacaatgagataccatctcacaccagttagaatggcaatcattaaaaagtcaggaaacaacagaataaccattgttctgctccccggttcactaatagtgcggtcatttcacgtaactttaaatgcgattcttcttcatccgggtctcaccctctttagtccgtctgctggccgcagagatatcccaagagtagcattctcctacttggctttttcagctcaaccttctcacaacaccccagttaattaa

SEQ ID NO: 7083 - DNA, 2277 bp, Homo sapiens; identical to SEQ ID NO: 5445
  SIMILAR (182)..(1981): 941254mologous to Homo sapiens putative p150,accession number U93568,Smith-Waterman Score=2911.

SEQ ID NO: 7084 - DNA, 2350 bp, Homo sapiens
tgcaatcaaactagaactcaggattaagaatctcactcaaaaccgctcaactacatggaaactgaacaacctgctcctgaatgactactgggtacatagcgaaatgaaggcagaaataaagatgttctttgaaaccaacgagaacaaagacacaacataccagaatctctgggacacattcgaagcaaaaagcaagagcaaacaacattcaaaagctagcagaaggcaagaaataactaaaatcagagcagaactgaaggaaatagagatacaaaaaacccttcaaaaaattaatgaatccaggagctggttttttgaaaggatcaacaaaattgatagaccactagcaagactaataaagaaaaaaagagagaagaatctaatagacgcaataaaaactgataaaggggatatcaccaccaatcccacagaaatacaaactaccatcagagaatactacaaacacctctacgcaaataaactagaaaatcgagaagaaatggataaattcctcgacacatacactctcccaagactaaacgaggaagaagtcgaatctctgaatacaccaataacaggctcagaaattgtagcaataatcaatagcttaccaaccaaaaagagtccaggaccagatggattcacagccgaattgtaccagaggtacaaggaggaactggtaccattccttctgaaactattccaatcaatagaaaaagagggaatcctccctaactcattttatgaggccagcatcattctgataccaaagccaggcagagacacaaccaaaaaagagaattttagaccaatatcgttgatgaacattgatgcaaaaatcctcaataaaatactggcaaaaggaatccagcagcacatcaaaaagcttatccaccatgatcaagtgggcttcatccctgggatgcaaggccggttcaatatacgcaaatcaataaatgtaatccagcatataaacagaaccaaagacaaaaaccacatgattatctcaatagatgcagaaaaagcctttgacaaaattcaacaaccctttatgctaaaaactctcaataaattaggtattgatgggacgtatttcaaaataataagagctatctatgacaaacccacagccagtatcatactgaatgggcaaaaactagaagcattccgtttgaaaactggcacaagacagggatgccctctctcaccactcctattcaacatagtgtttgaaattctggcccgggcaattaggcaggagaaggaaataaagggtattcaattaggaaaagaggaagtcaaattgtccctgtttgcaggcgacatgattgtatatctagaaaaccccattgtctcagcccaaaatctccttaagctgataagcaacttcagcaaagtctcaggatacaaaatcaatgtgcaaaaatcacaagcattcttatacaccaataacagacaaacagagagccaaatcatgagtgaactcccattcacaattgcttcaaagagaataaaatacctaggaatccaacttacaagggatgtgaaggacctcttcaaggagaactacaaaccactgctcaaggaaataaaagaggatacaaacaaatggaagaacattccatgctcatgggtaggaagaatcaatatcgtgaaaatggccatactgcccaaggtaatttatagattcaatgccatccccatcaagctaccaatgactttcttcacagaattggaaaaaactactttaaagttcatatggaaccaaaaaagagcccgcatcgccaagtcaatcctaagccaaaagaacaaagctggaggcatcacactacctgacttcaaactatactacaaggctacagtaaccaaaacagcatggtactggtaccaaaacagagatatagatcaatggaacagaacagagccctcagaaataacaccgcatatctacaactatctgatctttgacaaacctgagaaaatgagtataatagatacagggggatggtatgaggcaccagtcagttccttcttcaaggagggactatgccgcacaggtactgagaatcaggttaacagacagcctccagctgccagtcccttcaaggtttacgtcagctgcacggggtcacttcaccctaggccacactacttcttggagcatccatatccaagcttcctttctttctcttcaacaagtgctgccactgcagctgatgacattccaggagcttttaatgaattaaagccacatttgcccaaagaagccagcaaagttactgactggtttgagaatagttatgtgtatggtaggataagaagatactcactcaacgatgttgctgtttga

SEQ ID NO: 7085 - DNA, 2205 bp, Homo sapiens
  SIMILAR (247)..(1560): 961254mologous to Homo sapiens unknown protein,accession number M22334,Smith-Waterman Score=2224.
atgccagccataagcaaactgcttctggtgagccttatggaaagctatggagaaaaaggcattcgccagtccaatagctatgtaccaagtttggaacgtgggcacacttgtgttggcagtggcaccagtggccaaggatcaggctcccattacagcagtggcacaagtgtgcaaggcacagctgctcacagaccagccacagagctagggtcaggagcatgggtatgcatgggtgggccatgcccaggaaaagaggaagtcaaattgtccctgtttgcagatgacatgattgtatatctagaaaaccccattgtctcagcccaaaatctccttaagctgataagcaacttcagcaaagtctcaggatacaaaatcaatgtacaaaaatcacaagcattcttatacaccaataacagacaaacagagagccaaatcatgagtgaactcccattcacaattgcttcaaagagaataaaatacctaggaatccaacttacaagggatgtgaaggacctcttcaaggagaactacaaaccactgctcaaggaaataaaagaggatacaaacaaatggaagaacattccatgctcatgggtaggaagaatcaatatcgtgaaaatggccacactgcccaaggcaatttacagattcaatgccatccccatcaagctaccaatgcctttcttcacagaattggaaaaaactactttaaagttcatatggaaccaaaaaagagcccacatcgccaagtcaatcctaagccaaaagaacaaagctggaggcatcacactacctgacttcaaactatactacaaggctacagtaaccaaaacagcatggtactggtaccaaaacagagatatagatcaatggaacagaacagagccctcagaaataaagccgcatatctacaactatctgatatttgacaaacctgagaaaaacgagcaatggggaaaggattccctatttaataaatggtgctgggaaaactggctagccatatgtagaaagctgaaactggatcccttccttacaccttatacaaaaatcaagtcaagatggattaaagacttaaacgttagacccaaaaccataaaaaccctagaagaaaacctaggcattaccattcaggacataggcatgggcaagggcttcatgtccaaaacaccaaaagcaatggcaacaaaagacaaaattcacaaatgggatctaattaaactaaagagcttctgcacagcaaaagaaactaccatcagagtgaacaggcaacgtacaacatgggagaaaattttcgcaacctacttatctgacaaagggctaatatccagcatctacaatgaactcaaacaaatttacaagaaaaaaacaaacgaccccatcaaaaagtgggcgaaggacatgaacagacacttctcaaaagaagacatttatgcagccaaaaaacacatgagaaaatgctcatcatcactggccatcagagaaatgcaaatcaaaaccacaatgagataccatctcacaccagttagaatggcaatcattaaaaagtcaggaaacaacagccagacagtgaagccacagaacaaagctcattttgccaaaatggaccgccaatgtgtccacggcttgtctccccgtttagaacacagcccccgggggcgctcttccccacggtgcgcagaatgctgcctctactcttgcctgcatgctcagacttcaaacggggctgtgaaaataaatctaatgacagagagccaggaattagggaagagaaggaagctgatcagtaaagaggaagagcacacaccgaagctcctagtgctggtgatgaatccagaccccacgcagaaaccgctgagtgtgcaatgtgcctctgtttcctgctgcataagaagggatgatgatagtactgacttcatggatttgttgggagaatttaaggagatgaaacctgcgaggcacctaggacagcacctgacacttaggtttactccagtaatatgggcgcaccttacaactatggccttcgccattccaggggcctgcatcaggagccacactccagcacccacccccacagtacagacagcattgtctattcgagtgatagctgctcataacgacatctccacctcgctatttgtccaggaaggtgctttcagggaggcaaaagatctctcccatggccacgttaacacagtttag

SEQ ID NO: 7086 - DNA, 2826 bp, Homo sapiens
  SIMILAR (670)..(2370): 911254mologous to Homo sapiens putative p150,accession number U93564,Smith-Waterman Score=2737.
atgaaggcagaaataaagatgttctttgaaaccaacgagaacaaagacacaacataccagaatctctgggacacattcaaagcagtgtgcagagggaaatttatagcactaaatgcccacaagagaaagcaggaaagatccaaaattgacaccctaacatcacaattaaaagaactagaaaagcaagagcaaacacattcaaaagctagcagaaggcaagaaataactaaaatcagagcagaactgaaggaaatagagacacaaaaaacccttcaaaaaattaatgaatccaggagctggttttttgaaaggatcaacaaaattggtagaccgctagcaagactaataaagaaaaaaacagagaagaatcaaatagacgcaataaaaaatgataaaggggatatcaccaccgatcccacagaaatacaaactaccatcagagaatactacaaacacctctatgcaaataaactagaaaatctagaagaaatagataaattcctggacacatacactctcccaagactaaaccaggaagaagttgaatctctgaatagaccaataacaggagctgaaattgtggcaataatcaatagcttaccaaccaaaaagagtccaggaccagatggattcacagccgaattctaccagaggtacaaggaggaactgcatataaacagagccaaagacaaaaaccacatgattatctcaatagatgcagaaaaggcctttgacaaaattcaacaacccttcatgctaaaaactctcaataaatcaggtattgatgggacatatttcaaaataataagagctatctatgacaaacccacagccaatatcatactgaatgggcaaaacctggaagcattccctttgaaaactggcacaagacagggatgccctctctcaccactcctattcaacatagtgttggaatttctggccaaggcaattaggcaggagaaggaaataaatggtattcaattaggaaaagaggaagtcaaattgtccctgtttgcagatgacatgattgtatatctagaaaaccccatcgtctcagcccaaaatctccttaagctgataagcaacttcagcaaagtctcaggatacaaaatcaatgtacaaaaatcacaagcactcttatacaccaacaacagacaaacagagagccaaatcatgagtgaactcccattcacaattgcttcaaagagaataaaatacctaggaatccaacttacaagggatgtgaaggacctcttcaaggagtactacaaaccactgctcaaggaaataaaagaggatacaaacaaatggaagaacattccatgctcatgggtaggaagaatcaatatcgtaaaaatggccatactgcccaaggtaatttacagattcaatgccatccccatcaaggtaccaatgactttcttcacagaattggaaaaaactactttaaagttcatatggaaccaaaaaagagcccgcatcgccaagtcaatcctaagccaaaagaacaaagctggaggcatcacactacctgacttcaaactatactacaaggctgcagtaaccaaaacagcatggtactggtaccaaaacagagatatagatcaatggaacagaacagagccctcagaaataacgccacatatctacaactatctgatctttgacaaacctgacaaaaacaagaaatggggaaacaattccctatttaataaatggtgctgggaaaactggctagccatatgtagaaagctgaaactagatcccttccttacaccttatactaaaattaattcaagatggattaaagacttacatgttagacctaaaaccataaaaaccctagaagaaaacctaagcaataccattcaggacataggcatgggcaaggacttcatgtctaaaacaccaaaagcaatggcaacaaaagccaaaattgaccaatgggatctaattaaactaaagagcttctgcacagcaaaggaaactaccatcagagtgaacaggcaacctacagaatgggagaaaatttttgcaacccactcatctgacaaagggctactgtccagaatctacaatgaactcaaacaaatttacaagaaaaaaacagacaaccccatcaacaagtgggcgaaggacatgaacagacacttctcaaaagaagacatttatgcagccaaaagacacatgaaaaaatgctcatcatcactggccatcagagaaatgcaaatcaaaaccacaatgagataccatctcacaccagttagaatggcaatcattaaaaagtcaggaaacaacaggtggaatatatcagaggacccaggtttggctctgtcctgtatcaaggaggcctccatcactgtgccaagcttgcgatgtgctgtgtccattatccagggcatattgagcaactgggtacaaaagatcacaggctcagggtctatgagagcctctgttttcagagaagcctgggcgaagctgaccatttcccttggtgccttcaggacccctgaccctgcttcatccatcctgccatccaaacaagaaaatctctttcaaggctggatgcacagcctcaatgaatcatccatggatccacctcaagtgttgatatgcaccagtgctcatgtccttactcctggagggatttgtagacctctgacctcatccttgtctggaagaaaactcccttcctatcccctttctgtgtcctcaaaggcccttccctccctaccagatgcaggtctgatccttatagattacatcaactcagatcccttctccttaggcttccagttgggtttggccaatgggagatactag

SEQ ID NO: 7087 - DNA, 3834 bp, Homo sapiens
  SIMILAR (1058)..(2785): 851254mologous to Homo sapiens putative p150,accession number U93572,Smith-Waterman Score=2493.
atgacaggatcaaattcacacataacaatattaactttaaatataaatggactaaattctgcaattaaaagacacagacgggcaagttggataaagagtcaagacccatcagtgtgctgtattcaggaaacccatctcacgtgcagagacacacataggctcaaaataaaaggatggaggaagatctaccaagcaaatggaaaacaaaaaaaggcaggggttgcaatcctagtctctgataaaacagactttaaaccaacaaagatcaaaagagacaaagaaggccattacataatggtaaagggatcaattcaacaagaggagctaactatcctaaatatttatgcacccaatacaggagcacccagattcataaagcaagtcctgagtgacctacaaagagacttagactcccacacattaataatgggagactttaacaccccactgtcaacattagacagatcaacgagacagaaagtcaacaaggatacccaggaattgaactcagctctgcaccaagcggacctaatagacatctacagaactctccaccccaaatcaacagaatatacattttttttagcaccacaccacacctattccaaaattgaccacatagttggaagtaaagctctcctcagcaaatgtaaaagaacagaaattataacaaactatctctcagaccacagtgcaatcaaactagaactcaggattaagaatctcactcaaagccgctcaactacatggaaactgaacaacctgctcctgaatgactactgggtacataatgaaatgaaggcagaaataaagatgttctttgaaaccaacgagaacaaagacaccacataccagaatctctgggacgcattcaaagcagtgtgtagagggaaatttatagcactaaatgcctacaagagaaagcaggaaagatccaaaattgacaccctaacatcacaattaaaagaactagaaaagcaagagcaaacacattcaaaagctagcagaaggcaagaaataactaaaatcagagcagaactgaaggaaatagagacacaaaaaacccttcaaaaaatcaatgaatccaggagctggtttttttgaaaggatcaacaaaattgatagaccgctagcaagactaacaaagagaaaaagagagaagaatcaaatacacgcaataaaaaatgataaaggggatatcaccaccgatcccacagaaatacaaactaccatcagagaatactacaaacacctctatgcaaataaactagaaaatctagaagaaatggataaattcctcgacacatacactctcccaagactaaaccaggaagaaattgaatctctgaatagaccaataacaggagctgaaattgtggcaataatcaatagcttaccaaccaaaaagagtccaggaccagatggattcacagctgaattctaccagaggtacaaggaggaactggtaccattccttctgaaactattccaatcaatagaaaaagagggaatcctccctaactcattttatgaggccagcatcaacctgataccaaagccgggcagagacacaaccaaaaaagagaattttagaccaatatccttgatgaacattgatgcaaaaatcctcagtaaaatactggcaaaccgaatccagcagcacatcaaaaagcttatccaccatgatcaagtgggcttcatccctgggatgcaaggctggttcaatatatgcaaatcaataaatgtaatccagcatataaacagaaccaaagacaaaaaccacatgattatctcaatagatgcagaaaaggcctttgacaacattcaacaacccttcatgctaaaaactctcaataaattaagtattgatgggacgtatctcaaaataataagagctatctatgacaagcccacagccaatatcatactaaatgggcaaaaactggaagcattccctttgaaaactggcacaagacagggatgccctctctcaccactgctattcaacatagtgttggaagttctgaccagggcaattaggcaggagaaggaaataaagggtattcaattaggaaaggaggaagtcaaattgtccctgtttgcagacgacatgattgtatatctagaaaacccgattgtctcagcccaaaatctccttaagttgataagcaacttcagcaaagtctcaggatacaaaatcaatgtacaaaaatcacaagcattcttatacaccaataacagacaaacagagagccaaatcatgagtgaactcccattcacaattgcttcaaagagaataaaatacctaggaatccaacttacaagggacgtgaaggacttcttcaaggagaactacaaaccactgctcaatgaaataaaagaggatacaaacaaatggaagaacattccatgctcatgggtaggaagaatcaatatcatgaaaatggccatactgcccaaggtaatttatagattcaatgccatccccatcaagctaccaatgactttcttcacagagttggaaaaaaactactttaaagttcatacggaaccaaaaaagagcctgcattgccaagtcaatcctaagccaaaagaacaaagctggaggcatcgtggctacctgacttcaaactatactacaaggctacagtaaccaaagcagcatggtactggtaccaaaacagagataatagatcaatggaacagaacagagccctcagaaataacgccgcatatctacaactatctgatatttgataaaccagagaaaaacaagcaatggggaataggattccctatttaataaatggtgctgggaaaactggctagccatatgtagaaagctgaaactggagcccttccttacaccttatacaaaaattaattcaagatggattaaagacttaaatgttagacctaaaaccataaaaaccctagaagaaaacctaggcattaccattcaggacataggcataggcaaggacttcatgtctaaaacaccaaaagctatggcaacaaaagacaaaattgacaaatgggatctaattaaactaaagagcttctgcacagcaaaagaaactaccatcagagtgaacaggcaacctacagaatgggagaaaatttttgcaacctactcatctgacaaagggctaatagccagaatctataatgaactcaaacacatttacaagaaaaaaaacaaacaaccccatcaaaaagtgggcgaaggacatgaacagacatttctcaaaagaagacatttatgcagccaaaagacacatgaaaaaatgctcaccatcactggccatcagagaaatgcaaatcaaaaccaaaatgagataccatctcacaccagttagaatggtgatcattaaaaagtcaggaaacaacaggtgctggagaggatgtggagaaataggaacacttttacactgttggtgggactgtaaactagttcaaccattgtggaagtcagtgtggcgattcctcagggatctagaactagaaataccatttgacccagccatcccattactgggtatatacccaaaggactataaatcatgctgctataaagacacatgcacacgtatgtttattgcggcactattcacaatagcaaagacttggaaccaacccaaatgtccaacaatgatagactggattaagaaaatgtggcacatatacaccatggaatactatgcagccataaaaaatgatgagttcatgtcctttgtagggacatggatgaaattggaaaccatcattctcagtaaactatcgcaagaacaaaaaaccaaacaccgcatattctcactcataggtgggaattga

SEQ ID NO: 7088 - DNA, 330 bp, Homo sapiens
  SIMILAR (1)..(306): 981254mologous to Escherichia coli differs from radC sequence in X63366; similar to S. aureus putative 25 kD protein,accession number L10328,Smith-Waterman Score=498.
atgctgaagtttggtattagcgccttaacggatgtcgagctcgtggcgctatttctgcgtaccggaacgcgcggtaaagatgtattaacactggcaaaagagatgctggagaatttcggctctctttatggcttgttaacctctgaatatgaacaatttagtggcgttcatggaattggcgtggcgaaatttgcccagttaaaggggattgctgaactggcgcggcgttactacaacgtgcggatgcgtgaagaaagccctgtactcagcccggagatgacgagggaatttttacaaagccagctcaaaatgctgggactacaggtgtga

SEQ ID NO: 7089 - DNA, 446 bp, Homo sapiens
  SIMILAR (283)..(414): 931254mologous to Escherichia coli RNA polymerase (rpoC),accession number M38305,Smith-Waterman Score=205.
atgataccatttgccgacagcggcggctggatatatggcccacggctgaacgacgacatcggcagatcaaagaacggtgctaacggacgcagaatcgactccagcgggacgaggctcgccaaacggcactggaaactagaaagctcccaagaggcgaatctggaagtcatagaatcagaggacataattcaatctgcgggcaaaggtcgtcaggcgggaagtttcctagtgcaacgtgatttcctgttcttgctcatctatgagtttatttgcaacttcaggctggtcaacaagggtgaagcaatcggtgttatcgcggcacagtccatcggtgaaccgggtacacagctgaccatgcgtacgttccacatcggtggtgcggcatctcgtgcgggtgctgaatccagcatccaaccagaaataagatggaaaccaaaaaccaaagg

SEQ ID NO: 7090 - DNA, 1485 bp, Homo sapiens
  SIMILAR (541)..(1485): 991254mologous to Escherichia coli rpoC,accession number V00339,Smith-Waterman Score=1599.
ttcctctataaattcaggttcagtttgcgggtagaaataacggtactgataatgaatctgtgcgcgggcttcttccgggctgttaaattcccctacgccataccaaccgaacagcgcagcttctgcgacggtcgtttcggcgtcgtcgagaacttttaccggaatatcaagcatattggctttaatctgattccacaatgtgttgcgacttcctccaccgactaacaataattcagaggccttaaagtgcccgattttttccagcatctgtagattgcgctgtaattgcgcagttaacccttccagcgccgcgcgatagaaatgcccccgcgtggtattaagcgtcactccttgccagccagcgttctgacacgacaataaatcacactgcatttttacgccatccgcgccaggcgcgatcagacgagcttcttcaatcaacatttgccagggtgtttcagccgtccagaacagttttctcacccattccagcacgccggatgccagccattgcatacctgcagagcatgcaaggttgacccaatcaccgcgaacttccgtgaaggtctgaacgtactccagtacttcatctccacccacggtgctcgtaaaggtctggcggataccgcactgaaaactgcgaactccggttacctgactcgtcgtctggttgacgtggcgcaggacctggtggttaccgaagacgattgtggtacccatgaaggtatcatgatgactccggttatcgagggtggtgacgttaaagagccgctgcgcgatcgcgtactgggtcgtgtttttgctgaagacgttctgaagccgggtactgctgatatcctcgttccgcgcaacacgctgctgcacgaacagtggtgtgacctgctggaagagaactctgtcgacgcggttaaagtacgttctgttgtatcttgtgacaccgactttggtgtatgtgcgcactgctacggtcgtgacctggcgcgtggccacatcatcaacaagggtgaagcaatcggtgttatcgcggcacagtccatcggtgaaccgggtacacagctgaccatgcgtacgttccacatcggtggtgcggcatctcgtgcggctgctgaatccagcatccaagtgaaaaacaaaggtagcatcaagctcagcaacgtgaagtcggttgtgaactccagcggtaaactggttatcacttcccgtaatactgaactgaaactgatcgacgaattcggtcgtactaaagaaagctacaaagtaccttacggtgcggtactggcgaaaggcgatggcgaacaggttgctggcggcgaaaccgttgcaaactgggacccgcacaccatgccggttatcaccgaagtaagcggttttgtacgctttactgacatgatcgacggccagaccattacgcgtcagaccgacgaactgaccggtctgtcttcgctggtggttctggattccgcagaacgtaccgcaggtggtaaa

SEQ ID NO: 7091 - DNA, 381 bp, Homo sapiens
  SIMILAR (1)..(282): 801254mologous to Escherichia coli high-affinity choline transport protein,accession number U73857,Smith-Waterman Score=391.
atgggggggagggataaatctgtgaaggtcgaagaataccgtcgagatagtggcaaccgcgataccgcaccgcgaccgctggggcttcaggatcggctgggctggccaaaacgtctctggtgcctgatgaattatccgggcacgcgttacactaaacagatgatggcgacggtctgttacccggcactggaagaagtggcgcaggagttgcggttgcgcggctcgtacgtggagctaaaaagcctgacagccggagagggacagcagctgggttatctggatcaggtactggcggctattcatgatcgtgacgtcaacatgggtgtaaccggccatgggctgggtgcaagccactgggccttcgatacagtggtacagtga

SEQ ID NO: 7092 - DNA, 363 bp, Homo sapiens
  SIMILAR (29)..(190): 961254mologous to Plasmid F Protein D,accession number M12987,Smith-Waterman Score=271.
tcacaggtattttattcgcgataagctcatggagcggcgtaaccgtcgcacaggaaggacagagaaagcgcggatctgggaagtgacggacagaacggtcaggacctggattggggaggcggttgccgccgctgctgctgacagtgtgacgttatctgttccggtcacaccacatacgttccgccattcacaaggaataagtacatggttttgctgaaagtcatagggcctacataacttgtacttatatcttttccctgtaactcgcctgggtttagcactgaaagctctgactgcaccgaaatccctttgtcctgtgtaaattatgatgactggccaccttatcttataaatttctcccat

SEQ ID NO: 7093 - DNA, 486 bp, Homo sapiens
  SIMILAR (28)..(384): 711254mologous to Escherichia coli lysine specific permease,accession number M89774,Smith-Waterman Score=393.
atgtgtgaagaatacaatgtgtatactctgatcagaagtacagaagccatctcatgggcacatgtctggtttggtggtctggtaggaaatgttccagtaaagatacttgtcagcctggattatggaacaaagacaacacagaacaaagccagtttcgtggcgtttggtgaagcggaatactggttctcactgatcaaagtcacgacagttattgtctttatcatcgttggcgtgctgatgattatcggtatcttcaaaggcgcgcagcctgcgggctggagcaactggacaatcggcgaagcgccgtttgctggtggttttgcggcgatgatcggcgtagctatgattgtcggcttctctttccagggaaccgagctgatcgggcagcagtgcatgccgcagttgactcttagaggatccccggctgtcttctattatctatgtcatcagctaggcacctttagcagtttcaagtttcttttgtaa

SEQ ID NO: 7094 - DNA, 1263 bp, Homo sapiens
  SIMILAR (646)..(1251): 911254mologous to Escherichia coli RhsC protein precursor,accession number D90709,Smith-Waterman Score=1003.
atggtcgcagtggtacaggcgaatttttcgcgccggtgtgtataccgggtccatctggctttgcatctgcgccaccgccaggccggacgatgccagccagcggcgggtttcctcactcacccggtcagccaggatttcactttccagccggtcgagcatctgcaccagcaccggcgggaacaccacactgccaccgtcttcgccaccggactgctgaagggtatccgccaggctgcggcgctgcgttttcgccagctcaccggtggcggtttcaaccctgatgagtggcgtgaagctccccggctgataaatcgcctggatgcgggttctgtcgttctgtatcggggacaggcgggcgccgtcccagcccgacatccagcccgtgaggtcccgttcacgccgtcatacccgttttgccaccctgcggaccaacgggtcgtaaagatagcgactttcgaccagcggctctgcatattgggtccgcgtgtagtgcaccaaacggtgctgactgtcgtaatggtacccgtgggtgcgctcatcatccgtgcggataaccccttccgggatgagggtataaacggggttaggtcatataggccgagattgcccttttttcccgacgaattcgagctcggtacccgtcagacggtgcattatccgcagacgaatgaactgctctggcagcatgagaccagacatgcgtacaacgcacagggactggcgaaccgctgtataccggacagcctgcccgccgtggaatggctgacctacggcagcggctggctggcaggcatgaaactcgccgacacaccggtggtggagtacacccgcgaccgcctgtaccgggaaacgctgcgcagcttcggccgctatgaactcaccaccgcttatacccctgccgggcagatacagagccagcacctgaacagtctgctgtctgaccgcgagtacacctggaacgacaacggcgaactcatccgcatcagccgcccgcgccagacccggagttacaggtacagtaccaccggcaggctgaccggcgttcacaccaccgcagggaatatggatatccggatcccgaataccacagacccggcaggtaaccgtctgctcgacccggagctgcacccggacagcgccctcagcatagggccggataaccatatcggccgtgacgcgcactatctttaccggtatgaccgtcacggcaggctgacaaagaaaaccgacctcatcccggaaggggttatcccgcacggatga

SEQ ID NO: 7095 - DNA, 894 bp, Homo sapiens
  SIMILAR (277)..(882): 911254mologous to Escherichia coli RhsC protein precursor,accession number D90709,Smith-Waterman Score=1003.
cgacatccagcccgtgaggtcccgttcacgccgtcatacccgttttgccaccctgcggaccaacgggtcgtaaagatagcgactttcgaccagcggctctgcatattgggtccgcgtgtagtgcaccaaacggtgctgactgtcgtaatggtacccgtgggtgcgctcatcatccgtgcggataaccccttccgggatgagggtataaacggggttaggtcatataggccgagattgcccttttttcccgacgaattcgagctcggtacccgtcagacggtgcattatccgcagacgaatgaactgctctggcagcatgagaccagacatgcgtacaacgcacagggactggcgaaccgctgtataccggacagcctgcccgccgtggaatggctgacctacggcagcggctggctggcaggcatgaaactcgccgacacaccggtggtggagtacacccgcgaccgcctgtaccgggaaacgctgcgcagcttcggccgctatgaactcaccaccgcttatacccctgccgggcagatacagagccagcacctgaacagtctgctgtctgaccgcgagtacacctggaacgacaacggcgaactcatccgcatcagccgcccgcgccagacccggagttacaggtacagtaccaccggcaggctgaccggcgttcacaccaccgcagggaatatggatatccggatcccgaataccacagacccggcaggtaaccgtctgctcgacccggagctgcacccggacagcgccctcagcatagggccggataaccatatcggccgtgacgcgcactatctttaccggtatgaccgtcacggcaggctgacaaagaaaaccgacctcatcccggaaggggttatcccgcacggatga

SEQ ID NO: 7096 - DNA, 529 bp, Homo sapiens
  SIMILAR (145)..(68): 651254mologous to Homo sapiens Polypeptide fragment encoded by gene 12,accession number Y01181,Smith-Waterman Score=86.
  misc_feature (1)...(529): n = a,t,c or g
gtagagacagggtctccttgtgtcgcccaggctggtccaaaagggggaaataagaactcctggactcaagcgatcctcccgccttgacctccaaaagtgctgagattacaggcatgagccatcgagcctggcctccgaagccccttctgtatgggtattactccctccatggaggcagagccntcatgactcagtcacttcccaaaaggtcctgcctcttaatatcaccacaattaggattaagtttctgcatgaattttggagggaacacacatttaaaccacagcaccctccttcagcatcttctccattcaacagcacatacttttttaaaaacacgaatcaactgatgtcatgcttctgctcaaaaaactaaaatggcttcgtagcttcctggctgtctgtcacattcggaatataaaccagaacgttcatgactgcttacagcgtcctgcatgagcagactcctagctgtcttcaacatcatttctcctgccactctgcccccgcttcactccacgccggccct

SEQ ID NO: 7097 - DNA, 1917 bp, Homo sapiens
  SIMILAR (814)..(1827): 761254mologous to Homo sapiens gonadotropin inducible transcription repressor-2,accession number AB021642,Smith-Waterman Score=1478.
atgacgaggcgggtcgcagggtggcagggacctacagggccccaaggccagcccgggggacagaggactcccttgccaggtccttgttcattcatcccccccctttgtatgttacagagccagcacctgaacagcctgctgtctgaccgcgattacacctggaacgacaacggcgaactcatccgcatcagcagcccgcgccagacccggagttacagctacagcaccaccggcaggctgaccggcgttcacaccaccgcagcgaatctggatatccgcatcccgtatgccacagacccggcaggtaaccgcctgcccgacccggagctgcacccggacagcaccctcagcatgtggccggataaccgtatcgcccgtgacgcgcactatctttaccggtatgaccgtcacggcaggctgacagagaaaaccgacctcatcccggaaggggttatccgcacggatgatgagcggactcaccgggtggcaaaacgggtgtggcggcgtgaacgggacctgacgggctggatgtcgctgtcacggaaaccgcaagtgacctggtacggctgggacggcgaccggctgaccacaatacagaacgacagaacccgcatccagacgatttatcagccggggagcttcacgccactcatcagagttgaaaccgccaccgtgactggcgaaaacggggatcccatacggcacatcagatctcacactggacacaaaccatatgagtgtcaagattatggagaaaagccgtatagatgtaaggaatgtgggaaggccttcagttatttccagtcatttaaaaaacatgaaagaaatcacagtgaagagaaaccctataaatgtaaacaatgtgggaaacccttcagttatcgtcaatctgttcttagacatgaaaggactcacactggagaaaagccctatgaatgtaaaaaatgtggaaaaaccttcagtactcttacaggtttccaaatacatgaaagaactcacactagagagaaaccctatgaatgtaaggaatgtggaaaagcctttatttaccttgcaagctttcaaagacacatgataatgcacagtggagatggaccttataaatgcgaggagtgtggaaaagcattcagttgtcctagttcatttcaagtacctgaacgaattcacactagagaaaaaccatatgaatgtaaacaatgtgtacatgaaagaactcacactggagagaaaccctgtgaatgtaacgaatgtgggaaagccttcagtgtttccggttcccttcgagtacatgaaagaattcacactggagagaaaccctatacatgtaaacagtgtgggaaagcgttttgtcatcttggaagctttcaaagacacatgataatgcacagtggagatggacctcataaatgtaagatatgtgggaaaggctttgattttcctggttcagcacgaattcatgaaggaactcacactctagagaaaccctatgaatgtaagcaatgtgggaaattgttatctcatcgctcaagctttcgaagacacatgatggcacacactggagatggccctcataaatgcacagtatgtgggaaagcctttgattctcctagtgtatttcaaagacatgaaaggactcacactggagagaaaccctatgaatgcaagcaatgtgggaaagccttccgtacttccagttcccttcgaaaacatgaaacaacacacactggagagcaaccctataaatgtaaatgtggaaaagcttttagtgatttattttcctttcaaagtcatgaaacaacacacagtgaagaggagccttatgaatgtgcctatgcctattggtcaatggaattagaagacatgattagtacagatgacgcctatgtcagagcatttcccttttgttgttgggactga

SEQ ID NO: 7098 - DNA, 2200 bp, Homo sapiens
  SIMILAR (1198)..(1893): 931254mologous to Escherichia coli rhsA,accession number U00039,Smith-Waterman Score=1163.
atgaaactgactactcatcgggaaaacatggcgctgacgaatggtttctgccatcacatagcggcgcagcaaaatctctacaccaatacattgctggctgcgcgcattaagcaaaggctgacagaacaattcgaactcatgttgcgccaggcccagattgatttcgcgggaaaagctcattcgctcactgaagcgcaggccaacaccacccaggtttcagcggagcgcgaccgtctgtttaaaaattatcaacgttacttgaaaggcagccaggcggcggtgaatccgttctcggaacgtgacatcgacgatgcgcggcaaaatttcctcgcgcaggatgcgctggcgcagatccagagccagctggatagcctggttaacggcgagcaatcgcagattgtgagcctgaaagcacagctcgcggaagcaaaatataaccttgagcagacgatagtgcgtgcgccgagcaatggttatgtgacccaggtactgattcgtccgggtacctatgccgcgtcgctgccgctacgtccggtgatggtgtttatacccgatcagaaacgacaaatcgtggcgcagttccgtcagaactccttgctgcgactggctcctggcgacgatgcggaagtggtgtttaatgctctgccaggtaaggtattcagcggtaagctggcagccattagtccagccgttcccggcggagcttatcagtcgaccggcaccttacagacgttaaacacagcgccgggttcagatggcgttatcgcgaccattgaactggatgagcacactgatttgagcgctttaccagacggtatttacgcccagaacccaaaaaatctgaaaattgttgaactgaaagccccgcaactgccgcgttctctggacgacgcgcaaatcgctctggcagttatcaataccacctatgccagccagattggcctgactccggcgaaagacggtatctttgttgaagataaagagtccccgtacgtaaacctgatcgtgacgcgtgaagataacaaagacgccgagaacgtgaagaaattcgtccaggcttatcagtctgacgaaatcccctgtcgaacccgttcaaagcactgcaccccagccgaaagcggagcctgcaaaaccgaaagcgccgcgcgccacgccggtccgaatttataccaatgcagaagaattagatcggcaaaccgttccgcgatctcggtgaagggctggcgaaccccctgtataccggacagcctgcccgccgtggaatggctgacctacggcagcggttacctggcaggcatgaaactcggcgacacaccgctggtggagtacacccgcgaccgcctgcaccgggaaacgctgcgcagcttcggccgttatgaactcaccaccgcttatacccctgccgggcagttacagagccagcacctgaacagcctgctgtctgaccgcgattacacctggaacgacaacggcgaactcatccgcatcagcagcccgcgccagacccggagttacagctacagcaccaccggcaggctgaccggcgttcacaccaccgcagcgaatctggatatccgcatcccgtatgccacagacccggcaggtaaccgcctgcccgacccggagctgcacccggacagcaccctcagcatgtggccggataaccgtatcgcccgtgacgacaactatctttaccggtatgaccgtcacggcaggctgacagagaaaaccgacctcatcccggaaggggttatccgcacggatgatgagcggactcaccggtaccattacgacagtcagcaccggctggtgcactacacgcggacacaatatgaagagccgctggtcgaaagtcgctatctttacgacccgctggggccgcagggtggcaaaacgggtgtggcgacgtgaacgggacctgacgggctggatgtcgctgtcacggaaaccgcaagtgacctggtacggctgggacggcgaccgcctgaccacgatacagaacgacagaacccgcatccagacgatttatcagccggggagcttcacgccactcatcagggttgaaaccgccaccggtgagctggcgaaaacgcagcgccgcagcctggcggatacccttcagcagtccagacggcgaagacggtggcagtgtggtgttcccgccggtgctggtgcagatgctcgaccggctggaaagtga

SEQ ID NO: 7099 - DNA, 1575 bp, Homo sapiens
  SIMILAR (791)..(907): 841254mologous to Vibrio cholerae adenylosuccinate lyase,accession number AE004193,Smith-Waterman Score=178.
atggtttataccaacggtagcccagtgaataccggctttactgagaacgccgatctgtttggctggtttggtattggtcgtccgctgggcgaaccgacgccagtctggatcatggggattgtcttcctcgcggcctggtacatgctgcatcacacgcgtctggggcgttacatctacgcgctgggcggcaacgaagcggcaacgcgtctttctggtatcaacgtcaataaaatcaaaatcatcgtctattctctgtgtggtctgctggcatcgctggccgggatcattgaaatggcgcgtctctcctccgcacaacccacggcggggactggctatgagctggaaaaatggcttcgtagcttcctggctgtctgtcacattcggaatataaaccagaacgttcatgactgcttacagcatctcgccgttcagtatcgcgatatcccgctgctgtctcgtacccacggtcagccagccacgccgtcaaccatcggtaaagagatggcaaacgtcgcctaccgtatggagcgccagtaccgccagcttaaccaggtggagatcctcggcaaaatcaacggcgcgttgactggcatcagtttcagcgaagagttcgtcacctcgctgggtattcagtggaacccgtacaccacccagatcgaaccgcacgactacattgccgaactgtttgattgcgtagcgcgcttcaacactattctgatcgactttgaccgtgacgtctggggttatatcgcccttaaccacttcaaacagaaaaccattgctggtgagattgggttcttccaccatgccgcataaagttaacccgatcgacttcgaaaactccgaagggaatctgggcctttccaacgcggtattgcagcatctggcaagcaaactgccggtttccgtggttcatcagaaccgctgtataccggacagcctgcccgccgtggaatggctgacctacggcagcggctggctgtcaggcatgaaactcggcgacacaccgctggtggagtacacccgcgaccgcctgcaccgggaaacgctgcgcagcttcggccgttatgaactcaccaccgcttatacccctgccgggcagttacagagccagcacctgaacagcctgctgtctgaccgcgattacacctggaacgacaacggcgaactcatccgcatcagcagcccgcgccagacccggagttacagctacagcaccaccggcaggctgaccggcgttcacaccaccgcagcgaatctggatatccgcatcccgtataccacagacccggcaggctccaaaaaggcgggtaaacgcctgggtcgtggtatcggttctggcctcggtaaaaccggtggtcgtggtcacaaaggtcagaagtctcgttctggcggtggcgtacgtcgcggtttcgagggtggtcagatgcctctgtaccgtcgtctgccgaaattcggcttcacttctcgtaaagcagcgattacagccgaaattcgtctgtctgacctggctagagtagaaggcggtgtagtagacctgaacccgctgaaagcggctaacattatcggtatcca

SEQ ID NO: 7100 - DNA, 239 bp, Homo sapiens
  SIMILAR (1)..(237): 941254mologous to Escherichia coli PrkA protein,accession number D90821,Smith-Waterman Score=393.
atggaattcggtgagatgttgaaagcaccgaataaagtgctgcatcccttgataaccgccactcaggaaggtaactacaacgggacggaaggtatctccgccctgccgttcaacgggattattctcgcacactcgaacgagtccgaatgggtcactttccgtaataacaaaaacaacgaagccttcctcgatcgtgtttacatcgtgaaggtgccgtattgcttgcgcatttccgaaga

SEQ ID NO: 7101 - DNA, 735 bp, Homo sapiens
  SIMILAR (274)..(735): 971254mologous to Cloning vector pBACe3.6 levansucrase,accession number U80929,Smith-Waterman Score=778.
tttaatgatgacagcccggaagcgaggaaaataacccgccgctggagaataggtgaagcagcggatttagttggggtttcttctcaggctatcagagatgccgagaaagcagggcgatctaccgccacccggatattggaaattcgaggacgggttgagcaacgtgttggttatacaattgaacaaattaatcatatgcgtgatgtgtttggtacgcgattgcgacgtgctgaagacgtatttccaccggtgatcggggttgctgcccataaggagttaaataatgattacacatcgaaaaaagtaatgaagccgctgatcacttcaaacacggtaactgatgaaatcgagcgcgcgaatgttctcaaaatgaacggcaaatggtacttgttcactgattcacgcggttcaaaaatgacgatcgatggtattaactcaaacgatatttacatgcttggttatgtatcaaactctttaaccggcccttacaagccgctgaacaaaacagggcttgtgctgcaaatggctcttgatccaaacgatgtgacattcacttactctcacttcgcagtgccgcagaccaaaggcaacaatgtggttatcacaagctacatgacaaacagaggcttcttcgaggataaaaaggcaacatttgcgccaagcttcttaatgaacatcaaaggcaataaaacatccgttgtcaaaaacagcatcctggagcaaggacagctgaca

SEQ ID NO: 7102 - DNA, 4371 bp, Homo sapiens
atgaaactcatggaaacacttaaccagtgcataaacgctggtcatgaaatgacgaaggctatcgccattgcacagtttaatgatgacagcccggaagcgaggaaaataacccggcgctggagaataggtgaagcagcggatttagttggggtttcttctcaggctatcagagatgccgagaaagcagggcgactaccgcacccggatatggaaattcgaggacgggttgagcaacgtgttggttatacaattgaacaaattaatcatatgcgtgatgtgtttggtacgcgattgcgacgtgctgaagacgtatttccaccggtgatcggggttgctgcccataaaggtggcgtttacaaaacctcagtttctgttcatcttgctcaggatctggctctgaaggggctacgtgttttgctcgtggaaggtaacgacccccagggaacagcctcaatgtatcacggatgggtaccagatcttcatattcatgcagaagacactctcctgcctttctatcttggggaaaaggacgatgtcacttatgcaataaagcccacttgctggccggggcttgacattattccttcctgtctggctctgcaccgtattgaaactgagttaatgggcaaatttgatgaaggtaaactgcccaccgatccacacctgatgctccgactggccattgaaactgttgctcatgactatgatgtcatagttattgacagcgcgcctaacctgggtatcggcacgattaatgtcgtatgtgctgctgatgtgctgattgttcccacgcctgctgagttgtttgactacacctccgcactgcagtttttcgatatgcttcgtgatctgctcaagaacgttgatcttaaagggttcgagcctgatgatttagccatattgttccatgtgactgcagttcatatgttttcactggaaggtattgaaaaccttccctttgaattacagagaaactttcagctcatgagggacctagaccaaagaacagagggtgttaaacgggctaccaggaaaaatgaaaattttggatgttccccggcgtcgagcttctcccatcttagagaacgtagggatccgggttttagtcacgacccaggagatcagcgtcaagaagcgcaaaatttagcgaaagccgttcagacagcattgcagcacagcattcgagaaataggtctgcgtttgatgcgatcgaaaaatgatgggatgagtcagaaggatatcgcagccaaagaagggctgtctcaggcgaaggtcacgcgtgctctccaggcagcgagtgctccggaagaattagtcgcccttttccctgtgcagtcggaattaaccttttcggactacaaaacgctttgtgctgttggcgacgaaatggggaacaagaatttagagtttgatcagcttattcaaaacatatccccggaaataaacgacatcttatccattgaagaaatggccgaagatgaagttaaaaataaaatcctgcgcttgataacaaaggaagcctcactactcacggataaaggttctaaagataagtccgtagttactgaattatggaaatttgaggacaaggatcgctttgcaaggaagcgcgtgaaaggccgtgcattttcttatgagtttaatcgactctcaaaagagaagagtaaattgagtaacttacgcgaataccagaatcgtattgcaggtatcgcaaaacgctctaaagctgtgcttggctgggcaagcactgcgcagttcggtactgataaccaattcattaaagatgatgccgcgcgtgccgcatctatccttgaagctgcacgtaaagacccggtttttgcgggtatctctgataatgccaccgctcaaatcgctacagcgtgggcaagtgcactggctgactacgccgcagcacataaatctatgccgcgtccggaaattctggcctcctgccaccagacgctggaaaactgcctgatagagtccacccgcaatagcatggatgccactaataaagcgatgctggaatctgtcgcagcagagatgatgagcgtttctgacggtgttatgcgtctgcctttattcctcgcgatgatcctgcctgttcagttgggggcagctaccgctgatgcgtgtaccttcattccggttacgcgtgaccagtccgacatctatgaagtctttaacgtggcaggttcatcttttggttcttatgctgctggtgatgttctggacatgcaatccgtcggtgtgtacagccagttacgtcgccgctatgtgctggtggcaagctccgatggcaccagcaaaaccgcaaccttcaagatggaagacttcgaaggccagaatgtaccaatccgaaaaggtcgcactaacatctacgttaaccgtattaagtctgttgttgataacggttccggcagcctacttcactcgtttactaatgctgctggtgagcaaatcactgttacctgctctctgaactacaacattggtcagattgccctgtcgttctccaaagcgccggataaaggcactgagatcgcaattgagacggaaatcaatattgaagccgctcctgagctgatcccgctgatcaaccacgaaatgaagaaatacaccctgttcccaagtcagttcgttatcgcggctgagcacacgttccgcaccctgaaggaatacctgtctcatgaacaggatatgctgcgtcttcgcatcatgatctggcgcactcttgcgaccgacacctttgacatcgctctgccggttaaccagtcctttgatgtatgggcaaccatcattcgtggcaaattccagactgtatatcgcgacattattgagcgcgttaaatcttctggtgcgatggggatgtttgctggtgctgatgcagcatctttctttcaacagttgccgaagatttcttccagccagccgaagactatatccagactccatctgctcttcttgcctaattttcttaagctgaccgatactttcctggaaacgattgaggaaaatggtgtggtcctgggtattcatgacactgcccacaagggctcactggcctggctggcatttctactagcgtgtttcttgggggaagggtcctcctttgctaaaacagcgcgttatgaaactgtaggcaaagggttactattactgctcgtgactgccggagaagtcagaattgtaagtgagcacaccttctctgcagcagctacaagctcccacctgatgtgtcttttcaacctttgtcaagtatctcaaggcaagaatgtcctgaagcccttcccccaaatagaagctttggtccgagcccccaacccgcaggagcatcaagaggaggccaaggagacagacaccgcagactctctctgcaaacttgacctgggcatcgcacggactcgcgttcgcatccgaagaccccacacgtcccccgcactgtccccacagcatcccacgcccgcggtgcacgctcacctgccggtagacgagccacacgcctcggcggtccagacttccgtgtcgacctccgtgggcgagcctacgcgctgggtgcccggcgcgccctcaggagtggctgggaccgcgggctggcgccgggcagggcggttgaaggccgtggcgacggaactgttgcccatgaatggctcgctgtggagcacgcaggctcgtatctctcccgcgttcctgctgaaggtaaaccagacattaatggactatcgaaccggaagagtacaacctgctattccgcagagtctccctgaagctctccgtttggctgccgacctggcagagcaaaagcaacggctggagcaaaaaatgcttatggatgcacctaaagtcgaattcgctgaacgcgttgctaccgccagcggggttctaatcggcaactatgccaaagtgctcggcctgggccaaaactatctcttcacctggttgcgtgataacggaattctgatcgcaaccggtgaacgcaggaacgtccccaaacaggattccatatctcacgccgggcatatcctgtcgcaatgtgcaaatctcgcggcaacaaccagtgaatacttcattcacaagcctcaccgcctgatcgcggcagaaactggttatagccaatcaaccgtcgttcgtgcattccgtgaagctgtaaacaaaggaattctgtctgtagagattgttatcggcgatcaccgtgaacgtcgcgctaacctgtaccggtttacaccatcctttttggccttcgcacaacaagccaaaaatgcgctgatagaaagcaaattaaagatctcttcagcggcaaccaagagcaaagtgaccgcctgggaagccagagctagagggcactactatcacaaaggggactcaagataa

SEQ ID NO: 7103 - DNA, 1455 bp, Homo sapiens
  SIMILAR (322)..(810): 1001254mologous to Cloning vector pZC320 SopA,accession number U26464,Smith-Waterman Score=862.
atgacactcatggaaacacttaaccagtgcataaacgctggtcatgaaatgacgaaggctatcgccattgcacagtttaatgatgacagcccggaagcgaggaaaataacccggcgctggagaataggtgaagcagcggatttagttggggtttcttctcaggctatcagagatgccgagaaagcagggcgactaccgcacccggatatggaaattcgaggacgggttgagcaacgtgttggttatacaattgaacaaattaatcatatgcgtgatgtgtttggtacgcgattgcgacgtgctgaagacgtatttccaccggatctggctctgaaggggctacgtgttttgctcgtggaaggtaacgacccccagggaacagcctcaatgtatcacggatgggtaccagatcttcatattcatgcagaagacactctcctgcctttctatcttggggaaaaggacgatgtcacttatgcaataaagcccacttgctggccggggcttgacattattccttcctgtctggctctgcaccgtattgaaactgagttaatgggcaaatttgatgaaggtaaactgcccaccgatccacacctgatgctccgactggccattgaaactgttgctcatgactatgatgtcatagttattgacagcgcgcctaacctgggtatcggcacgattaatgtcgtatgtgctgctgatgtgctgattgttcccacgcctgctgagttgtttgactacacctccgcactgcagtttttcgatatgcttcgtgatctgctcaagaacgttgatcttaaagggcaattatacatccggcgacaaccatacgctgagagacctcactacgttgaagacaaaggccataaataccttgtattcgaagccaacacgggaacagaaaacggataccaaggcgaagaatctttatttaacaaagcgtactacggcggcggcacgaacttcttccgtaaagaaagccagaagcttcagcagagcgctaaaaaacgcgatgctgagttagcgaacggcgccctcggtatcatagagttaaataatgattacacattgaaaaaagtaatgaagccgctgatcacttcaaacacggtaactgatgaaatcgagcgcgcgaatgttttcaaaatgaacggcaaatggtacttgttcactgattcacgcggttcaaaaatgacgatcgatggtattaactcaaacgatatttacatgcttggttatgtatcaaactctttaaccggcccttacaagccgctgaacaaaacagggcttgtgctgcaaatggtcttgatcccaaacgatgtgacattcacttactctccacttcgcagtgcctcaagccaaagggaacaatgtgggtatccaccaagctacattgacaaaccagaggcttcttcgagattaaaaaggcaacatttgcgccaagcttcttaa

SEQ ID NO: 7104 - DNA, 519 bp, Homo sapiens
  SIMILAR (1)..(345): 921254mologous to Cloning vector pZC320 SopA,accession number U26464,Smith-Waterman Score=541.
atgaaactcatgggaacacttaaccagtgcataaacgctggtcatgaaatgacgaaggctatcgccattgcacagtttaatgatgacagccctgtttcgaggaaaataacccggcgctggagaataagtgaagcaacggatttagttggggtttcttctcaggctatcagagatgccgagaaagcagggcgactaccgcacccggatatggaaaattcaggacgggttgagcaacgtgttggttttacaattgaacaaattaatcatatgcgtgatgtgtttggtacgccattgcgacgtgctgaagacgtatttccaccggtgatcggggttgctgcccataaaagtcggcgacaactcaatcgacagctggaaaaacgcgggccgtgtccttttgacaggggtgggttcgacgccaacgatccgatcctgaaagatcacacgcaagaatggtccggttctgcaacctttacatctgacggtaaaatccgtttattctacactgactattccggttaa

SEQ ID NO: 7105 - DNA, 743 bp, Homo sapiens
  SIMILAR (1)..(591): 991254mologous to Cloning vector pZC320 SopA,accession number U26464,Smith-Waterman Score=1030.
atgacgaaggctatcgccattgcacagtttaatgatgacagcccggaagcgaggaaaataacccggcgctggagaataggtgaagcagcggatttagttggggtttcttctcaggctatcagagatgccgagaaagcagggcgactaccgcacccggatatggaaattcgaggacgggttgagcaacgtgttggttatacaattgaacaaattaatcatatgcgtgatgtgtttggtacgcgattgcgacgtgctgaagacgtatttccaccggtgatcggggttgctgcccataaaggtggcgtttacaaaacctcagtttctgttcatcttgctcaggatctggctctgaaggggctacgtgttttgctcgtggaaggtaacgacccccagggaacagcctcaatgtatcacggatgggtaccagatcttcatattcatgcagaagacactctcctgcctttctatcttggggaaaagaacgatgtcacttatgcaataaagcccacttgctggccggggcttgacattattccttcctgtctggctctgcaccgtattgaaactgagttaatgggcaaatttgatgaagaggctacccaaatgagaaggaaccagaaaacaaaccctggtaatatgacagaacaaggctcatcaacaccccacaacaatcacactagttcaccagcaatggatccaaaccaagaagaaatccctgatttacctgaaaaagaatccaggag

SEQ ID NO: 7106 - DNA, 1746 bp, Homo sapiens
  SIMILAR (784)..(1743): 911254mologous to Cloning vector pZC320 SopB,accession number U26464,Smith-Waterman Score=1425.
atgacagcccggaaagcgaggaaaataacccggcgctggagaataggtgaagcagcggatttagttggggtttcttctcaggctatcagagatgccgagaaagcagggcgactaccgcacccggatatggaaattcgaggacgggttgagcaacgtgttggttatacaattgaacaaattaatcatatgcgtgatgtgtttggtacgcgattgcgacgtgctgaagacgtatttccaccggtgatcggggttgctgcccataaaggtaacgacccccagggaacagcctcaatgtatcacggatgggtaccagatcttcatattcatgcagaagacactctcctgcctttctatcttggggaaaaggacgatgtcacttatgcaataaagcccacttgctggccggggcttgacattattccttcctgtctggctctgcaccgtattgaaactgagttaatgggcaaatttgatgaagcgcagcctaacctgggtatcggcacgattaatgtcgtatgtgctgctgatgtgctgattgttcccacgcctgctgagttgtttgactacacctccgcactgcagtttttcgatatgcttcgtgatctgctcaagaacgttgatcttaaagggttcgagcctgatgtacgtattttgcttaccaaatacagcaatagtaatggctctcagtccccgtggatggaggagcaaattcgggatgcctggggaagcatggttctaaaaaatgttgtacgtgaaacggatgaagttggtaaaggtcagatccggatgagaactgtttttgaacaggccattgatcaacgctcttcaactgatacttcgttatcgacaccagctgccccgatggtggattcgttaattgcgcgcgtaggagtaatggctcgcggtaatgccattactttgcctgtatgtggtcgggatgtgaagtttactcttgaagtgctccggggtgatagtgttgagaagacctctcgggtatggtcaggtaatgaacgtgaccaggagctgcttactgaggacgcactggatgatctcatcccttcttttctactgactggtcaacagacaccggcgttcggtcgaagagtatctggtgtcatagaaattgccgatgggagtcgccgtcgtaaagctgctgcacttaccgaaagtgattatcgtgttctggttggcgagctggatgatgagcagatggctgcattatccagattgggtaacgattatcgcccaacaagtgcttatgaacgtggtcagcgttatgcaagccgattgcagaatgaatttgctgggaaatatttcttgcgctggctgatgcggaaaatatttcacattattacccgctgtatcaacaccgccaaattgcctaaatcagttgttgctcttttttctcaccccggtgaactatctgcccggtcaggtgatgcacttcaaaaagcctttacagataaagaggaattacttaagcagcaggcatctaaccttcatgagcagaaaaaagctggggtgatatttgaagctgaagaagttatcactcttttaacttctgtgcttaaaacgtcatctgcatcaagaactagtttaagctcacgacatcagtttgctcctggagcgacagtattgtataagggcgataaaatggtgcttaacctggacaggtctcgtgttccaactgagtgtatagagaaaattgaggccattcttaaggaacttgaaaagccagcaccctga

SEQ ID NO: 7107 - DNA, 438 bp, Homo sapiens
  SIMILAR (85)..(438): 741254mologous to Homo sapiens NAG13,accession number AF194537,Smith-Waterman Score=417.
atgaaactcatggaaacacttaaccagtgcataaacgctggtcatgaaatgacgaaggctatcgccattgcacagtttaatgatgacagcccggaagcgaggaaaataacccggcgctggagaataggtgaagcagcggatgtagttggggtttcttcaaaggctatcagagatgccgagaaagcaggagaaatacaaactaccatcagagaatactacaaacacctctatgcaaataaactagaaaatctagaagaaatggataaattcctcaacacatacactctcccaagactaaaccaggaagaagttgaatctctgaatagaccaataacaggatctgaaattgtagcaataatcaatagcttaccaaccaaaaagagtccaggaccagatggattcacagccgaattctaccagaggtacaaggaggaactg

SEQ ID NO: 7108 - DNA, 3216 bp, Homo sapiens
  SIMILAR (2212)..(2727): 981254mologous to synthetic construct chloramphenicol acetyltransferase,accession number A02739,Smith-Waterman Score=939.
atgaaactcatggaaacacttaaccagtgcataaacgctggtcatgaaatgacgaaggctatcgccattgcacagtttaatgatgacagcccggaagcgaggaaaataacccggcgctggagaataggtgaagcagcggatttagttggggtttcttctcaggccatcagagatgccgagaaagcagggcgactaccgcacccggatatggaaattcgaggacgggttgagcaacgtgttggttatacaattgaacaaattaatcatatgcgtgatgtgtttggtacgcgactgcgacgtgctgaagacgtatttccaccgggatttggggattttgccgatttcggaaccaccatcaaacaggattttcgcctgctggggcaaaccagcgtggaccgcttgctgcaactctctcagggccaggcggtgaagggcaatcagctgttgcccgtctcactggtgaaaagaaaaaccaccctggcgcccaatacgcaaaccgcctctccccgcgcgttggccgattcattaatgcagctggcacgacaggtttcccgactggaaagcgggcacccacttgctggccggggcttgacattattccttcctgttctggctttgccccgtattgaaactgagttaatgggcaaatttgatgaaggtaaactgcccaccgatccacacctgatgctccgactggccattgaaactgttgctcatgactatgatgtcatagttattgacagcgcgcctaacctgggtatcggcacgattaatgtcaaaatcattaaagaatcagctctgcccccaacccctacctttatcaacatcctcatgaatgccaaaacaattgaaaatggtcaattcccatatttgctaaatgcactggctttgcagaactttcaccggtataccggcatacagcatgtgcatcgcataggaatggcggaacgtatgtggtgtgaccggaacagagaacgtcacaccgtcagcagcagcggcggcaaccgcctccccaatccaggtcctgaccgttctatccgcgctttctctgtccttcctgtgcgacggttacgccgctccatgagcttatcgcgaataaatacctctcacgcaagatcacttcgcagaataaataaatcatggtgtccctatatgataccgggaagccctgggccaacttttggcgaaaatgagacgttgatcggcacgggtccaaatatacggtttgggaaccaggaaccatgctgtttgtgtaacggggttcttgtaggaaagtttgaaaatcgggtattggctttgcagaactttcagcggtataccggcatacagcatgtgcatcgcataggaatggcggaacgtatgtggtgtgaccggaacagagaacgtcacaccgtcagcagcagcggcggcaaccgcctccccaatccagctcacgctgtaggtatctcagttcggtgtaggtcgttcgctccaagctgggctgtgtgcacgaacccccggttcagcccgaccgctgcgccttatccggtaactatcgtcttgagtccaacccggtgtgcccattctaaaaaacttgtcccccttccacatggatctgtcatggcggaaccaccggttatcaatcacaagaaacgtaaaaatagcccgcgaatcgtccagtcaaacgacttcactgagcgggcatatagtctctcccgggatcaaaaacgtatgctgtatctgttcgttgaccagatcagaaaatctgatggcaccctacaggaacatgacggtatctgcgagatccatgttgctaaatatgctgaaatattcggattgacctctgcggaagccagtaaggatatacggcaggcattgaagagtttcgcggggaaggaagtggttttttatcgccctgaagaggatgccggcgatgaaaaaggctatgaatcttttccttggtttatcaaacgtgcgcacagtccatccagagggctttacagtgtacatatcaacccatatctcattcccttcttcctcgggttacagaaccggtttacgcagtttaggcttagtgaaacaaaagaaatcaccaatccgtatgccatgcgtttatacgaatccctgtgtcagtatcctgtgactaaaagggccccagatatgcctcaggcttcttctccagagggtgcaaaccataagcctaggcagccttcatgtggtgttaagcctcccgtaaagaaaaataagcacaagttttatccggcctttattcacattcttgcccgcctgatgaatgctcatccggaattccgtatggcaatgaaagacggtgagctggtgatatgggatagtgttcacccttgttacaccgttttccatgagcaaactgaaacgttttcatcgctctggagtgaataccacgacgatttccggcagtttctacacatatattcgcaagatgtggcgtgttacggtgaaaacctggcctatttccctaaagggtttattgagaatatgtttttcgtctcagccaatccctgggtgagtttcaccagttttgatttaaacgtggccaatatggacaacttcttcgcccccgttttcaccatgggcaaatattatacgcaaggcgacaaggtgctgatgccgctggcgattcaggttcatcatgccgtttgtgatggcttccatgtcggcagaatgcttaatgaatttcaacagtactgcgatgaaaaacagggcggggcccaaccgataagttcggccgccaacgatccgatcctgaaagatcagacgccaagaatggtcccggttctgcaccctttacatcttgacggaaaattccgtttattctacactgactattccggtaaacattacggcaaacaaagcctgacaacagcgcagaacgttcagcagtttatcgatgaaggcaattatacatccggcgacaaccatacgctgagagaccctcactacgttgaagacaaaggccataaataccttgtattcgaagccaacacgggaacagaaaacggataccaaggcgaagaatctttatttaacaaagcgtactacggcggcggcacgcccttcttccgtaaagaaagccagaagcttcagcagagcgctaaaaaacgcgatgctgagttagcgaacggcgccctcggtatcatagagttaaataatgattacacattgaaaaaagtaatgaagccgctgatcacttcaaacacg

SEQ ID NO: 7109 - DNA, 516 bp, Homo sapiens
  SIMILAR (1)..(345): 961254mologous to Cloning vector pZC320 SopA,accession number U26464,Smith-Waterman Score=564.
  misc_feature (1)...(516): n = a,t,c or g
atgaaactcatggaaacacttaaccagagcataaacgctggtcatgaaatgacgaaagctatcgccattgcacagtttaatgatgacagcccggaagcgaggaaaataacccggcgctggagaataagtgaagcancggatttagttggggtttcttctcaagctatcagagatgccgagaaagcaaggcgactaccgcacccggatatggaaattcgaggacgggttgagcaacgtgttggttatacaattgaacaaattaatcatatgcgtgatgtgtttggtacgcgattgcgacgtgctgaagacgtatttccaccggtgatcggggttgctgcccataaagaacggagtaacctcggtgtgcggttgtatgcctgctgtggattgctgctgtgtcctgcttatccacaacattttgcgcacggttatgtggacaaaatacctggttacccaagccgtgccggcacgttaaccgggctgcatccgatgcaagtgtgtcgctgtcgacggtga

SEQ ID NO: 7110 - DNA, 3069 bp, Homo sapiens
  SIMILAR (2293)..(3036): 961254mologous to Cloning vector pZC320 SopB,accession number U26464,Smith-Waterman Score=1172.
atgagaggacacagggagaaggcagctgcctgcaagccaaggacaagggcctcagaaggaactacccctgccagtaccttcatcctggactttcagcctcctaactgcaattatacatccggcgacaaccatacgctgagagaccctcactacgttgaagacaaaggccataaataccttgtattcgaagccaacacgggaacagaaaacggataccaaggcgaagaatctttatttaacaaagcgtactacggcggcggcacgaacttcttccgtaaagaaagccagaagcttcagcagagcgctaaaaaacgcgatgctgagttagcgaacggcgccctcggtatcatagagttaaataatgattacacattgaaaaaagtaatgaagccgctgatcacttcaaacacggtaactgatgaaatcgagcgcgcgaatgttttcaaaatgaacggcaaatggtacttgttcactgattcacgcggttcaaaaatgacgatcgatggtattaactcaaacgatatttacatgcttggttatgtatcaaactctttaaccggcccttacaagccgctgaacaaaacagggcttgtgctgcaaatgggtcttgatccaaacgatgtgacattcacttactctcacttcgcagtgccgcaagccaaagggatcttatgtgaagaagataattatacggccggcgacaaccatatgatgagagcccctcactgcgaagaagacagagcccataaattcgttgtattcgacgccaacgcgggaacagaaagcggacaccaaggagaatcttctttatttaacagagcgtgcggcggcggcggcacgttcttcttcagtaaagaaagccagaagcttcagcagagcgctaaaaaacgcgattgcataaacgctggtcatgaaatgacgaaggctatcgccattgcacagtttaatgatgacagcccggaagcgaggaaaataacccggcgctggagaataggtgaagcagcggatttagttggggtttcttctcaggctatcagagatgccgagaaagcagggcgactaccgcacccggatatggaaattcgaggacgggttgagcaacgtgttggttatacaattgaacaaattaatcatatgcgtgatgtgtttggtacgcgattgaaacgtgctgaagacgtatttccaccggtgatcggggttgctgcccataaaggtggcgtttacaaaacctcagtttctgttcatcttgctcaggatctggctctgaaggggtccctgctccttcctaagaatgactttctcttcaaactaggccttgagggtcatttacctttgggaaaaatccactccccacctacaggggctgatgttgccagaggatccagtggccttcccaagtctgagctatttcttccagagagaaatacccaggagcttcagcaagacagtgaagaggggcctctggcccttcaagtcctgcaaagcaatctcatggattttgccgatttcggaaccaccatcaaacaggattttcgcctgctggggcaaaccagcgtggaccgcttgctgcaactctctcagggccaggcggtgaagggcaatcagctgttgcccgtctcactggtgaaaagaaaaaccaccctggcgcccaatacgcaaaccgcctctccccgcgcgttggccgattcattaatgcagctggcacgacaggtttcccgactggaaagcgggcagaacaatgacggtatctgcgagatccatgttgctaaatatgttgaaatattcggattgacctctgcggaagccagtaaggatatacggcaggcattgaagagtttcgcggggaagttagtggttttttatcgccctgaagaggatgccggcgatgaaaaaggctatgaatcttttccttggtttatcaaacgtgcgcacagtccatccagagggctttacagtgtacatatcaacccatatctcattcccttctttatcgggttacagaaccggtttacgcagtttcggcttagtgaaacaaaagaaatcaccaatccgtatgccatgcgtttatacgaatccctgtgtcagtatcgtaagccggatggctcaggcatcgtctctctgaaaatcgactggatcatagagcgttaccagctgcctcaaagttaccagcgtatgcctgacttccgccgccgcttcctgcaggtctgtgttaatgagatcaacagcagaactccaatgcgcctctcatacattgagaaaaagaaaggccgccagacgactcatatctcccggaagtttactctgaagtggtccgggggtgatagtgttgagaagacttctcgggtatggtcaggtaatgaacgtgcccaggagctgcttactgaggacgcactgaatgatctcatcccttcttttctactgactggtcaacagacaccggcgttcggtcgaagagtatctggtgtcatagaaattgccgatgggagtcgccgtcgtaaagctgctgcacttaccgaaagtgattatcgtgttctggttggcgagctggatgatgagcagatggctgcattatccagattgggtaacgattatcgcccaacaagtgcttatgaacgtggtcagcgttatgcaagccgattgcagaatgaatttgctggacatatttctgcgctggctgatgcggaaaatatttcacgtaagattattacccgctgtatcaacaccgccaaattgcctaaatcagttgttgctcttttttctcaccccggtgaactatctgcccggtcaggtgatgcacttcaaaaagcctttacagataaagaggaattacttaagcagcaggcatctaaccttcatgagcagaaaaaagctggggtgatatttcaagctgaagaagttatcactcttttaacttctgtgcttaaaacgtcatctgcatcaagaactagtttaagctcacgacatcagtttgctcctggagcgacagtattgtataagggcgataaaatggtgcttaacctggacagttctcgtgtccaactgagttatagagaaaatgaggccaaataa

SEQ ID NO: 7111 - DNA, 753 bp, Homo sapiens
  SIMILAR (1)..(597): 1001254mologous to Cloning vector pZC320 SopA,accession number U26464,Smith-Waterman Score=1051.
gctatcagagatgccgagaaagcagggcgactaccgcacccggatatggaaattcgaggacgggttgagcaacgtgttggttatacaattgaacaaattaatcatatgcgtgatgtgtttggtacgcgattgcgacgtgctgaagacgtatttccaccggtgatcggggttgctgcccataaaggtggcgtttacaaaacctcagtttctgttcatcttgctcaggatctggctctgaaggggctacgtgttttgctcgtggaaggtaacgacccccagggaacagcctcaatgtatcacggatgggtaccagatcttcatattcatgcagaagacactctcctgcctttctatcttggggaaaaggacgatgtcacttatgcaataaagcccacttgctggccggggcttgacattattccttcctgtctggctctgcaccgtattgaaactgagttaatgggcaaatttgatgaaggtaaactgcccaccgatccacacctgatgctccgactggccattgaaactgttgctcatgactatgatgtcatagttattgacagcgcgcctaacctgggtatcggcacgattaatgtctttttcgatatgcttcgtgatctgctcaagaacgttgatcttaaagggatcgagcctgatgtacgagaagtagttcatcagttgactgtcagctgtccttgctccaggatgctgtttttgacaacggatgttttattgccttgtgatgttcattaa

SEQ ID NO: 7112 - DNA, 726 bp, Homo sapiens
  SIMILAR (1)..(600): 991254mologous to Cloning vector pZC320 SopA,accession number U26464,Smith-Waterman Score=1044.
atgaaactcatggaaacacttaaccagtgcataaacgctggtcatgaaatgacgaaggctatcgccattgcacagtttaatgatgacagcccggaagcgaggaaaataacccggcgctggagaataggtgaagcagcggatttagttggggtttcttctcaggctatcagagatgccgagaaagcagggcgactaccgcacccggatatggaaattcgaggacgggttgagcaacgtgttggttatacaattgaacaaattaatcatatgcgtgatgtgtttggtacgcgattgcgacgtgctgaagacgtatttccaccggtgatcggggttgctgcccataaaggtggcgtttacaaaacctcagtttctgttcatcttgctcaggatctggctctgaaggggctacgtgttttgctcgtggaaggtaacgacccccagggaacagcctcaatgtatcacggatgggtaccagatcttcatattcatgcagaagacactctcctgcctttctatcttggggaaaaagacgatgtcacttatgcaataaagcccacttgctgggccgggctagacattattccttcctgtctggctcttttagctcggtaccccgaggataaaaaggcaacatttgcgccaagcttcttaatgaacatcaaaggcaataaaacatccgttgtcaaaaacagcatcctggagcaaggacagctgacagtcaactaa

SEQ ID NO: 7113 - DNA, 1176 bp, Homo sapiens
  SIMILAR (565)..(1161): 831254mologous to Cloning vector pZC320 SopA,accession number U26464,Smith-Waterman Score=842.
atgaaactcatggaaacacttaaccagtgcataaacgctggtcatgaaatgacgaaggctatcgccattgcacagtttaatgatgacagcccggaagcgaggaaaataacccggcgctggagaataggtgaagcagcggatttagttggggtttcttctcaggctatcagagatgccgagaaagcagggcgactaccgcacccggatatggaaattcgaggacgggttgagcaacgtgttggttatacaattgaacaaattaatcatatgcgtgatgtgtttggtacgcgattgcgacgtgctgaagacgtatttccaccggtgatcggggttgctgcccataaaggtggcgtttacaaaacctcagtttctgttcatcttgctcaggatctggctctgaaggggctacgtgttttgctcgtggaaggtaacgacccccagggaacagcctcaatgtatcacggatggaaccgctttacgcagtttcggcttagtgaaacaaaagaaatcaccaatccgtatgccatgcgtttatacgaatccctgtgtcagtatcgtaagccggatggctcaggcatcgtctctctgaaaatcgactggatcatagagcgttaccagctgcctcaggaggaccagcgtatgcctgacttccgccgccgcttcctgcaggacgatgtcacttatgcaataaagcccacttgctggccggggcttgacattattgggggctgtctggctctgcaccgtattgaaactgagttaatgggcaaattggatgaaggtaaactgcccaccgatccacacctgatgctccgactggccattgaaactgttgctcatgactatgatgtcatagttattgacagcgcgcctaacctgggtatcggcacgattaatgtcgtatgtgctgctgatgtgctgattgttcccacgcctgctgagttgtttgactacacctccgcactgcagtttttcgatatgcttcgtgatctgctcaagaacgttgatcttaaagggttcgagcctgatgtacgtattttgcttaccaaatacagcaatagtaatggctctcagtccccgtggatggaggagcaaattctggatgcctggggaagcatggttctaaaaaatgttgtacctgaaacggatgaagttggtaaggtcaaatccggatga

SEQ ID NO: 7114 - DNA, 1002 bp, Homo sapiens
  SIMILAR (28)..(744): 961254mologous to Cloning vector pZC320 SopA,accession number U26464,Smith-Waterman Score=1206.
atgcaaaaggtgggtgaactagagttgcatacccgcggttcgactctagaggatccccagtttaatgatgacagcccggaagcgaggaaaataacccggcgctggagaataggtgaagcagcggatttagttggggtttcttctcaggctatcagagatgccgagaaagcagggcgactaccgcacccggatatggaaattcgaggacgggttgagcaacgtgttggttatacaattgaacaaattaatcatatgcgtgatgtgtttggtacgcgattgcgacgtgctgaagacgtatttccaccggtgatcggggttgctgcccataaaggtggcgtttacaaaacctcagtttctgttcatcttgctcaggatctggctctgaaggggctacgtgttttgctcgtggaaggtaacgacccccagggaacagcctcaatgtatcacggatgggtaccagatcttcatattcatgcagaagacactctcctgcctttctatcttggggaaaaggacgatgtcacttatgcaataaagcccacttgctggccggggcttgacattattccttcctgtctggctctgcaccgtattgaaactgagttaatgggcaaatttgatgaaggtaaactgcccaccgatccacacctgatgctccgactggccattgaaactgttgctcatgactatgatgtcatagttattgacagcgcgcctaacctgggtatcggcacgattaatgtcaaccggtttacgcagtttcggcttagtgaaacaaaagaaatcaccaatccgtatgccatgcgtttatacgaatccctgtgtcagtatcgtaagccggatggctcaggcatcgtctctctgaaaatcgactgggatcatagagcgttaccaggctggcctcaaagtttacccagcgtattgccctggacttccgcccgccggttccttgcaggtttgggttttttgggaatcaacggccgaacttcaatgcccttttaa

SEQ ID NO: 7115 - DNA, 735 bp, Homo sapiens
  SIMILAR (286)..(732): 891254mologous to unidentified cloning vector 29kD protein essential for the replication of mini F plasmid,accession number AB015619,Smith-Waterman Score=680.
atgaaactcatggaaacacttaaccagtgcataaacgctggtcatgaaatgacgaaggctatcgccattgcacagtttaatgatgacagcccggaagcgaggaaaataacccggcgctggagaataggtgaagcagcggatttagttggggtttcttctcaggctatcagagatgccgagaaagcagggcgactaccgcacccggatatggaaattcgaggacgggttgagcaacgtgttggttatacaattgaacaaattaatcatatgcgtgatgtgtttgttgccggcgatgaaaaaggctatgaatcttttccttggtttatcaaaacgtgcgcacagtccatccagagggctttacagtgtacatatcaacccatatctcattccttctttatcgggttacagaaccggtttacgcagtttcggcttagtgaaacaaaagaaatcaccaatccgtatgccatgcgtttatacgaatccctgtgtcagtatcgtaagccggatggctcaggcatcgtctctctgaaaatcgactggatcatagagcgttaccagctgcctcaaagttaccagcgtatgcctgacttccgccgccgcttcctgcaggtctgtgttaatgagatcaacagcagaactccaatgcgcctctcatacattgagaaaaagaaaggccgccagacgactcatatcgtattttccttccgcgatatcacttccatgacgacaggatag

SEQ ID NO: 7116 - DNA, 1041 bp, Homo sapiens
  SIMILAR (1)..(930): 951254mologous to Cloning vector pZC320 SopA,accession number U26464,Smith-Waterman Score=1553.
atgaaactcatggaaacacttaaccagtgcataaacgctggtcatgaaatgacgaaggctatcgccattgcacagtttaatgatgacagcccggaagcgaggaaaataacccggcgctggagaataggtgaagcagcggatttagttggggtttcttctcaggctatcagagatgccgagaaagcagggcgactaccgcacccggatatggaaattcgaggacgggttgagcaacgtgttggttatacaattgaacaaattaatcatatgcgtgatgtgtttggtacgcgattgcgacgtgctgaagacgtatttccaccggtgatcggggttgctgcccataaaggtggcgtttacaaaacctcagtttctgttcatcttgctcaggatctggctctgaaggggctacgtgttttgctcgtggaaggtaacgacccccagggaacagcctcaatgtatcacggatgggtaccagatcttcatattcatgcagaagacactctcctgcctttctatcttggggaaaaggacgatgtcacttatgcaataaagcccacttgctggccggggcttgacattattccttcctgtctggctctgcaccgtattgaaactgagttaatgggcaaatttgatgaaggtaaactgcccaccgatccacacctgatgctccgactggccattgaaactgttgctcatgactatgatgtcatagttattgacagcgcgcctaacctgggtatcggcacgattaatgtcgtatgtgctgctgatgtgctgattgttcccacgcctgctgagttgtttgactacacctccgcactgcagtttttcgatatgcttcgtgatctgctcaagaacgttgatcttaaagggttcgagcctgatgatcgcagctcctcgccatcaatggaacaaagctggacagagaatgactttgacaagctgacaaaagtaggcttcagaaggtcagtaataacaaacttctctgagctaaaggaggatgttcgaacccatcgcaaggaagctaaaaaaccttga

SEQ ID NO: 7117 - DNA, 1101 bp, Homo sapiens
  SIMILAR (1)..(888): 1001254mologous to Cloning vector pZC320 SopA,accession number U26464,Smith-Waterman Score=1548.
atgaaactcatggaaacacttaaccagtgcataaacgctggtcatgaaatgacgaaggctatcgccattgcacagtttaatgatgacagcccggaagcgaggaaaataacccggcgctggagaataggtgaagcagcggatttagttggggtttcttctcaggctatcagagatgccgagaaagcagggcgactaccgcacccggatatggaaattcgaggacgggttgagcaacgtgttggttatacaattgaacaaattaatcatatgcgtgatgtgtttggtacgcgattgcgacgtgctgaagacgtatttccaccggtgatcggggttgctgcccataaaggtggcgtttacaaaacctcagtttctgttcatcttgctcaggatctggctctgaaggggctacgtgttttgctcgtggaaggtaacgacccccagggaacagcctcaatgtatcacggatgggtaccagatcttcatattcatgcagaagacactctcctgcctttctatcttggggaaaaggacgatgtcacttatgcaataaagcccacttgctggccggggcttgacattattccttcctgtctggctctgcaccgtattgaaactgagttaatgggcaaatttgatgaaggtaaactgcccaccgatccacacctgatgctccgactggccattgaaactgttgctcatgactatgatgtcatagttattgacagcgcgcctaacctgggtatcggcacgattaatgtcgtatgtgctgctgatgtgctgattgttcccacgcctgctgagttgtttgactacacctccgcactgcagtttttcgatatgcttcgtgatctgctcaagaacgttgatcttaaagggttcgagcctgattcaggaccctcagctgcaggtctgttggagtttactggaggtccactccagaccctgtttgcctgggtatcagcagcagtggctgcagaacagtggatattggtgaactgcaaatgctgctacctgatcgttcctccggaaattttgtctcagaggagtacccggccgtgtgaggtgtcagtacgcccctactggggggtgcctcccagttag

SEQ ID NO: 7118 - DNA, 1014 bp, Homo sapiens
atgaaactcatggaaacacttaaccagtgcataaacgctggtcatgaaatgacgaaggctatcgccattgcacagtttaatgatgacagcccggaagcgaggaaaataacccggcgctggagaataggtgaagcagcggatttagttggggtttcttctcaggctatcagagatgccgagaaagcagggcgactaccgcacccggatatggaaattcgaggacgggttgagcaacgtgttggttatacaattgaacaaattaatcatatgcgtgatgtgtttggtacgcgattgcgacgtgctgaagacgtatttccaccggtgatcggggttgctgcccataaaggtggcgtttacaaaacctcagtttctgttcatcttgctcaggatctggctctgaaggggctacgtgttttgctcgtggaaggtaacgacccccagggaacagaaacaatgtatcacggatgggtaccagatcttcatattcatgcagaagacactctcctgcctttctatcttggggaaaaggacgatgtcacttatgcaataaagcccacttgctggccggggcttgacattattccttcctgtctggctctgcaccgtattgaaactgagttaatgggcaaatttgatgaaggtagtctgcccaccgatccacacctgatgtactactatcaggcaccgtgtatgaaatctaacaatgcgctcatcgtcatcctcggcaccgtcaccctggatgctgtaggcataggcttggttatgccggtactgccgggcctcttgcgggatatcgtccattccgacagcatcgccagtcactatggcgtgctgctagcgctatatgcgttgatgcaatttctatgcgcacccgttctcggagcactgtccgaccgctttggccgccgcccagtcctgctcgcttcgctacttggagccactatcgactacgcgatcatggcgaccacacccgtcctgtggatctacccactagtcaattcaccatcttgttga

SEQ ID NO: 7119 - DNA, 1212 bp, Homo sapiens; identical to SEQ ID NO: 4939
  SIMILAR (1)..(885): 991254mologous to Cloning vector pZC320 SopA,accession number U26464,Smith-Waterman Score=1527.

SEQ ID NO: 7120 - DNA, 1077 bp, Homo sapiens
  SIMILAR (761)..(805): 531254mologous to Cloning vector pZC320 SopA,accession number U26464,Smith-Waterman Score=43.
  misc_feature (1)...(1077): n = a,t,c or g
atgaaactcatggaaacacttaaccagtgcataaacgctggtcatgaaatgacgaaggctatcgccattgcacagtttaatgatgacagcccggaagcgaggaaaataacccggcgctggagaataggtgaagcagcggatttagttggggtttcttctcaggctatcagagatgccgagaaagcagggcgactaccgcacccggatatggaaattcgaggacgggttgagcaacgtgttggttatacaattgaacaaattaatcatatgcgtgatgtgtttggtacgcgattgcgacgtgctgaagacgtatttccaccggtgatcggggttgctgcccataaaggtggcgtttacaaaacctcagtttctgttcatcttgctcaggatctggctctgaaggggctacgtgttttgctcgtggaaggtaacgacccccagggaacagcctcaatgtatcacggatgggtaccagatcttcatattcatgcagaagacactctcctgcctttctatcttggggaaaaggacgatgtcacttatgcaataaagcccacttgctggccggggcttgacattattccttcctgtctggctctgcaccgtattgaaactgagttaatgggcaaatttgatgaaggtaaactgcccaccgatccacacctgatgctccgactggccattgaaactgttgctcatgactatgatgtcatagttattgacagcgcgcctagactangtcaggcaccgtgtatgaaatctaacaatgcgctcatcgtcatcctcggcaccgtcaccctggatgctgtaggcataggcttggttatgccggtactgccgggcctcttgcgggatatcgtccattccgacagcatcgccagtcactatggcgtgctgctagcgctatatgcgttgatgcaatttctatgcgcacccgttctcggagcactgtccgaccgctttggccgccgcccagtcctgctcgcttcgctacttggagccactatcgactacgcgatcatggcgaccacacccgtcctgtggatctacccactagtcaattcaccatcttgttga

SEQ ID NO: 7121 - DNA, 657 bp, Homo sapiens
  SIMILAR (1)..(360): 951254mologous to Cloning vector pZC320 SopA,accession number U26464,Smith-Waterman Score=580.
atgaaactcatggaaacacttaaccagtgcataaacgctggtcatgaaatgacgaaggctatcgccattgcacagtttaatgatgacagcccggaagcgaggaaaataacccggcgctggagaataggtgaagcagcggatttagttggggtttcttctcaggctatcagagatgccgagaaagcagaaagactaccgcacccggatatggaaattcgaggacgggttgagcaacgtgttggttatacaattgaacaaattaatcatatgcgtgatgtgtttggtacgcgattgcgacgtgctgaagacgtattgccaccggtgatcggggttgctgccaataaaggtgatgcactcaaaaaagcctttacagataaagaggaattacttaagcagcaggcatctaaccttcatgagcagaaaaaagctggggtgatatttgaagctgaagaagttatcactcttttaacttctgtgcttaaaacgtcatctgcatcaagaactagtttaagctcacgacatcagtttgctcctggagcgacagtattgtataagggcgataaaatggtgcttaacctggacaggtctcgtgttccaactgagtgtatagagaaaattgaggccattcttaaggaacttgaaaagccagcaccctga

SEQ ID NO: 7122 - DNA, 546 bp, Homo sapiens
  SIMILAR (1)..(351): 991254mologous to Cloning vector pZC320 SopA,accession number U26464,Smith-Waterman Score=595.
atgaaactcatggaaacacttaaccagtgcataaacgctggtcatgaaatgacgaaggctatcgccattgcacagtttaatgatgacagcccggaagcgaggaaaataacccggcgctggagaataggtgaagcagcggatttagttggggtttcttctcaggctatcagagatgccgagaaagcagggcgactaccgcacccggatatggaaattcgaggacgggttgagcaacgtgttggttatacaattgaacaaattaatcatatgcgtgatgtgtttggtacgcgattgcgacgtgctgaagacgtatttccaccggtgatcggggttgctgcccataaagtcgggaaacctgtcgtgccagctgcattaatgaatcggccaacgcgcggggagaggcggtttgcgtattgggcgccagggtggtttttcttttcaccagtgagacgggcaacagctgattgcccttcaccgcctggccctgagagagttgcagcaagcggtccacgctggtttgccccagcaggcgaaaatcctgtttga

SEQ ID NO: 7123 - DNA, 753 bp, Homo sapiens
  SIMILAR (40)..(669): 961254mologous to Cloning vector pZC320 SopA,accession number U26464,Smith-Waterman Score=1061.
atgagtattgccaagaaagaaagctgtaatcaggtgctgcaggctatcagagatgccgagaaagcagggcgactaccgcacccggatatggaaattcgaggacgggttgagcaacgtgttggttatacaattgaacaaattaatcatatgcgtgatgtgtttggtacgcgattgcgacgtgctgaagacgtatttccaccggtgatcggggttgctgcccataaaggtggcgtttacaaaacctcagtttctgttcagcttgctcaggatctggctctgaaggggctacgtgttttgctcgtggaaggtaacgacccccagggaacagcctcaatgtatcacggatgggtaccagatcttcatattcatgcagaagacactctcctgcctttctatcttggggaaaaggacgatgtcacttatgcaataaagcccacttgctggccggggcttgacattattccttcctgtctggctctgcaccgtattgaaactgagttaatgggcaaatttgatgaaagtaaactgcccatcgatccacacctgatgctccgactggccattgaaactgttgctcatgactatgatgtcatagttattgacagcgcgcctaacctgggtatcggcacgattaatgtccgatgtgctgctgaaaatttgatggccccctacaggaacatgacgggatttgcggagatccatgttgccaaatatgctgaaatattcggattgacctctgcggaagccacttag

SEQ ID NO: 7124 - DNA, 612 bp, Homo sapiens
  misc_feature (1)...(612): n = a,t,c or g
atgaaactcatggaaacacttaaccagtgcataaacgctggtcatgaaatgacgaaggctatcgccattgcacagtttaatgatgacagcccggaagcgatttttataacccggcgctggagaataggtgaggcagcggatttagttggggtttcttctcaggctatcagagatgccgagaaagcagggcgactaccgcacccggatatggaaattcgaggacgggttgagcaacgtgttggttatacaattgaacaaattaatcatatgcgtgatgtgtttggtacgcgattgcgacgtgctgaagacgtatttccaccggtgatcggggttgctgcccataaagntagccgggcctctgcgggatatcgtttttccgacagcatcgccagtgactctggcgtgctgctagcgctatatgcgttgatgcaatttctatgcgcacccgttctcggagcactgtccgaccgctttggccgccgcccagtcctgctcgcttcgctacttggagccactatcgactatcgcgatcatggcgaccacacccgtcctgtggatctacccactagtcaattcaccatcttgttgagaaataaaagaaaatgccaatga

SEQ ID NO: 7125 - DNA, 519 bp, Homo sapiens
  SIMILAR (1)..(345): 1001254mologous to Cloning vector pZC320 SopA,accession number U26464,Smith-Waterman Score=592.
atgaaactcatggaaacacttaaccagtgcataaacgctggtcatgaaatgacgaaggctatcgccattgcacagtttaatgatgacagcccggaagcgaggaaaataacccggcgctggagaataggtgaagcagcggatttagttggggtttcttctcaggctatcagagatgccgagaaagcagggcgactaccgcacccggatatggaaattcgaggacgggttgagcaacgtgttggttatacaattgaacaaattaatcatatgcgtgatgtgtttggtacgcgattgcgacgtgctgaagacgtatttccaccggtgatcggggttgctgcccataaagtgccgcaagccaaaggcaacaatgtggttatcacaagctacatgacaaacagaggcttcttcgaggataaaaaggcaacatttgcgccaagcttcttaatgaacatcagaggcaataaaacatccgttgtcaaaaacagcatcctggagcaaggacagctgacagtcaactaa

SEQ ID NO: 7126 - DNA, 1992 bp, Homo sapiens
  SIMILAR (1)..(438): 981254mologous to Cloning vector pZC320 SopA,accession number U26464,Smith-Waterman Score=733.
atgaaactcatggaaacacttaaccagtgcataaacgctggtcatgaaatgacgaaggctatcgccattgcacagtttaatgatgacagcccggaagcgaggaaaataacccggcgctggagaataggtgaagcagcggatttagttggggtttcttctcaggctatcagagatgccgagaaagcagggcgactaccgcacccggatatggaaattcgaggacgggttgagcaacgtgttggttatacaattgaacaaattaatcatatgcgtgatgtgtttggtacgcgattgcgacgtgctgaagacgtatttccaccggtgatcggggttgctgcccataaaggtggcgtttacaaaacctcagtttctgttcatcttgctcaggatctggctctgaaggggctacgtgttttgctcgtggaagggttcgagcctgatgtacgtattttgcttaccaaatacagcaatagtaatggctctcagtccccgtggatggaggagcaaattcgggatgcctggggaagcatggttctaaaaaatgttgtacgtgaaacggatgaagttggtaaagctgccccgatggtggattcgttaattgcgcgcgtaggagtaatggctcgcggtaatgccattactttgcctgtatgtggtcgggatgtgaagtttactcttgaagtgctccggggtgatagtgttgagaagacctctcgggtatggtcaggtaatgaacgtgaccaggagctgcttactgaggacgcactggatgatctcatcccttcttttctactgactggtcaacagacaccggcgttcggtcgaagagtatctggtgtcatagaaattgcgggggtcctgaaacagtcaccaggtgacccttctgcaaattggagcagcttcataagcagaggagagaagaagcttgacgacacccaggacggatgccctgctgagcctgggcatcagtgctggctctgcccacttcctgcccagactcctgtgctgtttggagaaaactgggcaggagaaagctgtgcaccatcccagaatagcgggcttttctctatgtctgaaaaaattcacagacaagcctttcgttctgatgcagatttcagcttagcatgtaaaatgcaacaagatgttcgtctattagatatgtcagcacacccagtgttaaagacatcaaggagctcacttacagaacagtaccctggaaattgtgtccagatagtgaattacttgcgtcaaaacatccacaaaaatgagaacctgaccggcttcagggattttgccgatttcggaaccaccatcaaacaggattttcgcctgctggggcaaaccagcgtggaccgcttgctgcaactctctcagggccaggcggtgaagggcaatcagctgttgcccgtctcactgatccctaaacagcagcaaaacgaaaaataccaagtgcctcaattcgatcaatcaacgattaaaaatattgagtctgcaaaaggacttgatgtgtgggacagctggccgctgcaaaacgctgacggaacagtagctgaatacaacggctatcacgttgtgtttgctcttgcgggaagcccgaaagacgctgatgacacatcaatctacatgttttatcaaaaggtcggcgacaactcaatcgacagctggaaaaacgcgggccgtgtctttaaagacagcgataagttcgacgccaacgatccgatcctgaaagatcagacgcaagaatggtccggttctgcaacctttacatctgacggaaaaatccgtttattctacactgactattccggtaaacattacggcaaacaaagcctgacaacagcgcaggtaaatgtgtcaaaatctgatgacacactcaaaatcaacggagtggaagatcacaaaacgatttttgacggagacggaaaaacatatcagaacgttcagcagtatatcgatgaaggcaattatacagccgcgtttgatctctcaaaatga

SEQ ID NO: 7127 - DNA, 1191 bp, Homo sapiens
  SIMILAR (7)..(693): 1001254mologous to Cloning vector pZC320 SopA,accession number U26464,Smith-Waterman Score=1205.
atgcgacagtttaatgatgacagcccggaagcgaggaaaataacccggcgctggagaataggtgaagcagcggatttagttggggtttcttctcaggctatcagagatgccgagaaagcagggcgactaccgcacccggatatggaaattcgaggacgggttgagcaacgtgttggttatacaattgaacaaattaatcatatgcgtgatgtgtttggtacgcgattgcgacgtgctgaagacgtatttccaccggtgatcggggttgctgcccataaaggtggcgtttacaaaacctcagtttctgttcatcttgctcaggatctggctctgaaggggctacgtgttttgctcgtggaaggtaacgacccccagggaacagcctcaatgtatcacggatgggtaccagatcttcatattcatgcagaagacactctcctgcctttctatcttggggaaaaggacgatgtcacttatgcaataaagcccacttgctggccggggcttgacattattccttcctgtctggctctgcaccgtattgaaactgagttaatgggcaaatttgatgaaggtaaactgcccaccgatccacacctgatgctccgactggccattgaaactgttgctcatgactatgatgtcatagttattgacagcgcgcctaacctgggtatcggcacgattaatgtcacaaatacaggatttgaaattgtggcaataatccatagctttccaaccaaaaatagtacaggaccagatggattcacagccgattttaccagaggacaaggaggaactggtcccactccttctgaaactatccaatcaatagaaaaacagggaatcctccctaactcattttatgaggccagcatcatcctgataccaaagccgggtagaggcacaaccaaaaaagagaattttagaccaatatccttgatgaacattgatgcaaaaatcctcaataaaatactgggaaaccgaatccaacagcacatcaaaaagcttatccaccatgatcaagtgggcttcatccctgggatgcaaggctggttcaatatacgcaaatcaataaatgtaatccagcatataaacagaaccaaagacaaaaaccacatgattatctcagtagatgcagaaaaggcctttgacaaaattcaacaacttcatgctaaaaactctcaataa

SEQ ID NO: 7128 - DNA, 669 bp, Homo sapiens
  SIMILAR (1)..(468): 1001254mologous to Cloning vector pZC320 SopA,accession number U26464,Smith-Waterman Score=807.
atgaaactcatggaaacacttaaccagtgcataaacgctggtcatgaaatgacgaaggctatcgccattgcacagtttaatgatgacagcccggaagcgaggaaaataacccggcgctggagaataggtgaagcagcggatttagttggggtttcttctcaggctatcagagatgccgagaaagcagggcgactaccgcacccggatatggaaattcgaggacgggttgagcaacgtgttggttatacaattgaacaaattaatcatatgcgtgatgtgtttggtacgcgattgcgacgtgctgaagacgtatttccaccggtgatcggggttgctgcccataaaggtggcgtttacaaaacctcagtttctgttcatcttgctcaggatctggctctgaaggggctacgtgttttgctcgtggaaggtaacgacccccagggaacagcctcaatgtatcacggatggaaccgctttacgcagtttcggcttagtgaaacaaaagaaatcaccaatccgtatgccatgcgtttatacgaatccctgtgtcagtatcgtaagccggatggctcaggcatcgtctctctgaaaatcgactggatcatagagcgttaccagctgcctcaggaggaccagcgtatgcctgacttccgccgccgcttcctgcag

SEQ ID NO: 7129 - DNA, 574 bp, Homo sapiens
  SIMILAR (1)..(438): 981254mologous to Cloning vector pZC320 SopA,accession number U26464,Smith-Waterman Score=733.
atgaaactcatggaaacacttaaccagtgcataaacgctggtcatgaaatgacgaaggctatcgccattgcacagtttaatgatgacagcccggaagcgaggaaaataacccggcgctggagaataggtgaagcagcggatttagttggggtttcttctcaggctatcagagatgccgagaaagcagggcgactaccgcacccggatatggaaattcgaggacgggttgagcaacgtgttggttatacaattgaacaaattaatcatatgcgtgatgtgtttggtacgcgattgcgacgtgctgaagacgtatttccaccggtgatcggggttgctgcccataaaggtggcgtttacaaaacctcagtttctgttcatcttgctcaggatctggctctgaaggggctacgtgttttgctcgtggaagggttcgagcctgatgtacgtattttgcttaccaaatacagcaatagtaatggctctcagtccccgtggatggaggagcaaattcgggatgcctggggaagcatggttctaaaaaatgttgtacgtgaaacggatgaagttggtaaag

SEQ ID NO: 7130 - DNA, 934 bp, Homo sapiens
  SIMILAR (457)..(933): 991254mologous to Cloning vector pZC320 SopA,accession number U26464,Smith-Waterman Score=840.
atgaggaaggctatcgccattgcacagtttaatgatgacagcccgaaagcgagaaaaataacccggcgctggagaataggtgaagcagcggatttagttggggtttcttctcaggctatcagagatgccgagaaagcagggcgactaccgcacccggatatggaaattcgaggacgggttgagcaacgtgttggttatacaattgaacaaattaatcatatgcgtgatgtgtttggtacgcgattgcgacgtgctgaagacgtatttccaccggtgatcggggttgctgcccataaaggtggcgtttacaaaacctcagtttctgttcatcttgctcaggatctggctctgaaggggctacgtgttttgctcgtggaagtcacacgagtgccctcaggatgttcggacatgatccagtttgaaggggtcctatggtttactaagcttaatctttgggctatcagagatgccgagaaagcagggcgactcccgcacccggatatggaaattcgaggacgggttgagcaacgtgttggttatacaattgaacaaattaatcatatgcgtgatgtgtttggtacgcgattgcgacgtgctgaagacgtatttccaccggtgatcggggttgctgcccataaaggtggcgtttacaaaacctcagtttctgttcatcttgctcaggatctggctctgaaggggctacgtgttttgctcgtggaaggtaacgacccccagggaacagcctcaatgtatcacggatgggtaccagatcttcatattcatgcagaagacactctcaagcctttctatcttggggaaaaggacgatgtcacttatgcaataaagcccacttgctggccggggcttgacattattccttcctgtctggctctgcaccgtattgaaactgagttaatgggcaaatttgatgaag

SEQ ID NO: 7131 - DNA, 1284 bp, Homo sapiens
  SIMILAR (733)..(1281): 981254mologous to Cloning vector pSacBII SacB,accession number U09128,Smith-Waterman Score=963.
atgaaactcatggaaacacttaacaagtgcataaacgctgttcatgaaatgacgaaggctatcgccattgcacagtttaatgatgacagcccggaagcgaggaaaataacccggcgctggagaataggtgaagcagcggatttagttggggtttcttctcaggctatcagagatgccgagaaagcagggcgactaccgcacccggatatggaaattcgaggacgggttgagcaacgtgttggttatacaattgaacaaattaatcatatgcgtgatgtgtttggtacgcgattgcgacgtgctgaagacgtatttccaccggtgatcggggttgctgcccataaaggtggcgtttacaaaacctcagtttctgttcatcttgctcaggatctggctctgaaggggctacgtcccccgctcgtggaagtggactcttgttccaaactggaacaacactcaaccctatctcgggctattcttttgatttataagggattttgccgatttcggaaccaccatcaaacaggattttcgcctgctggggcaaaccagcgtggaccgcttgctgcaactctctcagggccaggcggtgaagggcaatcagctgttgcccgtctcactggtgaaaagaaaaaccaccctggcgcccaatacgcaaaccgcctctccccgcgcgttggccgattcattaatgcagctggcacgacaggtttcccgactggaaagcgggcaatcctaaaacagcagcaaaacgaaaaataccaagtgcctcaattcgatcaatcaacgattaaaaatattgagtctgcaaaaggacttgatgtgtgggacagctggccgctgcaaaacgctgacggaacagtagctgaatacaacggctatcacgttgtgtttgctcttgcgggaagcccgaaagacgctgatgacacatcaatctacatgttttatcaaaaggtcggcgacaactcaatcgacagctggaaaaacgcgggccgtgtctttaaagacagcgataagttcgacgccaacgatccgatcctgaaagatcagacgcaagaatggtccggttctgcaacctttacatctgacggaaaaatccgtttattctacactgactattccggtacacattacggcaaacaaagcctgacaacagcgcaggtaaatgtgtcaaaatctgatgacacactcaaaatcaacggagtggaagatcacaaaacgatttttgacggagacggaaaaacatatcagaacgttcagcagtttatcgatgaaggcaattag

SEQ ID NO: 7132 - DNA, 804 bp, Homo sapiens
  SIMILAR (1)..(324): 971254mologous to Cloning vector pZC320 SopA,accession number U26464,Smith-Waterman Score=538.
  misc_feature (1)...(804): n = a,t,c or g
atgaaactcatggaaacacttaaccagtgcataaacgctggtcatgaaatgacgaaggctatcgccattgcacagtttaatgatgacagcccggaagcgaggaaaataacccggcgctggagaataggtgaagcagcggatttagttggggtttcttctcaggctatcagagatgccgagaaagcagggcgactaccgcacccggatatggaaattcgaggacgggttgagcaacgtgttggttatacaattgaacaaattaatcatatgcgtgatgtgtttggtacgcgaatgcgacgtgctgaagacgtattccagggggttcnccagggttcccgtgctgctctcgctgctggcgctcgggctggtgctgcgatgacgctgctccccatcctggttctggcggcgggcacctatgccttccggctcgcgggcccgctgctgagccagcgcatgcaggtgtccgcgcgggtccagggcctgctgtccctctccgcgattgcgctgctcaccgcgctggtggccacggccacgctgacgtcgaacgggggcttctcgggctgggcacgtccggcgggggtgctcgctggcgccgtgctggcgtggcggaggctgcccttcgtcgtcgtggtggtgggggcggcgggtgttacagctttgttacgaatggcgggtgcctccaggcctgtgatgaaaatgggtgccaggaaggtctctgacatgccctggagacattttccccattgtcttggtgatgaacattcagctcctcgttacttatgcaaattttggcagctggcttga

SEQ ID NO: 7133 - DNA, 817 bp, Homo sapiens
  SIMILAR (189)..(683): 801254mologous to Cloning vector pZC320 SopA,accession number U26464,Smith-Waterman Score=651.
aagaagataattatacggccggcgacaaccatatgatgagagcccctcactgcgaagaagacagagcccataaattcgttgtattcgacgccaacgcgggaacagaaagcggacaccaaggagaatcttctttatttaacagagcgtgcggcggcggcggcacgttcttcttcagtaaagaaagccagaagcttcagcagagcgctaaaaaacgcgattgcataaacgctggtcatgaaatgacgaaggctatcgccattgcacagtttaatgatgacagcccggaagcgaggaaaataacccggcgctggagaataggtgaagcagcggatttagttggggtttcttctcaggctatcagagatgccgagaaagcagggcgactaccgcacccggatatggaaattcgaggacgggttgagcaacgtgttggttatacaattgaacaaattaatcatatgcgtgatgtgtttggtacgcgattgaaacgtgctgaagacgtatttccaccggtgatcggggttgctgcccataaaggtggcgtttacaaaacctcagtttctgttcatcttgctcaggatctggctctgaaggggtccctgctccttcctaagaatgactttctcttcaaactaggccttgagggtcatttacctttgggaaaaatccactccccacctacaggggctgatgttgccagaggatccagtggccttcccaagtctgagctatttcttccagagagaaatacccaggagcttcagcaagacagtgaagaggggcctctggcccttcaagtcctgcaaagcaatctcat

SEQ ID NO: 7134 - DNA, 587 bp, Homo sapiens
  SIMILAR (1)..(429): 971254mologous to Cloning vector pZC320 SopA,accession number U26464,Smith-Waterman Score=707.
atgaaactcatggaaacacttaaccagtgcataaacgctgttcatgaaatgactaatgctatcgccattgcacagtttaatgatgacagcccggaagcgaggaaaataacccggcgctggagaataggtgaagcagcggatttagttggggtttcttctcaggctatcagagatgccgagaaagcagggcgactaccgcacccggatatggaaattcgaggacgggttgagcaacgtgttggttatacaattgaacaaattaatcatatgcgtgatgtgtttggtacgcgattgcgacgtgctgaagacgtatttccaccggtgatcggggttgctgcccataaaagtggcgtttacaaaacctcagtttctgttcatcttgctcaagatctggctctgaaagggctacgtgttttgctcgtggaagggtttattgagaatatgtttttcgtctcagccaatccctgggtgagtttcaccagttttgatttaaacgtggccaatatggacaacttcttcgcccccgttttcaccatgggcaaatattatacgcaaggcgacaaggtgctgatgccgctggcgattca

SEQ ID NO: 7135 - DNA, 638 bp, Homo sapiens
  SIMILAR (1)..(429): 1001254mologous to Cloning vector pZC320 SopA,accession number U26464,Smith-Waterman Score=727.
atgaaactcatggaaacacttaaccagtgcataaacgctggtcatgaaatgacgaaggctatcgccattgcacagtttaatgatgacagcccggaagcgaggaaaataacccggcgctggagaataggtgaagcagcggatttagttggggtttcttctcaggctatcagagatgccgagaaagcagggcgactaccgcacccggatatggaaattcgaggacgggttgagcaacgtgttggttatacaattgaacaaattaatcatatgcgtgatgtgtttggtacgcgattgcgacgtgctgaagacgtatttccaccggtgatcggggttgctgcccataaaggtggcgtttacaaaacctcagtttctgttcatcttgctcaggatctggctctgaaggggctacgtgttttgctcgtggaaggcagaggttggaacagtttggaggactcagaagaagacagaaaaatgtgggaaagtttggaactccctagagacttgttgattggctttgacaaaaatggtgataatgatatggacaatgaaagaatacagactgaggaggtctcagatggagataaggaacttgttgggtactggagcaaaggtgactcttgttatgccatccttgttgc

SEQ ID NO: 7136 - DNA, 885 bp, Homo sapiens
  SIMILAR (1)..(486): 901254mologous to Cloning vector pZC320 SopA,accession number U26464,Smith-Waterman Score=724.
atgaaactcatggaaacacttaaccagtgcataaacgctggtcatgaaatgacgaaggctatcgccattgcacagtttaatgatgacagcccggaagcgaggaaaataacccggcgctggagaataggtgaagcagcggatttagttggggtttcttctcaggctatcagagatgccgagaaagcagggcgactaccgcacccggatatggaaattcgaggacgggttgagcaacgtgttggttatacaattgaacaaattaatcatatgcgtgatgtgtttggtacgcgattgcgacgtgctgaagacgtatttccaccggtgatcggggttgctgcccataaaggtggcgtttacaaaacctcagtttctgttcatcttgctcaggatctggctctgaaggggctacgtgttttgctcgtggaagctagttcatcaggtaacgaaaacgatttgaatatgccttcaggaacaatagaaatcttctgtgacaatctaaaaacttgtcacacttcacatggatctgtcatggcggaaacagcggttatcaatcacaagaaacgtaaaaatagcccgcgaatcgtccagtcaaacgacctcactgaggcggcatatagtctctcccgggatcaaaaacgtatgctgtatctgttcgttgaccagatcagaagatctgatggcaccctacaggaacatgacggtatctgcgagatccatgttgctaaatatgctgaaatattcggattgacctctgcggaagcaggtcctgctgcccctctctctatcttacctctcctctggcatttcccctttgggcaggtcatccgggaactctacctccttcaaatccctaaggactgtgctcccaatccgttcatgcattag

SEQ ID NO: 7137 - DNA, 1080 bp, Homo sapiens
  SIMILAR (1)..(240): 951254mologous to Cloning vector pZC320 SopA,accession number U26464,Smith-Waterman Score=377.
atgaaactcatggaaacacttaaccagtgcataaacgctggtcatgaaatgacgaaggctatcgccattgcacagtttaatgatgacagcccggaagcgaggaaaataacccggcgctggagaataggtgaagcagcggatttagttggggtttcttctcaagctatcagagatgccgagaaagcagggcgactaccgcacccggatatggaaaattcgagggaccggtttgagcaacgtgggttcgagcctgatgtacgtattttgcttacgaaatacagcaatagtaatggctctcagtccccgtggatggaggagcaaattcgggatgcctggggaagcatggttctaaaaaatgttgtacgtgaaacggatgaagttggtaaagaccccaggcccctgccgtatctgggccatgacgagccctacacatttgacatcaacctctctgttaacctgaaaagtatggttgtaggggggaccgacatgggccaggagcctctgaagcaaatgggtgcctgggggcccttgtccctgaaggctatgtttggattcttcatccggggctatgggtttttcacaccatttggcaggactctttttccacttggatttggttcaaccccacctttcacctttccgcttttgacaaagaccattggggtatttattctcgataagctcatggagcggcgtaaccgtcgcacaggaaggacagagaaagcgcggatctgggaagtgacggacagaacggtcaggacctggattggggaggcgggtgccgccgctgctgctgacggtgtgacgttctctgtttcggtcacaccacatacgttccgccattcctatgcgatgcacatgctgtatgccggtataccgctgaaagatcttcaaagcctgatgggacataaatccatcagttcaacggaaggctacaccaaagatttttcgctggatgtgggtggcccggcaccgggtgcaattttgcgatgcccggagtctgatgcggttggcgatgttgaaacaattattctgagaataaaaaaccttggccttttttttgtaaaatgtgggaactga

SEQ ID NO: 7138 - DNA, 418 bp, Homo sapiens
atgaaactcatggaaacacttaaccagtgcataaacgctggtcatgaaatgacgaaggctatcgccattgcacagtttaatgatgacagcccggaagcgaggaaaataacccggcgctggagaataggtgaagcagcggatttagttggggtttcttctcaggctatcagagatgccgaagaaagcaggcgactaccgcacccggatatggaaattcgaggacgggttgagcaacgtgttgggtatacaattgaacaaattaatcatatgcgtgatgtgtttgcagggatatttttcgcctaccggaatctgggcttgttacggcccaaccctctttacgtgaaagtgcctatggattatcgggcgtttataccagagttccaaatcgcatggaatggatccaccagtctcttgccca

SEQ ID NO: 7139 - DNA, 843 bp, Homo sapiens
  SIMILAR (1)..(429): 991254mologous to Cloning vector pZC320 SopA,accession number U26464,Smith-Waterman Score=724.
atgaaactcatggaaacacttaaccagtgcataaacgctggtcatgaaatgacgaaggctatcgccattgcacagtttaatgatgacagcccggaagcgaggaaaataacccggcgctggagaataggtgaagcagcggatttagttggggtttcttctcaggctatcagagatgccgagaaagcagggcgactaccgcacccggatatggatattcgaggacgggttgagcaacgtgttggttatacaattgaacaaattaatcatatgcgtgatgtgtttggtacgcgattgcgacgtgctgaagacgtatttccaccggtgatcggggttgctgcccataaaggtggcgtttacaaaacctcagtttctgttcatcttgctcaggatctggctctgaaggggctacgtgttttgctcgtggaaggtaaactggccaccgatccacacctgatgctccgactggccattgaaactgttgttcatgactatgatgtcatagttattgacagcgcgcctaacctgggtatcggcacgattaatgtcgtatgtgctgctgatgtgctgattgttcccacgcctgctgagttgtttgactacacctccgcactgcagtttttcgatatgcttcgtgatcttctcaagaacgttgatcttaaagggttcgagcctgatctatggaataacctaagtactactcctcccagaggaattcctgctctgctccaagttctcactatcagcactcctgatcctgcttcttactctaaggttctgggtttcagtttgatggaaacggaacgtgaacaccaaaagagaagtgatgtctgggagcctctatag

SEQ ID NO: 7140 - DNA, 888 bp, Homo sapiens
  SIMILAR (1)..(276): 981254mologous to Cloning vector pZC320 SopA,accession number U26464,Smith-Waterman Score=469.
atgaaactcatggaaacacttaaccagtgcataaacgctggtcatgaaatgacgaaggctatcgccattgcacagtttaatgatgacagcccggaagcgaggaaaataacccggcgctggagaataggtgaagcagcggatttagttggggtttcttctcaggctatcagagatgccgagaaagcagggcgactaccgcacccggatatggaaattcgaggacgggttgagcaacgtgttggttatacaattgaacaaattaatcatatgcgtaattgtgtttggttctgggttaaggagaccaacagcagaactcaaatgcgcttctcaaacatgaagaaaaagaaagcccgcccaaccgcttcatatcgtattttccttccgcgaaatccctcccaggccacaaggatatttagagggttatctgtcacagatttgagggtggttcgtcacattggttctgacctactgagggcagggatcccggatttgctgccaaaaatagattctccctttccggcaaatgtggtgggagcggctgaagcaaatgacttaatagcacaaagcaggaattctgtagagatggcagccgaggcacggcctgccaaccgaaaggcctgggagcccactggcctgcagggaaagccccacatccgcaaagagctcatgccagccctgtctggagggggcagcagtttgcctgcctctgtggctgagctgactgggtgtctttcttggttcccatccattttgacctcaggcatgatcaatgggctcatgagtggagccatcatgaaggcagaaacagaggctatgcatgagcccagcagcaagaacttcctctcaccagggctgattaaactactgctgctgctaaacatcagattt

SEQ ID NO: 7141 - DNA, 1142 bp, Homo sapiens
  SIMILAR (1)..(462): 931254mologous to Cloning vector pZC320 SopA,accession number U26464,Smith-Waterman Score=741.
atgaaactcatggaaacacttaaccagtgcataaacgctggtcatgaaatgacgaaggctctctccattgcacagtttaatgatgacagcccggaagcgaggaaaataacccggcgctggagaataggtgaagcagcggatttagttggggtttcttctcaggctatcagagatgccgagaaagcagggcgactaccgcacccggatatggaaattcgaggacgggttgagcaacgtgttggttatacaattgaacaaattaatcatatgcgtgatgtgtttggtacgcgattgcgacgtgctgaagacgtatttccaccggtgatcggggttgctgcccataaaggtggcgtttacaaaacctcagtttctgttcatcttgctcaggatctggctctgaaggggctacgtgttttgctcgtggaagggggacccccccggggctcaggcgagaaacgccacctaccaagggggaggggcaccacccttacagggaccacccggcacggcaagggaaagccaaaaaaccgcgaaaaccaaccccaaggaaacgagaccagcggcccccaaacaagaacgaaaaacccgagacacccccccccccaccgagaagaggacgaaaaaagaaacacaaacaaacgccaggcaggagccgcagagcacaagaagcagccgaaaaacacaggaagaggagccccggagagcgggcgagcagccgcagcgacagagaagcaaagacacacagcgacgagcacacaaagccacacaaacaaaaaacacaaaaaagcaaaaggacagaacagagaacaaccgagaacaccaaccgaccaaacgcgccccaaaaccgaaacaaacaagacggaagccacgaccacggagcgaaaagagagcagagaaggaaaaacaagagacggaaaagaaaaagccaacaaggaccagcgaatgagagaggaacggcgggacggaaaggaaaagaaagacgagaaaacagagccgagcaaaacggcggcaaagcgagaagcggcagcaaggcagagcgggaagaaccacgggaacaaaacgaaaaagcgaaacaaagaaagagacgagaacaaggagagagaacgcgagcccgagcaaacacaaccgcccagcggctggac

SEQ ID NO: 7142 - DNA, 1083 bp, Homo sapiens
  SIMILAR (827)..(904): 421254mologous to Cloning vector pZC320 SopA,accession number U26464,Smith-Waterman Score=41.
atgaaactcatggaaacacttaaccagtgcataaacgctggtcatgaaatgacgaaggctatcgccattgcacagtttaatgatgacagcccggaagcgaggaaaataacccggcgctggagaataggtgaagcagcggatttagttggggtttcttctcaggctatcagagatgccgagaaagcagggcgactaccgcacccggatatggaaattcgaggacgggttgagcaacgtgttggttatacaattgaacaaattaatcatatgcgtgatgtgtttggtacgcgattgcgacgtgctgaagacgtatttccaccggtgatcggggttgctgcccataaaggtggcgtttacaaaacctcagtttctgttcatcttgctcaggatctggctctgaaggggctacgtgttttgctcgtggaagggccaggcggtgaagggcaatcagctgttgcccgtctcactggtgaaaagaaaaaccaccctggcgcccaatacgcaaaccgcctctccccgcgcgttggccgattcattaatgcagctggcacgacaggtttcccgactggaaagcgggcagtgagcgcaacgcaattaatggattttgccgatttcggaaccaccatcaaacaggattttcgcctgctggggcaaaccagcgtggaccgcttgctgcaactctctcagggccaggcggtgaagggcaatcagctgttgcccgtctcactggtgaaaagaaaaaccaccctggcgcccaatacgcaaaccgcctctccccgcgcgttggccgattcattaatgcagctggcacgacaggtttcccgactggaaagcgggcaggattttgccgatttcggaaccaccatcaaacaggattttcgcctgctggggcaaaccagcgtggaccgcttgctgcaactctctcagggccaggcggtgaagggcaatcagctgttgcccgtctcactggtgaaaagaaaaaccaccctggcgcccaatacgcaaaccgcctctccccgcgcgttggccgattcattaatgcagctggcacgacaggtttcccgactggaaagcgggcagtga

SEQ ID NO: 7143 - DNA, 1173 bp, Homo sapiens
  SIMILAR (677)..(754): 421254mologous to Cloning vector pZC320 SopA,accession number U26464,Smith-Waterman Score=41.
atgccacagtttaatgatgacagcccgaaagcgaggaaaataacccggcgctggagaataggtgaagcagcggatttagttggggtctcttctcaggctatcagagatgccgagaaagcagggcgactaccgcacccggatatggaaattggaggacgggttgagcaacgtgttggttatacaattgaacaaattaatcatatgcgtgatgtgtttggtacgcgattgcgacgtgctgaagacgtatttccaccggtgatcggggttgctgcccataaaggtggcgtttacaaaacctcagtttctgttcatcttgaagctgccctctgtcgacagctccccatggaagctgagactcttgccccagttcaggctgctgtcaacccacccacgatgaccccagacatgagatccatcactaataatagctcagatcctttcctcaatggggattttgccgatttcggaaccaccatcaaacaggattttcgcctgctggggcaaaccagcgtggaccgcttgctgcaactctctcagggccaggcggtgaagggcaatcagctgttgcccgtctcactggtgaaaagaaaaaccaccctggcgcccaatacgcaaaccgcctctccccgcgcgttggccgattcattaatgcagctggcacgacaggtttcccgactggaaagcgggcaggattttgccgatttcggaaccaccatcaaacaggattttcgcctgctggggcaaaccagcgtggaccgcttgctgcaactctctcagggccaggcggtgaagggcaatcagctgttgcccgtctcactggtgaaaagaaaaaccaccctggcgcccaatacgcaaaccgcctctccccgcgcgttggccgattcattaatgcagctggcacgacaggtttcccgactggaaagcgggcaggattttgccgatttcggaaccaccatcaaacaggattttcgcctgctggggcaaaccagcgtggaccgcttgctgcaactctctcagggccaggcggtgaagggcaatcagctgttgcccgtctcactggtgaaaagaaaaaccaccctggcgcccaatacgcaaaccgcctctccccgcgcgttggccgattcattaatgcagctggcacgacaggtttcccgactggaaagcgggcagtga

SEQ ID NO: 7144 - DNA, 1296 bp, Homo sapiens
  SIMILAR (322)..(897): 831254mologous to Erwinia chrysantum RepE,accession number AF239688,Smith-Waterman Score=832.
atgaaactcatggaaacacttaaccagtgcataaacgctggtcatgaaatgacgaaggctatcgccattgcacagtttaatgatgacagcccggaagcgaggaaaataacccggcgctggagaataggtgaagcagcggatttagttggggtttcttctcaggctatcagagatgccgagaaagcagggcgactaccgcacccggatatggaaattcgaggacgggttgagcaacgtgttggttatacaattgaacgggtttctctagagtcccagtgcaaggattcaagcctagtgtcaagtgtacaaatgaggtacccaggtcacagaaaggaacatgacggtatctgcgagatccatgttgctaaatatgctgaaatattcggattgacctctgcggaagccagtaaggatatacggcaggcattgaagagtttcgcggggaaggaagtggttttttatcgccctgaagaggatgccggcgatgaaaaaggctatgaatcttttccttggtttatcaaacgtgcgcacagtccatccagagggctttacagtgtacatatcaacccatatctcattcccttctttatcgggttacagaaccggtttacgcagtttcggcttagtgaaacaaaagaaatcaccactccgtatgccatgcgtttatacgaatccctgtgtcagtatcgtaagccggatggctcaggcatcgtctctctgaaaatcgactggatcatagagcgttaccagctgcctcaaagttaccagcgtatgcctgacttccgccgccgcttcctgcaggtagattttaggctcccagcttctctgcctctggatgccccaaaccccactcagccctcacctcacacagtgatagctgccatcctgtactcgaggcgaggcccaggcacacacacagatcctgtgtcatcctttagtggtcctgttgtagatgactaccctgcttttctaagtcatgctgcctcttctctctcctggagagtcagagagcagggtttcaaccagatgctaccaacgggtctaggaattaagcctggcggggcaatcaagagcctttatgggatccaggacacagttggtgcaaaatcctttcattcaaattcacttcttcaccccttcccccattatttttttgcgctagtgaacattccaacacttggtatacaagcatcctcctcatcccctccccaaatgacttggctatatctcatatccagaaaggccagctatggaggaccacaggtggaggaggaaaagcagcagcaacaacagtaa

SEQ ID NO: 7145 - DNA, 1182 bp, Homo sapiens
  SIMILAR (686)..(763): 421254mologous to Cloning vector pZC320 SopA,accession number U26464,Smith-Waterman Score=41.
atgaaactcatggaaacacttaaccagtgcataaacgctggtcatgaaatgacgaaggctatcgccattgcacagtttaatgatgacagcccgcaagcgaggaaaataacccggcgctggagaataggtgaagcagcggatttagttggggtttcttctcaggctatcagagatgccgagaaagcagggcgactaccgcacccggatatggaaattcgaggacgggttgagcaacgtgttggttatacaattgaacaaattaatcatatgcgtaatgtgtttggaaacagctatgaccatgattacgaattcgagctcggtacccaacagcttgcaggaaagaagccaccaaagcccaccaaaaccaagatggtgacaagagtaacttctggtcgtcctcagtgctatactcccatcagcaccatggcagtttacaaatgccatgtcaatgtcaggaaggattttgccgatttcggaaccaccatcaaacaggattttcgcctgctggggcaaaccagcgtggaccgcttgctgcaactctctcagggccaggcggtgaagggcaatcagctgttgcccgtctcactggtgaaaagaaaaaccaccctggcgcccaatacgcaaaccgcctctccccgcgcgttggccgattcattaatgcagctggcacgacaggtttcccgactggaaagcgggcaggattttgccgatttcggaaccaccatcaaacaggattttcgcctgctggggcaaaccagcgtggaccgcttgctgcaactctctcagggccaggcggtgaagggcaatcagctgttgcccgtctcactggtgaaaagaaaaaccaccctggcgcccaatacgcaaaccgcctctccccgcgcgttggccgattcattaatgcagctggcacgacaggtttcccgactggaaagcgggcaggattttgccgatttcggaaccaccatcaaacaggattttcgcctgctggggcaaaccagcgtggaccgcttgctgcaactctctcagggccaggcggtgaagggcaatcagctgttgcccgtctcactggtgaaaagaaaaaccaccctggcgcccaatacgcaaaccgcctctccccgcgcgttggccgattcattaatgcagctggcacgacaggtttcccgactggaaagcgggcagtga

SEQ ID NO: 7146 - DNA, 507 bp, Homo sapiens
  SIMILAR (1)..(417): 871254mologous to Cloning vector pZC320 SopA,accession number U26464,Smith-Waterman Score=605.
atgaaactcatggaaacacttaaccagtgcataaacgctggtcatgaaatgacgaaggctatcgccattgcacagtttaatgatgacagcccggaagcgaggaaaataacccggcgctggagaataggtgaagcagcggatttagttggggtttcttctcaggctatcagagatgccgagaaagcagggcgactaccgcacccggatatggaaattcgaggacgggttgagcaacgtgttggttatacaattgaacaaattaatcatatgcgtgatgtgtttggtacgcgattgcgacgtgctgaagacgtatttccaccggtgatcggggttgctgcccataaaggatacctctggccttttaccagggtaactgtgcaatgtggaaagaaaaatgatcagacatttcagggactactggacactggctctgagctgacgttgattccagaggacccaaaacgtcattgtggtcctccagttaaagtaggggcttatggaggtcag

SEQ ID NO: 7147 - DNA, 411 bp, Homo sapiens
  SIMILAR (1)..(261): 911254mologous to Cloning vector pZC320 SopA,accession number U26464,Smith-Waterman Score=406.
atgaaactcatggaaacacttaaccagtgcataaacgctggtcatgaaatgacgaaggctatcgccattgcacagtttaatgatgacagcccggaagcgaggaaaataacccggcgctggagaataggtgaagcagcggatttagttggggtttcttctcaggctatcagagatgccgagaaagcagggcgactaccgcacccggatatggaaattcgaggacgggttgagcaacgccaggcggttaaggccaatcagttgttgccgttcccctgggaaaaagaaaaacccccccggcgcccaatacgcaaaccgccctctccccgcgcgtgggccgattcattaaatgcagctggcacgaccaggtatcccgactggaaaagcggccaagtaggcgcaacgccaaataat

SEQ ID NO: 7148 - DNA, 793 bp, Homo sapiens
  SIMILAR (1)..(648): 971254mologous to Cloning vector pZC320 SopA,accession number U26464,Smith-Waterman Score=1096.
atgaaactcatggaaacacttaaccagtgcataaacgctggtcatgaaatgacgaaggctatcgccattgcacagtttaatgatgacagcccggaagcgaggaaaataacccggcgctggagaataggtgaagcagcggatttagttggggtttcttctcaggctatcagagatgccgagaaagcagggcgactaccgcacccggatatggaaattcgaggacgggttgagcaacgtgttggttatacaattgaacaaattaatcatatgcgtgatgtgtttggtacgcgattgcgacgtgctgaagacgtatttccaccggtgatcggggttgctgcccataaaggtggcgtttacaaaacctcagtttctgttcatcttgctcaggatctggctctgaaggggctacgtgttttgctcgtggaaggtaacgacccccagggaacagcctcaatgtatcacggatgggtaccagatcttcatattcatgcagaagacactctcctgcctttctatcttggggaaaaggacgatgtcacttatgcaataaagcccacttgctggccggggcttgaccttattccttcctggctggctctgcccccgattgaaactgagttaatgggccaatttgatgaaggagacttggcgggtcgtgcagaaatactggggaagacatccctgaagatctggaatgtgacacggagagactcagccctttatcgctgtgaggtcgttgctcgaaatgaccgcaaggaaattgatgagattgtgatcgagttaactgtgcaag

SEQ ID NO: 7149 - DNA, 1502 bp, Homo sapiens
  SIMILAR (1427)..(1501): 551254mologous to Cloning vector pZC320 SopA,accession number U26464,Smith-Waterman Score=61.
accccgatttttcaacacttacctcttggacaagtgttatgttgatccaagtgctaaactcttggatcagactcagaaggaaaaggagtcatgggataaatgaggtttggagaagtggagttctcctgaaaaagaaagagagaaagaaggtgaaggagaagaagaggaacaggaagggggagaaaagaagaagaagaagacgaagaggaagaaggtggaggaggaggaagaagaaaggggaaggggagggggatggggaggaagaggaaggagtaggaggaagagaaggaaggaaagacgagagagtgagaaagaaagaaggaagggaggaaggaaggagtaagaaaggaaagaaagaatgtgtgatggggtgctgctgtaaaagatacccgaaaaatgtggaagcaaccttggaactggataacaggcagaggttggaacggtttggaggactcagaagaagacagaaaaatgtagatctatggaactttgaacttgagagagaggagttagggcatctggtggaagaaatttctaagcagcaaagcgttcaaaaggaagcagagcataaaagtttggaaaacttgcagcctgatgaagccatagaaaagaaaaacccattttctggggagaaattcaagtcagctgcagaaatttgcataagtcacgaggagctgaatgttaatcaccaagacaatggggaacatgtctccagggcatgtcagagacctttgcggcacgcccttgcatcacaggcccaggaagctaggagggaaaagtggttttctggggcaggccgagaccacccctactccatgcagcccttgggacaggtccagttcgttgctaaaagggggcaaggttacgcttgggctactgcttcagggctgcatgtctgcaggtcgactctagaggatcccgaaaataaccggcgctggagaataggtgaagcagcggatttagttggggtttcttctcaggctatcagagatgccgagaaagcagggcatctaccgcacccggatatggaaattcgaggacgggttgagcaacgtgttggttatacaattgaacaaattaatcatatgcgtgatgtgtttggtacgcgattgcgacgtgctgaagacgtatttccaccggtgatcggggttgctgcccataaaggtggcgtttacaaaacctcagtttctgttcatcttgctcaggatctggctctgaaggggctacgtgttttgctcgtggaagcgcgcctaacctgggtatcggcacgattaattgtcgtatgtgctgctgatgtgctgattgtttccacgcctgctgagttgtttgactacacctccgcactgcagtttttcgatatgcttcgtgatctgctccagaacgttgatcttaaagggttcgagcctgatgtacgtattttgcttaccaatacagcaatagtaatggctctcagtcccgttgatggaggagcaattcgggatgctggggaagcatgggtctaa

SEQ ID NO: 7150 - DNA, 1110 bp, Homo sapiens
  SIMILAR (601)..(999): 1001254mologous to Cloning vector pZC320 SopA,accession number U26464,Smith-Waterman Score=700.
atggcatgcacgctgtggcgcgccgtcaaccaattctcatgtgtgacagcttatcatcgaatttctgccattcatccgcttattatcacttattcaggcgtagcaaccaggcgtttaagggcaccaataactgccttaaaaaaattacgccccgccctgccgagagcagagctgacatctgataaagacatgtaccttgacaacagctccattgaagaagcttcaggagtgtatcctattgatgacgatgactacgcttctgcgtctggctcggaatttatgtggatgaagaaaatgcccaaaaatattcaagaaaagcatgggaaaaacaaccaccagtgtctgtgcataaacgctggtcatgaaatgacgaaggctatcgccattgcacagtttaatgatgacagcccggaagcgaggaaaataacccggcgctggagaataggtgaagcagcggatttagttggggtttcttctcaggctatcagagatgccgagaaagcagggcgactaccgcacccggatatggaaattcgaggacgggttgagcaacgtgttggttatacaattgaacaaattaatcatatgcgtgatgtgtttgaagacactctcctgcctttctatcttggggaaaaggacgatgtcacttatgcaataaagcccacttgctggccggggcttgacattattccttcctgtctggctctgcaccgtattgaaactgagttaatgggcaaatttgatgaaggtaaactgcccaccgatccacacctgatgctccgactggccattgaaactgttgctcatgactatgatgtcatagttattgacagcgcgcctaacctgggtatcggcacgattaatgtcgtatgtgctgctgatgtgctgattgttcccacgcctgctgagttgtttgactacacctccgcactgcagtttttcgatatgcttcgtgatctgctcaagaacgttgatcttaaagggttcgagcctgatgtcaatgatgcctaccccacaaggttcctgtgcggccccaccctgacaatgtgtggaaagtactctgtaaataatgtcgtcccagacccttttccggaggctttcattatctga

SEQ ID NO: 7151 - DNA, 2391 bp, Homo sapiens
  SIMILAR (1)..(759): 1001254mologous to Cloning vector pZC320 SopA,accession number U26464,Smith-Waterman Score=1326.
  misc_feature (1)...(2391): n = a,t,c or g
atgaaactcatggaaacacttaaccagtgcataaacgctggtcatgaaatgacgaaggctatcgccattgcacagtttaatgatgacagcccggaagcgaggaaaataacccggcgctggagaataggtgaagcagcggatttagttggggtttcttctcaggctatcagagatgccgagaaagcagggcgnctaccgcacccggatatggaaattcgaggacgggttgagcaacgtgttggttatacaattgaacaaattaatcatatgcgtgatgtgtttggtacgcgattgcgacgtgctgaagacgtatttccaccggtgatcggggttgctgcccataaaggtggcgtttacaaaacctcagtttctgttcatcttgctcaggatctggctctgaaggggctacgtgttttgctcgtggaaggtaacgacccccagggaacagcctcaatgtatcacggatgggtaccagatcttcatattcatgcagaagacactctcctgcctttctatcttggggaaaaggacgatgtcacttatgcaataaagcccacttgctggccggggcttgacattattccttcctgtctggctctgcaccgtattgaaactgagttaatgggcaaatttgatgaaggtaaactgcccaccgatccacacctgatgctccgactggccattgaaactgttgctcatgactatgatgtcatagttattgacagcgcgcctaacctgggtatcggcacgattaatgtccgaatactcttcctaccttactggtctgaagattcctattcatcttataagggagaggcctcttggaagcttgtgcctcatttcccctggacttcacccaatactcctttaccctttgctgattttgctttgtatccttttgctgtgaccgatcatagctgcnacaatgaatgcctgcaggtcgactctagaggatccccccatgataaagtgagagtcaatgaggtgacaaagctgtggaagtcctggggcactggatcagtcaaggtcctgtcactcaaggcagaaccagatggcaagggagcctattggtatagaccacataaggcaacctcttggatctcggagcagagtggagaagtctggagagtgcagctgaaggagccaacagtgaatatcccacagacttgttcagaattacaactccagggtccaaacctattagaaggcaatgttctcaagtttttcgatatgcttcgtgatctgctcaagaacgttgatcttaaagggttcgagcctgatgtacgtattttgcttaccaaatacagcaatagtaatggctctcagtccccgtggatggaggagcaaattcgggatgcctggggaagcatggttctaaaaaatgttgtacgtgaaacggatgaagttggtaaagatacttcgttatcgacaccagctgccccgatggtggattcgttaattgcgcgcgtaggagtaatggctcgcggtaatgccattactttgcctgtatgtggtcgggatgtgaagtttactcttgaagtgctccggggtgatagtgttgagaagacctctcgggtatggtcaggtaatgaacgtgaccaggagctgcttactgaggacgcactggatgatctcatcccttcttttctactgactggtcaacagacaccggcgttcggtcgaagagtatctggtgtcatagaaattgccgatgggagtcgccgtcgtaaagctgctgcacttaccgaaagtgattatcgtgttctggttggcgagctggatgatgagcagatggctgcattattcagattgggtaacgattatcgcccaacaagtgcttatgaacgtgttgcttcaaagagaataaaatacctaggaatccaacttacaagggacatgaaggacctcttcaaggagaactacaaactactgctcaatgaaataaaagaggatacaaacaaatggaagaccattccatgctcatgggtaggaagaatcaatatcgtgaaaatggccatactgcccaaggtaatttatagattcagtgccatccccctcaagctaccaatgactttcttcacagaattggaaaaaactactttaacgttcatatggaaccaaaaaagagcccgtattgccaagtcaatcctaagccaaaagaacaaagctggaggcatcaggctacctgacttcaaactatactacaagactacagtaaccaaaacagcatggtactggtaccacagcagagatagaggccaatggaacagaacagagccttcagaaataatgctgcgtatctacaaccatctgatctttgacaaacctgacaaaacaagcaattggggaaggattcccctgtttaataatgatgctgggaaaactgactag

SEQ ID NO: 7152 - DNA, 2260 bp, Homo sapiens
atgaaactcatggaaacacttaaccagtgcataaacgctggtcatgaaatgacgaaggctatcgccattgcacagtttaatgatgacagcccggaagcgaggaaaataacccggcgctggagaataggtgaagcagcggatttagttggggtttcttctcaggctatcagagatgccgagaaagcagggcgactaccgcacccggatatggaaattcgaggacgggttgagcaacgtgttggttatacaattgaacaaattaatcatatgcgtgatgtgtttggtacgcgattgccacgtgctgaagacgtattttcaccggtgatcggggttgctgcccataaaggtggcgtttacaaaacctcagtttctggttcatcttgctcaggatctggctctgaaggggttacgtgttttgctcgtgaaaggtaacgacccccagggaacagcctcaatgtatcacgaatgggtaccagatcttcatattcatgcagaagacactctcctgcctttctatcttggggaaaaggacgatgtcacttatgcaataaagcccacttgctggccggggcttgacattattccttcctgtctggctctgcaccgtattgaaactgagttaatgggcaaatttaatgaaggtaaactgcccaccgatccacacctgatgctccgactggccattgaaactgttgctcatgactatgatgtcatagttattgacagcgcgcctaacctgggtatcggcacgattaatgtcgtatgtgctgctgatgtgctgattgttcccacgcctgctgagttgtttgactacacctccgcactgcagtttttcgatatgcttcgtgatctgctcaagaacgttgatcttaaagggttcgagcctgatggcacacaggcaaagatgacacaaggtgaacgcaggaacgtccccaaacaagaatacatatctcgtgggtatttcacccttaaagaaaccgtgatcgatacaagcaatggaagcaggatttctttcacgactcgtataaccggcaaagacgtagtaagaaccaccagcattgtaatgctggctaaagtcactttcctgagctgtataacgatgagcgattttactttttctggctatgaattggcctgctttgtaacacactccggtctatcccgtagcgccgggcatatcctgtcgcaatgtgcaaatctcgcggcaacaaccagtgaatacttcattcacaagcctcaccgcctgatcgcggcagaaactggttatagccaatcaaccgtcgttcgtgcattccgtgaagctgtaaacaaaggaattctgtctgtagagattgttatcggcgatcaccgtgaacgtcgcgctaacctgtaccggtttacaccatcctttttggccttcgcacaacaagccaaaaatgcgctgatagaaagcaaattaaagatctcttcagcggcaaccaagtgtgacaatctaaaaacttgtcacacttcacatggatctgtcatggcggaaacagcggttatcaatcacaagaaacgtaaaaatagcccgcgaatcgtccagtcaaacgacctcactgaggcggcatatagtctctcccgggatcaaaaacgtatgctgtatctgttcgttgaccagatcagaaaatctgatggcaccctacaggaacatgacggtatctgcgagatccatgttgctaaatatgctgaaatattcggattgacctctgcggaagccagtaaggatatacggcaggcattgaagagtttcgcggggaaggaagtggttttttatcgccctgaagaggatgccggcgatgaaaaaggctatgaatcttttccttggtttatcaaacgtgcgcacagtccatccagagggctttacagtgtacatatcaacccatatctcattcccttctttatcgggttacagaaccggtttacgcagtttcggcttagtgaaacaaaagaaatcaccaatccgtatgccatgcgtttatacgaatccctgtgtcagtatcgtaagccggatggctcaggcatcgtctctctgaaaatcgactggatcatagagcgttaccagctgcctcaaagttaccagcgtatgcctgacttccgccgccgcttcctgcaggtctgtgttaatgagatcaacagcagaactccaatgcgcctctcatacattgagaaaaagaaaggccgccagacgactcatatcgtattttccttccgcgatatcacttccatgacgacaggatag

SEQ ID NO: 7153 - DNA, 1067 bp, Homo sapiens
  SIMILAR (1)..(888): 1001254mologous to Cloning vector pZC320 SopA,accession number U26464,Smith-Waterman Score=1548.
atgaaactcatggaaacacttaaccagtgcataaacgctggtcatgaaatgacgaaggctatcgccattgcacagtttaatgatgacagcccggaagcgaggaaaataacccggcgctggagaataggtgaagcagcggatttagttggggtttcttctcaggctatcagagatgccgagaaagcagggcgactaccgcacccggatatggaaattcgaggacgggttgagcaacgtgttggttatacaattgaacaaattaatcatatgcgtgatgtgtttggtacgcgattgcgacgtgctgaagacgtatttccaccggtgatcggggttgctgcccataaaggtggcgtttacaaaacctcagtttctgttcatcttgctcaggatctggctctgaaggggctacgtgttttgctcgtggaaggtaacgacccccagggaacagcctcaatgtatcacggatgggtaccagatcttcatattcatgcagaagacactctcctgcctttctatcttggggaaaaggacgatgtcacttatgcaataaagcccacttgctggccggggcttgacattattccttcctgtctggctctgcaccgtattgaaactgagttaatgggcaaatttgatgaaggtaaactgcccaccgatccacacctgatgctccgactggccattgaaactgttgctcatgactatgatgtcatagttattgacagcgcgcctaacctgggtatcggcacgattaatgtcgtatgtgctgctgatgtgctgattgttcccacgcctgctgagttgtttgactacacctccgcactgcagtttttcgatatgcttcgtgatctgctcaagaacgttgatcttaaagggttcgagcctgatggttttcttgacctacattgggagaaaatgctgcccacaacagacccacttggcattatcggccatccccaccatttcaggtttcggcttgccccggaagagttctggttaaaaaggaaagaagaggagccggggggctgtatgttacgtttcgcggttttggcccccccaagtttcag

SEQ ID NO: 7154 - DNA, 1467 bp, Homo sapiens
  SIMILAR (1153)..(1464): 931254mologous to Cloning vector pZC320 SopB,accession number U26464,Smith-Waterman Score=473.
  misc_feature (1)...(1467): n = a,t,c or g
ttaatacacagccaagattgagaagtgtgcttcgcacacgatggagtgggagtactctgcaactgaaccaaggcttgggcaagtgcctaacttcccagcaactctcagaggatgcaaccttctgctcaccgcctggccctgagagagttgcagcaagcggtccacgctggtttgccccagcaggcgaaaatcctgtttgatggtggttccgaaatcgcaaaatcccttataaatcaaaagaatagcccgagatagggttgagtgttgttccagtttggaacaagagtccactattaaagaacgtgggacctccaccgtcaaagggcgaaaaaaccgtctatcaggggcgatgggcccacctacgtggaccccatcaccccaattcaagtttttcttgggggtcgagggtgccgtaaaagcccctaaatcggaaacnccaacacgttgctcaacccgtcctcgaatttccatatccgggtgcggtagtcgccctgctttctcggcatctctgatagcctgagaagaaaccccaactaaatccgctgcttcacctattctccagcgccgggttattttcctcgcttccgggctgtcatcattaaactgtgcaatggcgatagccttcgtcatttcatgaccagcgtttatgcactggttaagtgtttccatgagtttcattctgaacatcctttaatcattgctttgcgtttttttggcggtatttccagcgaggtggactcaatgaccttccagggatttggggtagaaagcgaatatcccacagtcgacgggagttactctggaaggcgagccgcgcaggctgcaccattcgctcgctatgctcggtacacggctcggcgagcgctagtgataataagtgatgaggaaggggccaccaacccccgggttcggttgaaaagttatttggtgtcaaaaaatttgccgatggagttcccgtttgaaaagttgtgccattcccgaaaattattttctgtttggttggccaactggaatatgaccaaaagctgctttttcagaatggggaacgattatcgcccaccaagggttaataacggtgtcagcggtaagccaaccgaatgcaagattgattttgttgaaataatttttgcgtgggtgaatcggaaaattatttccggtgaggcacttcaaaaaccctttccagataaagaggaattacttaaccagcaggcatctacctttcatgagcagaaaaaagctggggtgatatttgaagctgaagaagttatcactcttttaacttctgtgcttaaaacgtcatctgcatcaagaactagtttaagctcacgacatcagtttgctcctgcagccacagtattgtataagggcgataaaatggtgcttaacctggacaggtctcgtgttccaactgagtgtatagagaaaattgaggccattcttaaggaacttgaaaagccagcaccctga

SEQ ID NO: 7155 - DNA, 1272 bp, Homo sapiens
atgaaactcatggaaacacttaaccagtgcataaacgctggtcatgaaatgacgaaggctatcgccattgcacagtttaatgatgacagcccggaagcgaggaaaataacccggcgctggagaataggtgaagcagcggatttagttggggtttcttctcaggctatcagagatgccgagaaagcagggcgactaccgcacccggatatggaaattcgaggacgggttgagcaacgtgttggttatacaattgaacaaattaatcatatgcgtgatgtgtttggtacgcgattgcgacgtgctgaagacgtatttccaccggtgatcggggttgctgcccataaaggtggcgtttacaaaacctcagtttctgttcatcttgctcaggatctggctctgaaggggctacgtgttttgctcgtggaaggtaacgacccccagggaacagcctcaatgtatcacggatgggtaccagatcttcatattcatgcagaagacactctcctgcctttctatcttggggaaaaggacgatgtcacttatgcaataaagcccacttgctggccggggcttgacattattccttcctgtctggctctgcaccgtattgaaactgagttaatgggcaaatttgatgaagaattttgctttgattccaacttcaaacctactactgacctaaacctaatgtctttaggaggagcgactcaagccttcgcgaaagaaaataaccaaaaagcatacaaagaaacgtacggcgtctctcatattacacgccatgatatgctgcagatccctaaacagcagcaaaacgaaaaataccaagtgcctcaattcgatcaatcaacgattaaaaatattgagtctgcaaaaggacttgatgtgtgggacagctggccgctgcaaaacgctgacggaacagtagctgaatacaacggctatcacgttgtgtttgctcttgcgggaagcccgaaagacgctgatgacacatcaatctacatgttttatcaaaaggtcggcgacaactcaatcgacagctggaaaaacgcgggccgtgtctttaaagacagcgataagttcgacgccaacgatccgatcctgaaagatcagacgcaagaatggtccggttctgcaacctttacatctgacggaaaaatccgtttattctacactgactattccggtaaacattacggcaaacaaagcctgacaacagcgcaggtaaatgtgtcaaaatctgatgacacactcaaaatcaacggggatctttag

SEQ ID NO: 7156 - DNA, 1725 bp, Homo sapiens
  SIMILAR (1057)..(1722): 991254mologous to Cloning vector pZC320 SopB,accession number U26464,Smith-Waterman Score=1090.
atgaaactcatggaaacacttaaccagtgcataaacgctggtcatgaaatgacgaaggctatcgccattgcacagtttaatgatgacagcccggaagcgaggaaaataacccggcgctggagaataggtgaagcagcggatttagttggggtttcttctcaggctatcagagatgccgagaaagcagggcgactaccgcacccggatatggaaattcgaggacgggttgagcaacgtgttggttatacaattgaacaaattaatcatatgcgtgatgtgtttggtacgcgattgcgacgtgctgaagacgtatttccaccggtgatcggggttgctgcccataaaggtggcgtttacaaaacctcagtttctgttcatcttgctcaggatctggctctgaaggggctacgtgttttgctcgtggaagccttgcaccagggattttctaaatctttctttctccccgcctatggcaggaccaccctggacgttctacagtccacagagttcagcccatcagggagtgagactggaagcccatgtgagaagtggggcctggtgccggggtctggagaaggggcttacacaggtccctgggcagccggggtctgggctgtgggcaggggtctgggtctaccagctgtgctctgcctgcagcccctctgtcgctcagaaatcccagacatacaaccagccaagctggaattgcgtgaatatgttcgccgaagcactggacatcatagcgatgctttacctgaattactgcccgccaaatacagtaatggctacgaattaaaagaagctctgcactatattcacgaaccaccgattgatgccaatatggtacaactcaatcaaggctcacatcctgcacagcagcgattgatttttgaagaactggtcgcgcatcaaatcagcttacttacacgtcgtgcttatattcgacaaatagcagcacctcgctttagcagcagcaaagttttagcaaagcgccttttagatgccctgcctttccagatgaccaacgcacaaaaaagggtttctaaagaaattctacggacaccggcgttcggtcgaagagtatctggtgtcatagaaattgccgatgggagtcgccgtcgtaaagctgcggcgcttaccgaaagtgattatcgtgttctggttggcgagctggatgatgagcagatggctgcattatccagattgggtaacgattatcgcccaacaagtgcttatgaacgtggtcagcgttatgcaagccgattgcagaatgaatttgctggaaatatttctgcgctggctgatgcggaaaatatttcacgtaagattattacccgctgtatcaacaccgccaaattgcctaaatcagttgttgctcttttttctcaccccggtgaactatctgcccggtcaggtgatgcacttcaaaaagcctttacagataaagaggaattacttaagcagcaggcatctaaccttcatgagcagaaaaaagctggggtgatatttgaagctgaagaagttatcactcttttaacttctgtgcttaaaacgtcatctgcatcaagaactagtttaagctcacgacatcagtttgctcctggagcgacagtattgtataagggcgataaaatggtgcttaacctggacaggtctcgtgttccaactgagtgtatagagaaaattgaggccattcttaaggaacttgaaaagccagcaccctga

SEQ ID NO: 7157 - DNA, 1917 bp, Homo sapiens
  SIMILAR (1)..(1098): 921254mologous to Cloning vector pZC320 SopA,accession number U26464,Smith-Waterman Score=1772.
atgaaactcatggaaacacttaaccagtgcataaacgctggtcatgaaatgacgaaggctatcgccattgcacagtttaatgatgacagcccggaagcgaggaaaataacccggcgctggagaataggtgaagcagcggatttagttggggtttcttctcaggctatcagagatgccgagaaagcagggcgactaccgcacccggatatggaaattcgaggacgggttgagcaacgtgttggttatacaattgaacaaattaatcatatgcgtgatgtgtttggtacgcgattgcgacgtgctgaagacgtatttccaccggtgatcggggttgctgcccataaaggtggcgtttacaaaacctcagtttctgttcatcttgctcaggatctggctctgaaggggctacgtgttttgctcgtggaaggtaacgacccccagggaacagcctcaatgtatcacggatgggtaccagatcttcatattcatgcagaagacactctcctgcctttctatcttggggaaaaggacgatgtcacttatgcaataaagcccacttgctggccggggcttgacattattccttcctgtctggctctgcaccgtattgaaactgagttaatgggcaaatttgatgaaggtaaactgcccaccgatccacacctgatgctccgactggccattgaaactgttgctcatgactatgatgtcatagttattgacagcgcgcctaacctgggtatcggcacgattaatgtcgtatgtgctgctgatgtgctgattgttcccacgcctgctgagttgtttgactacacctccgcactgcagtttttcgatatgcttcgtgatctgctcaagaacgttgatcttaaagggttcgagcctgatgtacgtattttgcttaccaaatacagcaatagtaatggctctcagtccccgtggatggaggagcaaattcgggatgcctggggaagcatggttctaaaaaatgttgtacgtgaaacgaatgaagttggtaaagctgccccgatggtggattcgttaattgcgcgcgtaggagtaatggctcgcggtaatgccattactttgcctgtatgtggtcgggatgtgaagtttactcttgaagtgctccggggtgatagtgttgagaagacctctcgggtatggtcaggtaatgaacgtgaccaggagctgcttactgaggacgcactggatgatctcatcccttcttttctactgactggtcaacagacaccggcgttcggtcgaagagtatctggtgtcatagaaattgccgatgggagtcgccgtcgtaaagctgctgcacttaccgaaagtgattatcgtgttctggttggcgagctggatgatgagcagatggctgcattatccagattgggtaacgattatcgcccaacaagtgcttatgaacgtggtcagcgttatgcaagccgattgcagaatgaatttgctggaaatatttctgcgctggctgatgcggaaaatatttcacgtaagattattacccgctgtatcaacaccgccaaattgcctaaatcagttgttgctcttttttctcaccccggtgaactatctgcccggtcaggtgatgcacttcaaaaagcctttacagataaagaggaattacttaagcagcaggcatctaaccttcatgagcagaaaaaagctggggtgatatttgaagctgaagaagttatcactcttttaacttctgtgcttaaaacgtcatctgcatcaagaactagtttaagctcacgacatcagtttgctcctggagcgacagtattgtataagggcgataaaatggtgcttaacctggacaggtctcgtgttccaactgagtgtatagagaaaattgaggccattcttaaggaacttgaaaagccagcaccctga

SEQ ID NO: 7158 - DNA, 2682 bp, Homo sapiens
  SIMILAR (1264)..(2679): 1001254mologous to Cloning vector pBACe3.6 levansucrase,accession number U80929,Smith-Waterman Score=2482.
atgaaactcatggaaacacttaaccagtgcataaacgctggtcatgaaatgacgaaggctatcgccattgcacagtttaatgatgacagcccggaagcgaggaaaataacccggcgctggagaataggtgaagcagcggatttagttggggtttcttctcaggctatcagagatgccgagaaagcagggcgactaccgcacccggatatggaaattcgaggacgggttgagcaacgtgttggttatacaattgaacaaattaatcatatgcgtgatgtgtttggtacgcgattgcgacgtgctgaagacgtatttccaccggtgatcggggttgctgcccataaaggtggcgtttacaaaacctcagtttctgttcatcttgctcaggatctggctctgaaggggctacgtgttttgctcgtggaaggtaacgacccccagggaacagcctcaatgtatcacggatgggtaccagatcttcatattcatgcagaagacactctcctgcctttctatcttggggaaaaggacgatgtcacttatgcaataaagcccacttgctggccggggcttgacattattccttcctgtctggctctgcaccgtattgaaactgagttaatgggcaaatttgatgaaggtaaactgcccaccgatccacacctgatgctccgactggccattgaaactgttgctcatgactatgatgtcatagttattgacagcgcgcctaacctgggtatcggcacgattaatgtcgtatgtgctgctgatgtgctgattgttcccacgcctgctgagttgtttgactacacctccgcactgcagtttttcgatatgcttcgtgatctgctcaagaacgttgatcttaaagggttcgagcctgatgctgaaacaagccagggagctctgggcacactggcaaatgtagtgacctcccttgccaacctaagtgaatctttgaacaacggtgacacttcagaaatccagccagaggaccagtctgcaagtgagataactcgggcatttgataccttagctaaagcacttaataccacagacagctcctcttctccaagcttggcagatgggatagacaccagtggaggagggagcatccacgtcatcagcagagaccagtcgacacccatcattgaggttgaaggccccctcctttcagacacacacgtcacatttaagtcaattcgggaggatcgaaacggcagatcgcaaaaaacagtacatacagaaggagacatgaacatgaacatcaaaaaaattgtaaaacaagccacagttctgacttttacgactgcacttctggcaggaggagcgactcaagccttcgcgaaagaaaataaccaaaaagcatacaaagaaacgtacggcgtctctcatattacacgccatgatatgctgcagatccctaaacagcagcaaaacgaaaaataccaagtgcctcaattcgatcaatcaacgattaaaaatattgagtctgcaaaaggacttgatgtgtgggacagctggccgctgcaaaacgctgacggaacagtagctgaatacaacggctatcacgttgtgtttgctcttgcgggaagcccgaaagacgctgatgacacatcaatctacatgttttatcaaaaggtcggcgacaactcaatcgacagctggaaaaacgcgggccgtgtctttaaagacagcgataagttcgacgccaacgatccgatcctgaaagatcagacgcaagaatggtccggttctgcaacctttacatctgacggaaaaatccgtttattctacactgactattccggtaaacattacggcaaacaaagcctgacaacagcgcaggtaaatgtgtcaaaatctgatgacacactcaaaatcaacggagtggaagatcacaaaacgatttttgacggagacggaaaaacatatcagaacgttcagcagtttatcgatgaaggcaattatacatccggcgacaaccatacgctgagagaccctcactacgttgaagacaaaggccataaataccttgtattcgaagccaacacgggaacagaaaacggataccaaggcgaagaatctttatttaacaaagcgtactacggcggcggcacgaacttcttccgtaaagaaagccagaagcttcagcagagcgctaaaaaacgcgatgctgagttagcgaacggcgccctcggtatcatagagttaaataatgattacacattgaaaaaagtaatgaagccgctgatcacttcaaacacggtaactgatgaaatcgagcgcgcgaatgttttcaaaatgaacggcaaatggtacttgttcactgattcacgcggttcaaaaatgacgatcgatggtattaactcaaacgatatttacatgcttggttatgtatcaaactctttaaccggcccttacaagccgctgaacaaaacagggcttgtgctgcaaatgggtcttgatccaaacgatgtgacattcacttactctcacttcgcagtgccgcaagccaaaggcaacaatgtggttatcacaagctacatgacaaacagaggcttcttcgaggataaaaaggcaacatttgcgccaagcttcttaatgaacatcaaaggcaataaaacatccgttgtcaaaaacagcatcctggagcaaggacagctgacagtcaactaa

SEQ ID NO: 7159 - DNA, 1207 bp, Homo sapiens
  SIMILAR (566)..(886): 871254mologous to Cloning vector pZC320 SopA,accession number U26464,Smith-Waterman Score=456.
atgaaactcatggaaacacttaaccagtgcataaacgctggtcatgaaatgacgaaggctatcgccattgcacagtttaatgatgacagcccggaagcgaggaaaataacccggcgctggagaataggtgaagcagcggatttagttggggtttcttctcaggccatcagagatgccgagaaagcagggcgactaccgcacccggatatggaaattcgaggacgggttgagcaacgtgttggttatacaattgaacaaattaatcatatgcgtgatgtgtttggtacgcgactgcgacgtgctgaagacgtatttccaccgggatttggggattttgcccgatttcgggaaccaccatcaaaacaggattttcgccctgttgggccaaaccagcgtggaccgcttgctgcaactctctcagggccaggcggtgaagggcaatcagcttttgcccgtctcactggtgaaaagaaaaaccaccctggcgcccaatacgcaaaccgcctctccccgcgcgttggccgattcattaatgcagctggcacgacaggtttcccgactggaaagcgggcaggctatcagagatgccgagaaagcagggcgactgccgcacccggatatggaaattcgaggacgggttgagcaacgtgttggttatacaattgaacaaattaatcatatgcgtgatgtgtttggtacgcgattgcgacgtgctgaagacgtatttccaccggtgatcggggttgctgcccataaaggtggcgtttacaaaacctcagtttctgttcatcttgctcaggatctggctctgaaggggctacgtgttttgctcgtggaagctgcaagaggactgaaaaaaaggggtctggccgggacagcccaggggcccggcgaacccggggaggcccccaagggcaaaaagggcaaaacagaacccggccacgaaagaaaaggaaattggacggggaaggggccccagatccgggagggaacctcaccgaacccgcccagggaacacgggggcgaatgtgcaccgccccccccgagcgcaaagagaaagcaacccaaagctcagaagagaaaagcaaattcaaacgcgcatccgcggcaaccgaagcctaagaagaagcggcccaaaagacaaaccaacagcagaacaaataccaggagtggtaaacgccagaacaaacagccggaagagccgaaa

SEQ ID NO: 7160 - DNA, 3198 bp, Homo sapiens
  SIMILAR (508)..(1137): 971254mologous to Cloning vector pZC320 SopA,accession number U26464,Smith-Waterman Score=1068.
  misc_feature (1)...(3198): n = a,t,c or g
atggggacaggcaagaagcaagctgcaaacctcagctttgtgatgagtgctcagagacatatgagcactcatcacagtagaggagcaaaaatggcagctagggtcctgcgtggacagtcaggaaaggcccctctgccaagtccttgtgatgccccttcatcagaatatgttccttcaagggacccaggctttagtggttctcctcagagaggtgtggtcaaaacactggcaagacacacccttctcaggcatctccagaatggccccctgctcctgcccagtgtgcgctggcgagtttatgggaaggtgcctggagaggacactctgggaactggggctctgggaaagagaaagtggaaaaataaggcaacttctggaagcatgggcagcagggaggctaacgatagagcagggcttctcaacttcggctctgctgatattcagggcagggccactccttgctggggggactgcagctgtcgagcagcatccctaatctccaatcaggagtgcataaacgctggtcatgaaatgacgaaggctatcgccattgcacagtttaatgatgacagcccggaagcgaggaaaataaccgggcgctggagaataggtgaagcagcggatttagttggggtttcttctcaggctatcagagatgccgagaaagcagggcgactaccgcacccggatatggaaattcgaggacgggttgagcaacgtgttggttatacaattgaacaaattaatcatatgcgtgatgtgtttggtacgcgattgcgacgtgctgaagacgtatttccaccggtgatcggggttgctgcccataaaggtggcgtttacaaaacctcagtttctgttcatcttgctcaggatctggctctgaaggggctacgtgttttgctcgtggaaggtaacgacccccagggaacagcctcaatgtatcacggatgggtaccagatcttcatattcatgcagaagacactctcctgcctttctatcttggggaaaaggacgatgtcaattatgcaataaagcccacttgctggccggggcttgacattattccttcctgtctggctctgcaccgtattgaaactgagttaatgggcaaatttgatgaagagtggctgtgcacccccattgtgaataagacaccggcgttcggtcgaagagtatctggtgtcatagaaattgccgatgggagtcgccgtcgtaaagctgctgcacttaccgaaagtgattatcgtgttctggttggcgagctggatgatgagcagatggctgcattatccagattgggtaacgattatcgcccaacaagtgcttatgaacgtggtcagcgttatgcaagccgattgcagaatgaatttgctggaaatatttctgcgctggctgatgcggaaaatatttcacgtaagattattacccgctgtatcaacaccgccaaattgcctaaatcagttgttgctcttttttcttcaccccgaggtgtagtgagagaagcagctttcaaggtgatttctctgcatggaggttatgtccagatctggaaagcacccagccaggattccgtttctggatcaggtagtgcaatgtcaagagcagaaagaatccagtccaaaccctatgagatgagtaatgttatattcactttacagatggataaattgaggagcagagatgaaacggctgtcgcaagatcactcaggtcggcgccaactcaattgacagttggaaaaaacccgggccgtgtttttaaagacagcgataagttcgacgccaacgatccgatcctgaaagatcagacgcaagaatggtccggttctgcaacctttacatctgacggaaaaatccgtttattctacactgactattccggtaaacattacggcaaacaaagcctgacaacagcgcaggtaaatgtgtcaaaatctgatgacacactcaaaatcaacggagtggaagatcacaaaacgatttttgacggagacggaaaaacatatcagaacgttcagcagtttatcgatgaaggcaattatacatccggcgacaaccatacgctgagagaccctcactacgttgaagacaaaggccataaataccttgtattcgaagccaacacgggaacagaaaacggataccaaggcgaagaatctttatttaacaaagcgtactacggcggcggcacgaacttcttccgtaaagaaagccagaagcttcagcagagcgctaaaaaacgcgatgctgagttagcgaacggcgccctcggtatcatagagttaaataatgattacacattgaaaaaagtaatgaagccgctgatcacttcaaacacgggattttgccgatttcggaaccaccatcaaacaggattttcgcctgctggggcaaaccagcgtggaccgcttgctgcaactctctcagggccaggcggtgaagggcaatcagctgttgcccgtctcactggtgaaaagaaaaaccaccctggcgcccaatacgcaaaccgcctctccccgcgcgttggccgattcattaatgcagctggcacgacaggtttcccgactggaaagcgggcaatcagaaaatctgatggcacctacagggaacatgacggtatctgcgagatccatgttgctaaatatgctgaaatattcggattgacctctgcggaagccagtaaggatatacggcaggcattgaagagtttcgcggggaaggaagtggttttttatcgccctgaagaggatgccggcgatganaaaggctatgaatcttttccttggtttatcaaacgtgcgcacagtccatccagagggctttacagtgtacatatcaacccatatctcattcccttctttatcgggttacagaaccggtttacgcagtttcggcttagtgaaacaaaagaaatcaccaatccgtatgccatgcgtttatacgaatccctgtgtcagtatcgtaagccggatggctcaggcatcgtctctctgaaaatcgactggatcatagagcgttaccagctgcctcaaagttaccagcgtatgcctgacttccgccgccgcttcctgcaggtctgtgttaatgagatcaacagcagaactccaatgcgcctctcatacattgagaaaaacaaaggccgccagacgactcatatcgtattttccttccgcgatatcacttccatgacgacaggatag

SEQ ID NO: 7161 - DNA, 3779 bp, Homo sapiens
  SIMILAR (1)..(888): 1001254mologous to Plasmid F Protein A,accession number M12987,Smith-Waterman Score=1548.
  misc_feature (1)...(3779): n = a,t,c or g
atgaaactcatggaaacacttaaccagtgcataaacgctggtcatgaaatgacgaaggctatcgccattgcacagtttaatgatgacagcccggaagcgaggaaaataacccggcgctggagaataggtgaagcagcggatttagttggggtttcttctcaggctatcagagatgccgagaaagcagggcgactaccgcacccggatatggaaattcgaggacgggttgagcaacgtgttggttatacaattgaacaaattaatcatatgcgtgatgtgtttggtacgcgattgcgacgtgctgaagacgtatttccaccggtgatcggggttgctgcccataaaggtggcgtttacaaaacctcagtttctgttcatcttgctcaggatctggctctgaaggggctacgtgttttgctcgtggaaggtaacgacccccagggaacagcctcaatgtatcacggatgggtaccagatcttcatattcatgcagaagacactctcctgcctttctatcttggggaaaaggacgatgtcacttatgcaataaagcccacttgctggccggggcttgacattattccttcctgtctggctctgcaccgtattgaaactgagttaatgggcaaatttgatgaaggtaaactgcccaccgatccacacctgatgctccgactggccattgaaactgttgctcatgactatgatgtcatagttattgacagcgcgcctaacctgggtatcggcacgattaatgtcgtatgtgctgctgatgtgctgattgttcccacgcctgctgagttgtttgactacacctccgcactgcagtttttcgatatgcttcgtgatctgctcaagaacgttgatcttaaagggttcgagcctgatgagttggacaagctgatctccgaccggcctgaaagctgccggcgccccggcaaaccgggggaaccagaggcccccgtgctgactcacgccaccacagtggccgtggcgcatggctgcctggctgtctcccagctcccaccccagccactgatgaccctgtccctgcagtcagtccccctgcaccaccaggtccagccccaggcacatcttgctccagactctccagcaccagcccagaccccgccactgcacgccctgccggacctcagccccagcccgctcccccaccccgccatgggaagggctcctgtagacttcatcaacatcagcaccgacatgaacactgaggtggatgccctcgacccgagcatcatggacttcgctctgcaggggaacctgtgggaggagatgaaggatgagggattcagcttggacacactgggcgcctttgcagactccccgcttggctgtgacctgggggcctcaggcctaacccctgcctcgggtggcagcgaccagtccttcccagacttgcaggcatcatttcaggcagggatcgtgaacgccatttaccactcagagcagaggcttggagaggtagggttggctgagtgtgtgtcctggagctcagtggcacagctcagctacgctatagccgacaacgcttaccgaatgatgtgtgctgaactaaataaccatttcatcctcatttctggagagagtggggcagggaaaacagaggcctccaagaaaattctcgagtattttgcagtgacctgcccaatgacccagtcactacaaatagcccgtgacagactgctgttctccaacccagtgctggaggcttttggaaatgccagaacgctccggaatgacaactccagcagatttgggaaatacatggatatacaatttgattttcagggcattcccgtaggtgggcatatcatcagttacttgatagagaagtcccgagttgtctaccaaaacgaaggcgagcggaatttccacatcttctaccagctgctggcaggtggcgaagaggagcgcctgtcttacctgggactcgagcgagacccccagctgtataaatacctctcacagtatattcgcactgctttcaaaccaacaggttttggagagggactgatttgcataaacccatcccttcagggacaggagcagatgttgctggttgtgcgggaaggcaaatttgatgacttcctcataaggcatcagatcaaatacctggggctgatggagcacctgcgggtgagacgggctggttttgcataccgaaggaaatacgagcatttcttgcaaaggtttagggacactggggaacaaatggtggacattgagaactatgaggtgaatctctttggaattattgccagtgtcttacacctggggaacattggttttgaagaagacgaccaaggctgtgccactatcccagacacccatgagatcaagtggatagccaaggtgatctgcccgttgacactagaactctctgtctacgctagagatgcaatggcaaaggctgtttatggacgaacgtttacttggctggtcaacaaaatcaattcctccttagttaacaagtgggagccaattaaatatttcaacaacaagatcatctgtgatttggtagaagagagacataaaggaatcatatctattctggatgaagaatgcattcggcctggtcctgctacagacttgagtttcctggagaaattggaagagaaagtgggcaaacatgcacacttcgaaactcaggcaccgtgtatgaaatctaacaatgggctctttgttcatcttgggcacggtcacctggaatgctgtaggcataggtttggttatgccggtactgccgggcctcttgcgggatatcgtccattccgacagcatcgccagtcactatggcgtgctgctagcgctatatgcgttgatgcaatttctatgcgcacccgttctcggagcactgtccgaccgctttggccgccgcccagtcctgctcgcttcgctacttggagccatgtcagctgtccttgctccaggatgctgtttttgacaacggatgttttatagcctttgatgttcattaagaagcttggcgcaaatgttgcctttttatcctcgaagaagcctctgtttgtcatgtagcttgtgataaccacattgttgcctttggcttgcggcacttccacgagcaaaacacgtagccccttcagagccagatcctgagcaagatgaacagaaactgaggttttgtaaacgccacctttatgggcagcaaccccgatcaccggtggaaatacgtcttcagcacgtcgcaatcgcgtaccaaacacatcacgcatatgattaatttgttcaattgtataaccaacacgttgctcaacccgtcctcgaatttccatatccgggtgcggtagtcgccctgctttctcggcatctctgatagcctgagaagaaaccccaactaaatccgctgcttcacctattctccagcgccgggttattttcctcgcttccgggctgtcatcattaaactgtgcaatggcgatagccttcgtcatttcatgaccagcgtttatgcactgggtaaggggttccatgaggttcattctgaacataccttaatcaatggtttgcgggtttttatataancttgcgaattaatgtggagggaccaccaaatcgcagagtttcaaaaacccgagggtgtgttaatataagacaactctccaaagggagtatagaggagcacacccttagncactaatatcattgcgctccccgacccgggacccgacctagggagggacttgcngagacccaaagaaaacgtgtttggaaatacttttaccttagcgcagaga

SEQ ID NO: 7162 - DNA, 2389 bp, Homo sapiens
  SIMILAR (1150)..(1719): 771254mologous to Cloning vector pZC320 SopA,accession number U26464,Smith-Waterman Score=734.
atgaaactcatggaaacacttaaccagtgcataaacgctggtcatgaaatgacgaaggctatcgccattgcacagtttaatgatgacagcccggaagcgaggaaaataacccggcgctggagaataggtgaagcagcggatttagttggggtttcttctcaggctatcagagatgccgagaaagcagggcgactaccgcacccggatatggaaattcgaggacgggttgagcaacgtgttggttatacaattgaacaaattaatcatatgcgtgatgtgtttggtacgcgattgcgacgtgctgaagacgtatttccaccggtgatcggggttgctgcccataaagccaaaggactgactgctctttctcctcaaacagactggaacagaaaaagaaattcaagtaaacctttagcacaagtgcaagaagaagattctgcatggcatccagagtgcctccaaaagactagacaagcctggtgtgacaatctaaaaacttgtcacacttcacatggatctgtcatggcggaaacagcggttatcaatcacaagaaacgtaaaaatagcccgcgaatcgtccagtcaaacgacctcactgaggcggcatatagtctctcccgggatcaaaaacgtatgctgtatctgttcgttgaccagatcagaaaatctgatggcaccctacaggaacatgacggtatctgcgagatccatgttgctaaatatgctgaaatattcggattgacctctgcggaagccagtaaggatatacggcaggcattgaagagtttcgcggggaaggaagtggttttttatcgccctgaagaggatgccggcgatgaaaaaggctatgaatcttttccttggtttatcaaacgtgcgcacagtccatccagagggctttacagtgtacatatcaacccatatctcattcccttctttatcgggttacagaacccgttaacgcagtttcggcttagtgaaacaaaagaaatcaccaatccgtatgccatgcgtttatacgaatccctgtgtcagtatcgtaagccggatggctcaggcatcgtctctctgaaaatcgactggatcatagagcgttaccagctgcctcaaagttaccagcgtatgcctgacttccgccgccgcttcctgcagtgcataaacgctggtcatgaaatgacgaaggctatcgccattgcacagtttaatgatgacagcccggaagcgaggaaaataacccggcgctggagaataggtgaagcagcggatttagttggggtttcttctcaggctatcagagatgccgagaaagcagggcgactaccgcacccggatatggaaattcgaggacgggttgagcaacgtgttggttatacaattgaacaaattaatcatatgcgtgatgtgtttggtacgcgattgcgacgtgctgaagacgtatttccaccggtgatcggggttgctgcccataaaggtggcgtttacaaaaaccttaatttctgttcatcttgctcaagatctggctctgaaggggctacctggtttgcttcggggaaggtaacgacccccaaggaaacaacctcaatgtatcacggatgggtaccagatcttcatattcatgcagaagacactctcctgcctttctatcttggggaaaaggacgatgttcctttatgcaataaaacccacttgctgggccggggcttggcattttttccttccctgtcgggctttgcaccgtattgaaactgagttaatgggcaaatttgatgaaggtaaactgcccaccgatccacacctgatgctccgactggccattgaaactgttgctcatgactatgatgtcatagttattgacagcgcgcctaacctgggtatcggcacgattaatgtcgtatgtgctgctgatgtgctgattgttcccacgcctgctgagttgtttgactacacctccgcactgcagtttttcgatatgcttcgtgatctgctcaagaacgttgatcttaaagggttcgagcctgatgtatttattcgcgataagctcatggagcggcgtaaccgtcgcacaggaaggacagagaaagcgcggatctgggaagtgacggacagaacggtcaggacctggattggggaggcggttgccgccgctgctgctgacggtgtgacgttctctgttccggtcacaccacatacgttccgccattcctatgcgatgcacatgctgtatgccggtataccgctgaaagttctgcaaagcctgatgggacataagtccatcagttcaacggaagtctacacgaaggtttttgcgctggatgtggctgcccggcaccgggtgcagtttgcgatgccggagtctgatgcggttgcgatgctgaaacaattatcctga

SEQ ID NO: 7163 - DNA, 1483 bp, Homo sapiens
atgtgtgaagttaacctcaatcatccaccccaaaaagctggcaaaaaaaatcccgccacccaggggatcaccaaaccaatccacaagcaaagggtggatgcaatgggcctgacatcctgcaggcccgaaaagatccgaaacaccaggatgttcagaatgaaactcatggaaacacttaaccagtgcataaacgctggtcatgaaatgacgaaggctatcgccattgcacagtttaatgatgacagcccggaagcgaggaaaataacccggcgctggagaataggtgaagcagcggatttagttggggtttcttctcaggctatcagagatgccgagaaagcagggcgactaccgcacccggatatggaaattcgaggacgggttgagcaacgtgttggttatacaattgaacaaattaatcatatgcgtgatgtgtttggtacgcgattgcgacgtgctgaagacgtatttccaccggtgatcggggttgctgcccataaacggtggcgtttacaaaacctcagtttctgttcatcttgctcaggatctggctctgaacgggctacgtgttttgctcgtggaagttcagaccaagttgaactccttggcctgcggaggaaaagctcagtgtgcatgtggcaggaggggcggcatatgggagacactgaccagctggctgcacagtcgggaaacctgtcctgccagctgcattaatgaatcggccaacgcgcggggagaggcggtttgcgtattgggcgccagggtggtttttcttttcaccaatgaaaccggcaacagcttgattgcccttcaccggctggcccctgaaagagttgcagcaaagcggtccacgctggttttgccccaccaggcgaaaatcctgtttgatggtggttccgaaatcggcaaaatccgatgcatcttctcgctttctgggaagggaaggaagcctcagggaccgaggctctggcttggaaggaagataaggattaatctgatttatgccatctactttggcttctgtactcaggccagtcagtggttgctgctttccctcttccacgagcaaaacacgtagccccttcagagccagatcctgagcaagatgaacagaaactgaggttttgtaaacgccacctttatgggcagcaaccccgatcaccggtggaaatacgtcttcagcacgtcgcaatcgcgtaccaaacacatcacgcatatgattaatttgttcaattgtataaccaacacgttgctcaacccgtcctcgaatttccatatccgggtgcggtagtcgccctgctttctcggcatctctgatagcctgagaagaaaccccaactaaatccgctgcttcacctattctccagcgccgggttattttcctcgcttccgggctgtcatcattaaactgtgcaatggcgatagccttcgtcatttcatgaccagcgtttatgcactggttaagtgtttccatgagtttcat

SEQ ID NO: 7164 - DNA, 3644 bp, Homo sapiens
  misc_feature (1)...(3644): n = a,t,c or g
atgaaactcatggaaacacttaaccattgcataaacgctggtcatgaaatgacgaaggctgtcgccattgcacagtttaatgatgacagcccggaagcgaggaaaataacccggcgctggagaataggtgaagcagcggatttagttggggtttcttctcaggctatcagagatgccgagaaagcagggcgactaccgcacccggatatggaaattcgaggacgggttgagcaacgtgttggttatacaattgaacaaattaatcatatgcgtgatgtgtttggtacgcgattgcgacgtgctgaagacgtatttccaccggtgatcggggttgctgcccataaaggtggcgtttacaaaacctcagtttctgttcatcttgctcangatctggctctgaaggggctacgtgttttgctcgtggaaggtaacgacccccagggaacagcctcaatgtatcacggatgggtaccagatcttcatattcatgcagaagacactctcctgcctttctatcttggggaaaaggacgatgtcacttatgcaataaagcccacttgctggccggggcttgacattattccttcctgtctggctctgcaccgtattgaaactgagttatggggcaaattgatgaaggcagatccttcatgcctgggcctccacccaccacccactggggcggtcaagccagtagcaggtcagcaactctctggacagagctgcgaagggcaactgaaagcctctctgccactgcccctgcagtggaactacccatgctaccctcagactaataaaggagcaaagaccctacgtgccttatgcacacctccaacaagctgtagtcgacccaaggagaggaggccacatggttcttattatgttgtacgtgtaacgggtgacgttggtaaaggtcagatccggatgagaactgttgttgaacaggccattgatcaacgctcttcaactggtgcctggagaaatgctctttctatttgggaacctgtctgcaatgaaattttctatcgtctgattaaaccacgctgggagattagatgggggaagcgtgcgcctgttattccaaaacatacgctcaatactcaaccggttgaagatacttcgttatcgacaccagctgccccgatggtggattcgttaattgcgcgcgtaggagtaatggctcgcggtaatgccattactttgcctgtatgtggtcgggatgtgaagtttactcttgaagtgctccggggtgatagtgttgagaagacctctcgggtatggtcaggtaatgaacgtgaccaggagctgcttactgaggacgcactggatgatctcatcccttcttttctactgactggtcaacagacaccggcgttcggtcgaagagtatctggtgtcatagaaattgccgatgggagtcgccgtcgtaaagctgctgcacttaccgaaagtgattatcgtgttctggttggcgagctggatgatgagcagatggctgcattatccagattgggtaacgattatcgcccaacaagtgcttatgaacgtggtcagcgttatgcaagccgattgcagaatgaatttgctggaaatatttctgcgctggctgatgcggaaaatatttcacgtaagattattacccgctgtatcaacaccgccaaattgcctaaatcagttgttgctcttttttctcaccccggtgaagctatctgcccggtcaggatgttcagaatgaaactcatggaaacacttaaccagtgcataaacgctggtcatgaaatgacgaaggctatcgccattgcacagtttaatgatgacagcccgggaagcgaggaaaataacccggcgctggagaataggtgaagcagcggatttagttggggtttcttctcaggctatcagagatgccgagaaagcagggcgactaccgcacccggatatggaaattcgaggacgggttgagcaacgtgttggttatacaattgaacaaattaatcatatgcgtgatgtgtttggtacgcgattgcgacgtgctgaagacgtatttccaccggtgatcggggttgctgcccataaagactgggaccacggtccatatcgtatcgtcgtccagtttattaggcggggaccatggtccatctcgtatcggcggtctattattagtctgtgactacgggcctctcgtatcgtcgtctgggatcagcggtcctactcgtatcgtcggtctgattattagtctgggaccaggataccacttgtgttttcggtctgattatcggactgggatcacggatccactttatattggtgatgcgactattcgcgtgagtctacgagtatattctttgccgtcaaggtcaaggattgaacatgtcgtcgctaactgtggaatgatccctaaacagcagcaaaacgaaaaataccaagtgcctcaattcgatcaatcaacgattaaaaatattgagtctgcaaaaggacttgatgtgtgggacagctggccgctgcaaaacgctgacggaacagtagctgaatacaacggctatcacgttgtgtttgctcttgcgggaagcccgaaagacgctgatgacacatcaatctacatgttttatcaaaaggtcggcgacaactcaatcgacagctggaaaaacgcgggccgtgtctttaaagacagcgataagttcgacgccaacgatccgatcctgaaagatcagacgcaagaatggtccggttctgcaacctttacatctgacggaaaaatccgtttattctacactgactattccggagtaatggctcgcggtaatgccattactttgcctgtatgtggtcgggatgtgaagtatactcttgaagtgctccggggtgatagtgttgagaagacctctcgggtatggtcaggtaatgaacgtgaccaggagctgcttactgaggacgcactggatgatctcatcccttcttttctactgactggtcaacagacaccggcgttcggtcgaagagtatctggtgtcatagaaattgccgatgggagtcgccgtcgtaaagctgctgcacttaccgaaagtgattatcgtgttctggttggcgagctggatgatgagcagatggctgcattatccagattgggtaacgattatcgcccaacaagtgcttatgaacgtggtcagcgttatgcaagccgattgcagaatgaatttgctggaaatatttctgcgctggctgatgcggaaaatatttcacgtaagattattacccgctgtatcaacaccgccaaattgcctaaatcagttgttgctcttttttctcaccccggtgaactatctgcccggtcaggtgatgcacttcaaaaagcctttacagataaagaggaattacttatgcagcaggcatctaaccttcatgagcagaaaaaagctggggtgatatttgaagctgaagaagttatcactcttttaacttctgtggctaaaacgtcatctgcatccagaactagtttaagctcacgacatcagtttggctcctggagcgacagtatttgtataagggcgataaaatggtgcttaacctggacatgtctcgtggttcaactggagtgtttagatcgcttgcatgcctgcaggtcgactctagaggatcccccatag

SEQ ID NO: 7165 - DNA, 2727 bp, Homo sapiens
  SIMILAR (997)..(1884): 971254mologous to Cloning vector pZC320 SopA,accession number U26464,Smith-Waterman Score=1511.
atgaaactcatggaaacacttaaccagtgcataaacgctggtcatgaaatgacgaaggctatcgccattgcacagtttaatgatgacagcccggaagcgaggaaaataacccggcgctggagaataggtgaagcagcggatttagttggggtttcttctcaggctatcagagatgccgagaaagcagggcgactaccgcacccggatatggaaattcgaggacgggttgagcaacgtgttggttatacaattgaacaaattaatcatatgcgtgatgtgtttggtacgcgattgcgacgtgctgaagacgtatttccaccggtgatcggggttgctgcccataaaggtggcgtttacaaaacctcagtttctgttcatcttgctcaggatctggctctgaaggggctacgtgttttgctcgtggaagcggttatcaatcacaagaaacgtaaaaatagcccgcgaatcgtccagtcaaacgacctcactgaggcggcatatagtctctcccgggatcaaaaacgtatgctgtatctgttcgttgaccagatcagaaaatctgatggcaccctacaggaacatgacggtatctgcgagatccatgttgctaaatatgctgaaatattcggattgacctctgcggaagccagtaaggatatacggcaggcattgaagagtaaagaggggaaggaagtggttttttatcgccctgaagaggatgccggcgatgaaaaaggctatgaatcttttccttggtttatcaaacgtgcgcacagtccatccagagggctttacagtaaccggtttacgcagtttcggcttagtgaaacaaaagaaatcaccaatccgtatgccatgcgtttatacgaatccctgtgtcagtatcgtaagccggatggctcaggcatcgtctctctgaaaatcgactggatcatagagcgttaccagctgcctcaaagttaccagcgtatgcctgacttccgccgccgcttcctgcagtgcataaacgctggtcatgaaatgacgaaggctatcgccattgcacagtttaatgatgacagcccggaagcgaggaaaataacccggcgctggagaataggtgaagcagcggatttagttggggtttcttctcaggctatcagagatgccgagaaagcagggcgactaccgcacccggatatggaaattcgaggacgggttgagcaacgtgttggttatacaattgaacaaattaatcatatgcgtgatgtgtttggtacgcgattgcgacgtgctgaagacgtatttccaccggtgatcggggttgctgcccataaaggtggcgtttacaaaacctcagtttctgttcatcttgctcaggatctggctctgaaggggctacgtgttttgctcgtggaaggtaacgacccccagggaacagcctcaatgtatcacggatgggtaccagatcttcatattcatgcagaagacactctcctgcctttctatcttggggaaaaggacgatgtcacttatgcaataaagcccacttgctggccggggcttgacattattccttcctgtctggctctgcaccgtattgaaactgagttaatgggcaaatttgatgaaggtaaactgcccaccgatccacacctgatgctccgactggccattgaaactgttgctcatgactatgatgtcatagttattgacagcgcgcctaacctgggtatcggcacgattaatgtcgtatgtgctgctgatgtgctgattgttcccacgcctgctgagttgtttgactacacctccgcactgcagtttttcgatatgcttcgtgatctgctcaagaacgttgatcttaaagggttcgagcctgattgggatgttaaattctcctattattattgtgtgggagtctctgaaattgaggcaataattaacagcttaccaaccaaaaaaagtccagaaacagatggattcacatccaaattctaccagaggtacaaggaggagctggtaccattccttctgaaactattccaatcaacagaaaaagagggaatccttcctaactcattttatgaggccagcatcatcctgataccaaagcctggcagagacacaataaacaaagagaattttagaccaatatccctgatgaacatcaatgcaaaaatcctcaataaaatactggcaaaccgaatccagcagcacatcaaaaagcttatccaccatgatcaagtaggcttcatccgtgggatgcaaggctggttcaacatacacaaatcaataaacgtaatccagcatataaacagaaccaaagacaaaaaccatacgattatctcaatagatgcagaaaaggcctttgacaaaattcgacagcgcttcatgctaaaaactctcagcaaattaggtattgatgggacatatctcaaaataataagagctacttatgacaaacccacagccaatatcatactgaatgggcaaaaactggacgcattccctttgaaaactggcacaagacagggatgccctctctcaccactcctattcaacacagtgttggaagttctggccagggcaatcaggcaggagaaagaaataaagggtattcaattaggaaaagaggaagtcaaattgtccctctttgcagatgacatgactgtatatttagaaaatcccatcgtctcagcccaaaatctccttaagctgataagcaacttcagcaaagtctcaggataa

SEQ ID NO: 7166 - DNA, 3255 bp, Homo sapiens
  SIMILAR (2014)..(2955): 891254mologous to Cloning vector pZC320 SopB,accession number U26464,Smith-Waterman Score=1376.
tttaatgatgacagcccggaagcgaggaaaataacccggcgctggagaataggtgaagcagcggatttagttggggtttcttctcaggctatcagagatgccgagaaagcagggcgactaccgcacccggatatggaaattcgaggacgggttgagcaacgtgttggttatacaattgaacaaattaatcatatgcgtgatgtgtttggtacgcgattgcgacgtgctgaagacgtatttccaccgtttaatgatgacagcccggaagcgaggaaaataacccgccgctggagaataggtgaagcagcggatttagttggggtttcttctcaggctatcagagatgccgagaaagcagggcgatctaccgccacccggatattggaaattcgaggacgggttgagcaacgtgttggttatacaattgaacaaattaatcatatgcgtgatgtgtttggtacgcgattgcgacgtgctgaagacgtatttccaccggtgatcggggttgctgcccataaaggtggcgtttacaaaacctcagtttctgttcatcttgctcaggatctggctctgaaggggctacgtgttttgctcgtggaaggcaggtcttttcctcagacagaggcttgtttactacagtattcctcatgggatgtatcctctgagaagccagctgctctgaataaaaataagtcagaaatgagaggggattttgccgatttcggaaccaccatcaaacaggattttcgcctgctggggcaaaccagcgtggaccgcttgctgcaactctctcagggccaggcggtgaagggcaatcagctgttgcccgtctcactggtgaaaagaaaaaccaccctggcgcccaatacgcaaaccgcctctccccgcgcgttggccgattcattaatgcagctggcacgacaggtttcccgactggaaagcgggcaggccccccaagcccagcccaccggaactccagctgacagggagtgggaacgcagcaagtggaacggcagcccaagttgccactcaggcttctccttcaacacttccctgaaagttagggagcgggctccggctttggccagccaagaaaggggctctcacagtgcagcggctatcagagatgccggagaaagcaggggcgactaccggaaccgggatatgggaaattcgagggacggggttgagcaacgtgtttggttatacaattgaacccacattaatcatatgcgtgatgtgttttggtacgcgaattgcgacggtgcctgaagacgtatattccaccggtgatcggggttgcctgcccataaaggtggcgtttacaaaaccctcatttcttgttcatcttgctcaggatctggctctgaaggggctacctggttttgctcgtggaaggtaacgacccccagggaaacagcctcaatgtatcacggatgggtaccagatcttcatattcatgcagaagacactctcctgcctttctatcttgcgatgaagtcagattgtctcttatacaataaagcccacttgctggccgggggcttgacatttattccttcctgtctggctctgcaccgtattgaaactgagttaatgggcaaatttgatgaaggtaaactgcccaccgatccacacctcatgctccgacaaaccattgaaactgttgctcatgctcatgactatgatgtcatagttattgacagcgcgcctaacctgggtatcggcacgattaatgtcgtatgtgctgctgatgtgcctgattgttcccacgcctgctgagttgtttgactacacctccgcactggcagtttttcgatatgcttcgtgatctgctcaagaacgttgatcttaaagggttcgagcctgatgtacgtattttgcttactacaatacagcaatagtaatggctctcagtccccgtggatggaggagcaaattcgggatgcctggggaagcatggttctaaaaaatgttgtacgtgaaacggatgaagttggtaaaggtcagatccggatgagaactgtttttgaacaggccattgatcaacgctcttcaactgatacttcgttatcgacaccagctgccccgatggtggattcgttaattgcgcgcgtaggagtaatggctcgcggtaatgccattactttgcctgtatgtggtcgggatgtgaagtttactcttgaagtgctccggggtgatagtgttgagaagacctctcgggtatggtcaggtaatgaacgtgaccaggagctgcttactgaggacgcactggatgatctcatcccttcttttctactgactggtcaacagacaccggcgttcggtcgaagagtatctggtgtcatagaaattgccgatgggagtcgccgtcgtaaagctgctgcacttaccgaaagtgattatcgtgttctggttggcgagctggatgatgagcagatggctgcattatccagattgggtaacgattatcgcccaacaagtgcttatgaacgtggtcagcgttatgcaagccgattgcagaatgaatttgctggaaatatttctgcgctggctgatgcggaaaatatttcacgtaagattattacccgctgtatcaacaccgccaaattgcctaaatcagttgttgctcttttttctcaccccggtgaactatctgcccggtcaggtgatgcacttcaaaaagcctttacagataaagaggaattacttaagcagcaggcatctaaccttcatgagcagaaaaaagctggggtgatatttgaagctgaagaagttatcactcttttaacttctgtgcttaaaacgtcatctgcatcaagaactagtttaagctcacgacatcagtttgctcctggagcgacagtattgtataagggcgataaaatgtttatcacagttaaaattgctaaacgcagtcaggcaccgtgtatgaaatctaacaatgcgctcatcgtcatcctcggcaccgtcaccctggatgctgtaggcataggcttggttatgccggtactgccgggcctcttgcgggatatcgtccattccgacagcatcgccagtcactatggcgtgctgctagcgctatatgcgttgatgcaatttctatgcgcacccgttctcggagcactgtccgaccgctttggccgccgcccagtcctgctcgcttcgctacttggagccactatcgactacgcgatcatggcgaccacacccgtcctgtggatctacccactagtcaattcaccatcttgttga

SEQ ID NO: 7167 - DNA, 468 bp, Homo sapiens
  SIMILAR (151)..(402): 921254mologous to Escherichia coli (UDP-N-acetylmuramate: L- alanine ligase) (AA 1-491),accession number X52644,Smith-Waterman Score=405.
atgtaccgcggcgcgctgaaaagcatcctgtccgaactggtacgtcaggatcgtctgatcgttgtcgagaagttctctgtagaagcgccgaaaactaagctgctggcacagaaactgaaagacatggctaaccgggtcgataccagttgcatcgcgtacgtcaaccttgtgcatgcatcgttcctgcatctgcaaccgatggtggcgattgtcaccaatatcgaagccgaccacatggatacctaccagggcgactttgagaatttaaaacagacttttattaattttctgcacaacctgccgttttacggtcgtgcggtgatgtgtgttgatgatccggtgatccgcgaattgttaccgcgagtggggcgtcagaccacgacttacggcttcagcgaagatatcaaatttctcttttctgaagaatattctttaaaatttttatggtttagtactgatgacagttaa

SEQ ID NO: 7168 - DNA, 294 bp, Homo sapiens
  SIMILAR (1)..(225): 861254mologous to Escherichia coli similar to,accession number D90870,Smith-Waterman Score=355.
atgtacgggttctacgactgggaaaacttctataacgggcgccataataaaccatgtagcgagcagcgttatacctttaaaaataccaagccgtatttatcctgggttgacaccggatttagtctctacttgcatgcgtatggcacctacggttctgcgaatcgcgtgaatttcctcgacgatatgttcctgtacggtatcggctacaatttcaccggcagcggttgcaactttatgctgggcagcgagaacttcactcttaccaactggaacgagtacgagtttgacctgtga

SEQ ID NO: 7169 - DNA, 1713 bp, Homo sapiens
  SIMILAR (217)..(957): 691254mologous to Escherichia coli similar to,accession number D90870,Smith-Waterman Score=854.
atgctgtgtacaaagtgggataaactgggcttggagaaaaacgcgggtaaaaataaaaacgcgtacaaatggtatgggtggcccgcaaatgcacctgatgaaccgcatattgaacaattggttggcgagtgccgtgttatgcggcaattaaaacgactcattagccgtattgcacccagcccatccagcgttatggtggttggtgaaagcggcacggcgatacctgttgtatctcatgcagaatttaaaggcggttttgcagatatcggcgtgcattatctggactggaccagccggactaccgaaaaatcgtcgaccaaatcacacaaagatgattttggttatcttgaatttgaaggtggcgctaactttagttggggagaaatgtacgggttcttcgactgggaaaacttctataacggtcgccataataaaccaggtagcgagcagcgttatacctttaaaaataccaaccgtatttacctgggtgacaccggatttaatctctacttgcatgcgtatggcacctacggttctgcgaatcgcgtgaatttccacgacgatatggttcttggccgggttcgggttccaattttaaccggcgggggggtggggggttcaaacccgttctttgctaagccgttataccagatcaaaaccttattacacttggcgacaacggctatgttcgccggctgggttgcaggttacaactttatgctgggcagcgagaaattcactcttaccaactggaacgagtacgagtttgaccgtgacgctacctatgcagcggatttcctgccgttatacgacgttgactgccaggacaatggcaatctggaatatgacacctattcccaaccggaatggaaacataacttgttcgaccattatctggcggtgctttaccgctttaaagatgaaagtggcaaagaacaatttagcggcgcagtggtgaaaacgcgtgaagcaacgccgggtaaagaaatagaagcgatcactcgccgaatgcttgatttcagcccacgactgaaaaaactcgcggactgtccatccccacggcctgtgtttgaggccctgtgcatctgctctatgttagacgccttacttctcctttgtccactggactatcatgcctcctgtgacaattacagctatgcccttctggacccccaaggctttcctctaccacatcgccgactctggggcccctacatcgatgtggacgtccctatgctccacttaatacagcatgcttgggcacaagatgcgctactgtcttgcctatactctgacttactgtacatgtcctccttcccatatcctgcgggtaccctgaccagactgatgggcgtgacgagctacaaccataagaacacactgctgacttactgcatcacactcatgagcacaatcagattcgcttatgacggcgatgaagaaattgcgatgaaatatacggactttctcaaaggagagttatcaatgaatattcgtccattgcatgatcgcgtgatcgtcaagcgtaaagaagttgaaactaaatctgctggcggcatcgttctgaccggctctgcatcggctaaatccacccgcggcgaagtgctggctgtcggcaatggccgtatccttgaaaatggcgaagtgaaaccgctggatgtgaaaattggcgacatcgtatttttcaacgatggctaccggggtgaaatctga

SEQ ID NO: 7170 - DNA, 1588 bp, Homo sapiens
  SIMILAR (408)..(184): 861254mologous to Homo sapiens Human Ksr-1 (kinase suppressor of Ras),accession number W19919,Smith-Waterman Score=324.
ctacccagacatctccaaagattcaagacagttcattcgggctgagccagcccactgggcagactgaccttcaaacaaggcccacccatgacatacaccagatggctctccaagaatctctccagttctcagggtccctaaggtactggacagagctaggaaagcaaacccatttgcttcttcctgcacggtccgtatctcctgctgggtgaggtccttggacacagtgcacttggtgcgcagcccgcgcaggctgccaagagagatgccgatgagcttctgaagctgcccgcactgctgcagcacccggctggctgcggcccctgcgcctccctccgcgatagccgcgtcaccccctccaccgctctccttcttctctcccatcggggccgagcgcagcgcagctctatgctggctgcagagtgggggcaagaagccgcggctggaaaaacctgtggcggagggggaaaaaagccgcggcggcgggggcggaaaggcgtaaaaagccgcggtggcctcggccaaaagccatgacggcaaaatgccggggcggcagggcaagaagccacggcgggaaaaaccttggccgatccctcccctcagtgcaacctctgtgcaagaatgaacttgaacttcattcagtgcaagagtgaacacacacttttctctggctttaaagaacccagcacaaagccagtctgcatggccgcgcctccgctttttgcccgccgcggctttttgccccccaagcgccaaggctttttgaccaccgcggctttttgaccttcgcctctgcgaattttgccgccgtggctttttgcccgccgcggctttttcccccaactggtgcagcggctgtttgccccctgccgctttttgccccccgccgctttttgccccccccgccgccgcggctttttcgctgccatggctttttccccccctgcctcggctttttgacctccgcggcttttttcctcccgccgccgcgacttttcgccctccgccgccgcggctttttgcccttcgccgctgccgcggcttttttcccgaccaggctttttgccccaccgccgacacagctttttgcaccctcgccgccatggctttttgccgccgcggctttttgcccgccgtggctttctgcccccacgccgccgcggctttttgtccccgccgccgcggctttttgctgccgcgactttttgcccccgtcgccgccgctttttcgccaccgcgactttttgcccccgccgccgaggatttttgtccccgccgccgcggctctgagggcgggagcagcagactcggctgccggctctactggcgtccttgggcaggatttgtggagcaggtgcgtggtgggaactgggatggaggctccagggtcccgtgggggtgggggtgggctgcgcgaggacatccccttaccccctgaatttccatctggtccagccctctcatcttgtaggtgaggaaaccgaaggcctgagggagaaatgacttgccaggaacccctgttatcctttcctggatcccttgagtcaaggagtttgagaccaacccggacaatatagtgagaccccat

SEQ ID NO: 7171 - DNA, 1628 bp, Homo sapiens
  SIMILAR (1001)..(1198): 901254mologous to Escherichia coli K12 putative glucarate dehydratase,accession number AE000362,Smith-Waterman Score=321.
atgaccaagcaattagagttgccccagtcgcccggcgaggtccccggttctgattatccgttgctcattgcctgcgcctacattggttttctcacctggggtggcggcttctctggatcaatgcctctgttggctgcaacaccgggcaacccggttgagcatatcgccgggctgatcccggtgggcgatactctgttcagtggttttaacattttcatcactgtggcgttgattgtggtgatgccatttatcacccgcatgatgatgccaaaaccgtctgacgtggtgagtatcgatccaaaactactcatggaagaggctgattttcaaaagcagctaccgaaagatgccccaccatccgagcgactggaagaaagccgcattctgacgttgatcatcggcgcactcggtatcgcttaccttgcgatgtacttcagcgaacatggcttcaacatcaccatcaataccgtcaacctgatgtttatgattgcgggtctgctgctacataaaacgccaatggcttatatgcgtgctatcagcgcggcagcacgcagtactgccggtattctggtgcaattccccttctacgctgggatccaactgatgatggagcattccgttaccgggatagaagcggcaatgctggatctgctggggcagcatctgggggtaaacgtggcatcgctgctgggcgatggtcaacagcgtagcgaagtcgaaatgctcggttatctgttcttcgtcggtaatcgcaaagccacgccgctgccgtatcaaagccagccggatgactcatgcgactggtatcgcctgcgtcatgaagaagcgatgacgccggatgcggtggtgcgcctggcggaagcggcatatgaaaaatatggcttcaacgatttcaaactgaagggcggtgtactggccggggaagaagaggccgagtctattgtggcactggcgcaacgcttcccgcaggcgcgtattacgctcgatcctaacggtgccttggtcgctgaacgaagcgattaaaatcggtaaatacctgaaaggttcgctggcttatgcagaagatccgtgtggtgcggagcaaggtttctccgggcgtgaagtgatggcagagttccgtcgcgcgacaggtctaccgactgcaaccaatatgatcgccaccaactggcgcgaaatgggtcatgcggtgatagcccaatgcggtagatattccacttgccgatccgcacttctggacaatgcaaggttcggtacgtgtggcgcaaatgtgccatgaatttggcctgacctggggttcacactctaacaaccacttcgatatttccctggcgatgtttacccatgtgggcgcggcggcaccgggtaatcctaccgctatcgatacgcactggatttggcaggagggcgattgtcgcctgacccaaaatccgctggagattaaaaagggaaaaattgccgttcctgatgcgcccggtctgggcgtggaactggactgggaacaggtacaaaaggcacatgaggcctataaacgtctgcctggcggtgcgcgtaacgacgcaggtccgatgcagtacctgatccccggctggacctttgaccgtaaacgtcccgttttcggccgtcattga

SEQ ID NO: 7172 - DNA, 656 bp, Homo sapiens
  SIMILAR (324)..(518): 671254mologous to Escherichia coli K12 putative glucarate dehydratase,accession number AE000362,Smith-Waterman Score=219.
tgtcttctcagaaaccaccagccttgaaggccgcggtgagcaaaaaacgtcatcgggaacgcaaggatagccatgatgatcagcgggatcataccgccaacaccggcgttgattggcaggaacagcacgcccgcgccgattgccgtgccgtaaaggccagcatccacatggtgtctgtcttgcgccaggcactacgagagtctttcgacgcaatcgtgctggcgcgtattacgctcgatcctaacggtgcctggtcgctgaacgaagcgattaaaatcggtaaatacctgaaaggttcgctggcttatgcagaagatccgtgtggtctaccgactgcaaccaatatgatcgccaccgactggcggcaaatgggccatacgctctccctgcaatccgttgatatcccgctggcggatccgcatttctggacaatgcaaggggttcctggcaagtcagttctccctcaggccttcggtttcctcacctacaagatgagagggctggaccagatggaaattcgggggggaggggaaatcctgcccaaggtgagggctggaccggggtcctccggctgccgcatcagcgagtgcaggagggagaagcctccaaccgggcgactcgagctcaaggatgcaactccaccagaagtgaactag

SEQ ID NO: 7173 - DNA, 636 bp, Homo sapiens
  SIMILAR (1)..(627): 921254mologous to Escherichia coli hydG,accession number U00006,Smith-Waterman Score=961.
atgcaacacttgttcagtgaaatcgccctcgtcgcgccatcgaaagccacggtattgatcccggccgatcccgccaccggtaaagagatggtcgccagggcgattcacgccagtagcgcacgtagcgaaaacccgctggtaacgctcaactgtgcggcactcaacgaatccttgctggaatttgaattgttcggtcacgaaaaaggggcgtttactggagccgataaacgccgggaagggcgctttgttaaggcggacggcggcacgctgtttctcgatgaaattggcgatatctcgccgatgatgcaggtgcgtctgctgcgtgcgattcaggagcgcgaagttcagcgtgtcggtagcaaccagattatctcggttgatgtccggctgattgcggcgacccatcgcgatcttgccgcagaggtgaatgccgggcgttttcgccaggatctctactatcgcctgaatgtggtggcgattgaagtaccatcgatgcggcaacggcgggaagatatccctctgctggctggccattttatgcagcgctttgccgagcgtaatcgcaaggcggtaaaaggttttacgccccaggcgatggatctgttactcgaataccgaaggccggggatcctctag

SEQ ID NO: 7174 - DNA, 633 bp, Homo sapiens
  SIMILAR (133)..(267): 1001254mologous to Escherichia coli glutamate--cysteine ligase (EC 6.3.2.2),accession number D90891,Smith-Waterman Score= 234.
atgcgcgcgagatcgcccgagtgcctcctgggcggggtggcgcaaggggtggtggggaaggctattcttatggcgggcgcctatggtcctcgctcaggctggcgccgggactatcatgactgcctgtatggggtgcgttcgctggacatcaacccgttctcgccgattggtgtagatgaacagcaggtgcgattcctcgacctgtttatggtctggtgtgcgctggctgatgcaccggaaatgagcagtagcgaacttgcctgtacaccgttaacccagactgctaaggacgggagtaactgcaaagaagtggatgccccacggccctacgtgaccgggagctgcgtggggcttattgcccgacacttaataatagtctcggttgctgataccgacttacgcggccgcgtttacaacgtccactatgcccccgttactattgccagttatgctcatgctttgaacgtttgtgtgtgctttaactcctatgcccttaacgcctgcggccttgctgccctgtacttaaatattgccagccctattgcccgtgccacgtcctcccgcgcctcgcccgctactgctatagaggatcccgaatgtatttctttgttttgttacttcctcgtacagtaa

SEQ ID NO: 7175 - DNA, 1494 bp, Homo sapiens
  SIMILAR (527)..(610): 671254mologous to Escherichia coli maltodextrin phosphorylase,accession number U18997,Smith-Waterman Score=107.
atgctgattccgtcaaaactaagtcgtccggttcgactcgaccataccgtggttcgtgagcgcctgctggctaaactttccggcgcgaacaacttccgcgtggcgctgatcacgagtcctgcgggctacggaaagaccaccctcatttcccagtgggcggcaggcaaaaacgatatcggctggtactcgctggatgaaggtgataaccagcaagagcgtttcgccagctatctcattgccgccgtgcagcaggcaaccaacggtcactgtgcgatatgtgagacgatggcgcaaaaacggcaatatgccagcctgacgtcactcttcgcccagcttttcattgagctggcggaatgcatagcccactttatctgtgatccacgagtcaatgcgcttctttattcgccatcaaccagaaaatctcaccctggtggtgttgtcacgcaaccttccgcaactggcattgccaatctgcgtgttcgtgatcaactgctggaaattggcagtcagcaactggcatttacccatcagcactggatgtgcagtgacgaaagacggacgctggagcccggagtttaccattaccggtcaagcgtggatctccccgttgtcggctatcgtaatggcgtggcgcagccgctgcgtctgtggcaggcgacgcacgcgcatccgtttgatctgactaaatttaacgacggtgatttcttgcgtgccgaacagcagggcatcaatgcggaaaaactgaccaaagttctctatccaaacgacaaccatactgccggtaaaaaactgcgcctgatgcagcaatacttccagtgtgcctgttcggtagcggatattttgcgtcgccatcatctggcggggcgtaaactgcacgaactggcggattacgaagttattcagctgaacgatacccacccaactatcgcgattccagaactgctgcgcgtgctgatcgatgagcaccagatgagctgggatgacgcctgggccattaccagcaaaactttcgcttacaccaaccataccctgatgccagaagcgctggaacgctgggatgtgaaactggtgaaagggcctctgccgcgccacatgcagattattaacgaaattaatactcgctttaaaacgctggacctgcaggacgctgaacaccggccgctgaaaatgcgcggttgcctgctgtgccagtgccacacgctcttccagggtaaacatcggttttttactggggctggcggcaatcgccagaataacgtgatcgaacatctggtggcggcgtcacgatatcgcttcaccaccgccagccgcagacccctgtttactgcgggctttacgctgctgacggcatttttatttcacagcaactttgctgaaggcgtcaactcgctgatgttcatgaaaaacctgacaatttctggcggattcctgctgctggcaattaccggtccgggcgcgtatagcatcgaccgcctgctgaataaaaagtggtaa

SEQ ID NO: 7176 - DNA, 663 bp, Homo sapiens
  SIMILAR (4)..(318): 721254mologous to Escherichia coli maltodextrin phosphorylase,accession number U18997,Smith-Waterman Score=371.
atgactgcaggcagcgaagttcgaatccccgccaatagaactcgcattcctgcaggtcatacggaagctagtctcagggaaaatcagttaagcctatacacccttttccaagggcgtaaactgcacgaactggcggattacgaagttattcagctgaacgatacccacccaactatcgcgattccagaactgctgcgcgtgctgatcgatgagcaccagatgagctgggatgacgcctgggccattaccagcaaaactttcgcttacaccaaccataccctgatgccagaagcgctggaacgctgggatgtgaaactgcagctttttcttacggctgatatcgccgccataacatttagccattccttaatccgcgaatctccgcttgtggacgtggatcgcacggtgtttctttgtgtgagtctgccgttactgcaccgtgtcctgggaagtgtttccctcgacgccgagactgactttgtgcggccaggcgtcgtagtgcgtctcgccggtccatatattccagcggaccccgactccgccaagctgcgcgccctgagtgcctttatcacgatagccgttgtcctgaacgtgagcaggacaagccgcaagcccagcaacatctgtgctcctctgtttgtctgctccatgccctgggcatga

SEQ ID NO: 7177 - DNA, 1322 bp, Homo sapiens
  SIMILAR (560)..(766): 681254mologous to Escherichia coli maltodextrin phosphorylase,accession number U18997,Smith-Waterman Score=217.
acattccgccgactgtggccaaccattgcgcctttcaaagcgggtctgatcgtggcgggcgtagcgttaatcctcaacgcagccagcgataccttcatgttatcgctccttaagccacttcttgatgatggctttggtaaaacagatcgctccgtgctggtgtggatgccgctggtggtgatcgggctgatgattttacgtggtatcaccagctatgtctccagctactgtatctcctgggtatcaggaaaggtggtaatgaccatgcgtcgccgcctgtttggtcacatgatgggaatgccagtttcattctttgacaaacagtcaacgggtacgctgttgtcacgtattacctacgattccgaacaggttgcttcttcttcttccggcgcactgattactgttgtgcgtgaaggtgcgtcgatcatcggcctgttcatcatgatgttccattacagttgggcactgtcgatccatttgattgtgctggcccgattgtttcgattgcgattccgttgtatcgaagcgtttcgaacatcagtaaaaacatgcagaacacctggggcaggcgacgcacgcgcatccgtttattctgactaaatttaaccccgggtattttttggcgtcgccaaacaaccaggggcatcaatgcggaaaaagctggccaaaatttttttttccaaaggccaaccattttgccggtaaaaagctgcgcctgatgcagcaatacttccagtgtgcctgttcggtagcggatattttgcgtccgccatcatctggcggggcgtaaactgcacgaactggcggattacgaagttattcagctgaacgatacccacccaactatcgcgattccagaactgctgcgcgtgctgatcgatgagcaccagatgagctgggatgacgcctgggccattaccagcaaaactttcgcttacaccaaccataccctgatgccagaagcgctggaacgctgggatgtgaaactggtgaaaggcttactgccgcgccacatgcagattattaacgaaattaatactcgctttaaaacgctggtagagaaaacctggccgggcgatgaaaaagtgtgggccaaactggcggtggtgcacgacaaacaagtgcatatggcgaacctgtgtgtggttggcggtttcgcggtgaacggtgttgcggcgctgcactcggatctggtggtgaaagatctgttcccggaatatcaccagctatggccgaacaaattccataacgtcaccaacggtattaccccacgtcgctgggatcaaacagtgcaacccggcactggcggctctgttggataa

SEQ ID NO: 7178 - DNA, 2448 bp, Homo sapiens
  SIMILAR (660)..(115): 1001254mologous to Escherichia coli capsule synthesis regulator component C,accession number M28242,Smith-Waterman Score= 925.
tcatgttcctttgaatttaactaaacgtaacaggatgttaaaacgaaacctggcatttttctttccttcagaaatatgcccacattttatagagaaagctatatattgaggttttaaaatattgacgccatcagcggtacgcaaaatgcagatacccactggcgcggaggcgacaatcttgcgattgaactgctcatgttcttccagtcgcagggcgtcgctttccgccggaatgaaaatacgtcgctcgtacatccgtgcgagagtaaacaatgcagctccggcaagcacattcagcaaaattgcgttaaggatcaacatgcgaatgcgttccagcaccttatcaaccggcaccgaatacacgatgcttagcgatgagggtggcagatttttcttcagcaccagctcccggaacccttccgtatagccaaaccaggagcgttcctgcatccagcgaggatcgcccttaattttactttctggtccggtaagcgaaatcagggtatgaccattttcatcaagaatggtaacccccatcggcaacgtacccggtaagaaaaagttctccatccggatggtctgctcgacacccaaaagcgcctgcaaccggttcgccagataaactggcgtcaacgcgtaaaaatacccgacgccagggcgcgaccttcgcatgttcatcactggtctttccgaaaggctgtaagaaataacttcgttgttgaagagatctattactggagacaaatacagcttgcgcccattgactgcaaattcagtaacatcggtaacccacttctcgtttggccgcgtagccttgaaatctctctcctctgtaagagcggtatcgcttgaccttaatcgctgctttaagtgagagggtcccatcaggcgctgaacagctttatggttaatctgtttcccttctcgatgaagagacagcgttaccctacggtatccgtatcgggctctattctcgtgataaatctcactaatacgctttttaacgtccgcatacttgtcaggcttgctgagagcctttagatgataataaaacgtactgcgcggtatctccgcagcctttttcgtgggatgagctaaggctttcagcttttttagatacataagccgcgtttcaagaaatcgaacttgcctttcaagatcctcaatgcgtcggtcttttgacagctccaatgctgatgccgctttttctggatcaactgatattgcaatgtttcttttggtgccaatcttgagcgcgcgtaaaccagcttctccgcgctcttcatagaccttcagccacctggctacagaaccactaccagcaagcataaagtgagcagcagcctgataagggacatgtgctgctcgatcacagctttcacgacctaatacgcactctggatcagcactaacgcctttaggtttgggaattaaacctttttctccatgtttttcatagagggcaacccatgtcctgacctgggttcgggggacaccaaaacgtgccgagatgatcctgggatcctctagatccatgtcagcggcggcggtcacggtattgatatcaccggcgacagcgcaacggtggataacaagggcaccatgaccgtcaccgatccggagtccatcggtatccagattgacggcgaccaggccatcgtcaataacgaaggcgagagcactatcaccaatggcggcaccggcactcagatcaacggtaacgacgccaccgcgaataacagtggaaaaaccactgttgatggaaaagattccacgggtaccaaaatcgcgggcaatatcggcattgtaaatctggatggtagcctgactgttacaggcggtgcgcatggtgttgagaacattggtgacaacggcacggttaacaacaaaggagatattgttgtttccgatactggatcgattggcgtgctcatcaacggtgaggggccaacaagtatccaataagtgtgggatcggattttgtttcggtcgcagattctcatcaaataccaggcgtttcctgccaggttcaatttcccgcaatggctcgacttgatgtaacgtctgcttacagcgtgtcaccagcacctggtactcatgcgtagcctgctttttccatgccaactcctgctcactgagttcacgaatcgctttcgccggctgccgacaatacaggtaagttaggtaccgagctcgatttatcaactcgggcgtatctgacatctcactttggccatggggcttgaaatgggtaacaagctggcgaaccgtattctgccagagctgaaagatgataaagaaatcagcagccacgatagctcgaccaatggtctgattaaccgctgtacaggtgggcgaagcggcagggtcggcagcaacgtcggtttcggcggggagttcctccgcgaccagcgtcagcaccgtaagggtaccgaggagagttcccat

SEQ ID NO: 7179 - DNA, 696 bp, Homo sapiens
  SIMILAR (175)..(648): 871254mologous to Escherichia coli K12 aspartokinase I, homoserine dehydrogenase I,accession number AE000111,Smith-Waterman Score=701.
atgcgtcggtcttttgacagctccaatgctgatgccgctttttatggatcaactgatattgcaatgtttcttttggtgccaatcttgagcgcgcggtattttggctttgacatattaggggctattccatttcatcgtccaacaaaatgggtgcagtacactgtgtcagtaatactggcgcaagccaaagagccgtttaatctcgggcgcttaatcgccctcgtgaaagagtctcatatgctgagcccgtcacttgttgactgcacttccagccaggcagtggcggatcaatatgccgacatcgtgcgcgaaggtatccacgttgtcacgccgaacaaagaggccaacgcgtcgtcgatggattactaccctcagttgcgttatgcggcggaaaaatcgcggcgtaaattcctgtatgacaccaacgttggggctggattaccggttattgagaacctgcaaaatctgctcaatgcaggtgatgaattgatgcagttctccggcattctttatggttcgctttcttctatcttcggcacgttagccgcaggcatgagtttctccgaggcgaccccgctggcgcgggaaatgggttataccgaaccggacccgcgagatgatctttctggtatggacgttgcgcgtaaacgccgcggtgctcaagcaaatcgttatgcgtaccgcgttccacaatga

SEQ ID NO: 7180 - DNA, 1308 bp, Homo sapiens
  SIMILAR (670)..(1293): 991254mologous to Escherichia coli 100 pct identical to sp:YI5B_ECOLI,accession number AP002527,Smith-Waterman Score=1079.
atgatgccgttaatcgatctagaggatccccgactgctggttaggcgagaaataggaatgcttttacatgtcgattatttggacttggttcatgaaaaggtgacatgtaggggacggaatggaggtcaagatagagagaagacaaccatggagaaggtccgctcatccgggaccatatgtcctcaagcgcctgaagtcgtgaatcactacttcacaactgatgatggttacaggatcatctcggcacgttttggtgtcccccgaacccaggtcaggacatgggttgccctctatgaaaaacatggagaaaaaggtttaattcccaaacctaaaggcgttagtgctgatccagagttgcgtattaaggtcgtgaaagctgtgatcgagcagcacatgtcccttaatcaggctgctgctcactttatgcttgctggtagtggttctgtagccaggtggctgaaggtctatgaagagcgcggagaagctggtttacgcgcgctcaagattggcaccaaaagaaacattgcaatatcagttgatccagaaaaagcggcatcagcattggagctgtcaaaagaccgacgcattgaggatcttgaaaggcaagttcgatttcttgaaacgcggcttatgtatctaaaagagctgaaagccttagctcatcccacgaaaaaggtaacgctgtctcttcatcgagaagggaaacagattaaccataaagctgttcagcgcctgatgggaaccctctcacttaaagcagcgattaaggtcaagcgataccgctcttacagaggagaggtagggcaaaccgcccctaatgttctccaaagagatttcaaggctacgcggccaaacgagaagtgggttaccgatgttactgaatttgcagtcaatgggcgcaagctgtatttgtctccagtaatagatctcttcaacaacgaagttatttcttacagcctttcggaaagaccagtgatgaacatggttgagaatatgctcgatcaggcattcaaaaagcttaatcctcacgagcatcctgttctgcactctgaccagggatggcagtatcgtatgagaagatatcaaaatatccttaaagaacatggtattaaacaaagcatgtccagaaaaggcaattgtctggataatgctgtggtggagtgtttctttggaaccttaaagtcggagtgtttttatcttgatgagttcagtaatataagcgaactgaaggatgctgttacggaatatattgaatactacaacagcagaagaattagcctgaaattaaaaggctctgactccaattga

SEQ ID NO: 7181 - DNA, 3222 bp, Homo sapiens
  SIMILAR (1440)..(1541): 731254mologous to Escherichia coli No definition line found,accession number U00039,Smith-Waterman Score=130.
atgttcatcagcgggctggacgatttttttattgatgtcgtctactgggtacgccgcattaaacgcaagttgagtgtttatcgccgctacccgcgaatgagttaccgcgaactgtataaaccagatgaaaaaccgttagcgattatggttccggcgtggaatgaaacgggcgtcatcggcaatatggccgagctggcggcgaccacgctcgactacgaaaactatcatatctttgttggcacctaccccaacgaccccgatactcagcgtgatgttgacgaagtgtgcgctcgcttcccgaatgtgcataaggtagtctgcgcgcgtcctggccccaccagcaaagccgactgtctgaacaacgtgctggacgccatcacccaatttgagcgtagcgccaatttcgcttttgctggttttattctgcatgacgccgaagatgtgatttcaccgatggaattgcgtctgttcaactatctggtcgagcgtaaagatctgattcagatcccggtgtatccgttcgaacgcgaatggacgcacttcaccagcatgacttacattgatgagttttcagagctgcatggcaaagatgttccggtgcgtgaagccctcgccggacaagtgcccagcgccagggtcggacctgtttcagccgcgcgccgtgaaccggctgtagctgaggatattttgatatcttctcatacgatactgccatccctggtcagagtgcagaacaggatgctcgtgaggattaagctttttgaatgcctgatcgagcatattctcaaccatgttcatcactggtctttccgaaaggctgtaagaaataacttcgttgttgaagagatctattactggagacaaatacagcttgcgcccattgactgcaaattcagtaacatcggtaacccacttctcgtttggccgcgtagccttgaaatctctttggagaacattaggggcggtttgccctacctctcctctgtaagagcggtatcgcttgaccttaatcgctgctttaagatcatctcggcacgttttggtgtcccccgaacccaggtcaggacatgggttgccctctatgaaaaacatggagaaaaaggtttaattcccaaacctaaaggcgttagtgctgatccagagttgcgtattaaggtcgtgaaagctgtgatcgagcagcacatgtcccttaatcaggctgctgctcactttatgcttgctggtagtggttctgtagccaggtggctgaaggtctatgaagagcgcggagaagctggtttacgcgcgctcaagattggcaccaaaagaaacattgcaatatcagttgatccagaaaaagcggcatcagcattggagctgtcaaaagaccgacgcattgaggatcttgaaaggcaagttcgatttcttgaaacgcggcttatgtatctaaaaaagctgaaagccttagctcatcccacgaaaaattcaatcatccgttcgggcaactggcgtttatcgcgaccacgctggttgggctgtacccgattgctcgatcaggcattacggttgatcaaatccggcagctacttcgccattgaaaccttaatgagcgtagccgctattggtgcactgtttattggcgcaacggctgaagctgcgatggtgttgctgctgtttttgattggtgaacgactggaaggctgggccgccagccgcgcgcgtcagggcgttagcgcgttaatggcgctgaaaccagaaaccgccacgcgcctgcgtaagggtgagcgggaagaggtggcgattaacagcctgcgccctggcgatgtgattgaagtcgccgcaggtgggcgtttgcctgccgacggtaaactgctctcaccgtttgccagttttgatgaaagcgccctgaccggcgaatccattccggtggagcgcgcaacgggcgataaagtccctgctggtgccaccagcgtagaccgtctggtgacgttggaagtgctgtcagaaccgggagccagcgccattgaccggattctgaaactgatcgaagaagccgaagagcgtcgcgctcccattgagcggtttatcgaccgtttcagccgtatctatacgcccgcgattatggccgtcgctctgctggtgacgctggtgccaccgctgctgtttgccgccagctggcaggagtggatttataaagggctgacgctgctgctgattggctgcccgtgtgcgttagttatctcaacgcctgcggcgattacctccgggctggcggcggcagcgcgtcgtggggcgttgattaaaggcggagcggcgctggaacagctgggtcgtgttactcaggtggcgtttgataaaaccggtacgctgaccgtcggtaaaccgcgcgttaccgcgattcatccggcaacgggtattagtgaatctgaactgctgacactggcggcggcggtcgagcaaggcgcgacgcatccactggcgcaagccatcgtacgcgaagcacaggttgctgaactcgccattcccaccgccgaatcacagcgggcgctggtcgggtctggcattgaagcgcaggttaacggtgagcgcgtagtgatttgcgctgcacggaacatcccgctgatggcattgtggatacagacgggtcacaaaggcaacggcttccggatcgtccgcgttaacgtggaaaatcggggcctgaaccatcttaccgatatcagtacagtacggcgtagaacgggcatccagcggattagaggtggtgaaaccaacctggttgttgataacgatacgtaccgtaccgccaacttcataaccacgcgctttcgacatgttcagggtttcctgaaccacgccctgcccggtcactgcggcgtcaccgtggatggtgattggcagcactttgttgctgctcggctcatcaagtctgtccagacgggcacgaacagaaccgataactaccgggcttacaatctcaaggtgagacgggttaaacgccagcgccaggtgcaccaggccgccatcggtctggaagtcagacgagaagcccatgtggtatttcacgtcacccgtgccgaggtgttctttatgtttaccggcgaactcgtcgaacaagtcttgcggttttttacccagcacgttcaccagcacgttcagacgaccacggtgcgccatcccgagaaccacttcgcgggtgccgctgttgccagcgtggcggatcatctctttaagcatcgggattaa

SEQ ID NO: 7182 - DNA, 7521 bp, Homo sapiens
atggggctgaacgcgctggatatcgaaacgctgaacaatgacgaacatgcgtgggatgtggtagtcgaagagttcgatggttatcggcaaatctggcgcaaacgtggcgttatgccgttgccagcaagtttggccaagggtttgtgcgccagtgcgagcgagcgttgcttcgcatgcctgcatgtcgttgtgctctggcagcaacactgcgcgcagctgcgtgatgaacattcctggcgttacgaccatcccggtgacgctatctacgcgccgttgttgttaaaacaactgtcggatcgtaaacctgcggattgcgtcgtgaccacagatgtggggcagcaccagatgtgggctgcgcagcacatcgcccacactcgcccggaaaatttcatcacctccagcggtttaggtaccatgggttttggtttaccggcggcggttggcgcacaagtcgcgcgaccgaacgataccgttgtctgtatctccggtgacggctctttcatgatgaatgtgcaagagctgggcaccgtaaaacgcaagcagttaccgttgaaaatcgtcttactcgataaccaacgactagtcattggagaacagatgattgatgtcttagggccggagaaacgcagacggcgtaccacacaggaaaagatcgcaattgttcagcagagctttgaaccggggatgacggtctccctcgttgcccggcaacagtggtgtagcagccagccagttatttctctggcgatcatctcggcacgttttggtgtcccccgaacccaggtcaggacatgggttgccctctatgaaaaacatggagaaaaaggtttaattcccaaacctaaaggcgttagtgctgatccagagttgcgtattaaggtcgtgaaagctgtgatcgagcagcacatgtcccttaatcaggctgctgctcactttatgcttgctggtagtggttctgtagccaggtggctgaaggtctatgaagagcgcggagaagctggtttacgcgcgctcaagattggcaccaaaagaaacattgcaatatcagttgatccagaaaaagcggcatcagcattggagctgtcaaaagaccgacgcattgaggatcttgaaaggcaagttcgatttcttgaaacgcggcttatgtatctaaaaaagctgaaagccttagctcatcccacgaaaaaggctgcggagataccgcgcagtacgttttattatcatctaaaggctctcagcaagcctgacaagtatgcggacgttaaaaagcgtattagtgagatttatcacgagaatagaggccgatacggataccgtagggtaacgctgtctcttcatcgagaagggaaacagattaaccataaagctgtgtcacggacggaccccattgtgttctccaagagagatttcaaggctacgcggccaaacgagaagtgggttaccgatgttactgaatttgcagtcaatgggcgcaagctgtatatgtctccagtaatagatctcttatcatcagcttcgctgtggaaccttgcgggaaagcttatcgatatcactcatggtgaagtcgatttccgcttcctgcgccgccgccagcaggtgaagtacggtgttagtcgatccacccatcgcgatatccagcgtcatggcgttttcaaacgccgccttactggcgatattacgcggcagtgcactttcgtcgttttgctcgtaataacgtttggtcaattcaacaatgcgtttaccagcattaaggaacagctgcttacggtcggcgtgggtcctaaggggccgactggattaccgcgccgtatacgccaggagtgctgcgcggcggcagcatgtgcatgtctttgcccgaacggtgaaagggtgagctttacctataacgaccatgtaatgcatgaactcgatccggcgctggatttgcgaaacgtcggtgttgctgcgccgtttggcccggtcaacgtacaaaagcagcatccgcgtgaatacagcggtagccactggtgcgtgctggtgagcaaaaccacgcccacgccacagcctggcagtgatgaaatcaatcgtgcttatgaagaaggatgggtaggaaatcacgcgctggcatttattggcgacacactttcgccaaagggcgagaaagtgccggagctgtttatcgttgagttaccgcaagatgaagctggctggaaagcggcaggtgatgcgccgttaagcggaacggaaacaaccctgcccgcgccaccgcgtggcgtcgtgcagcgacgtttaacctttacccaccatcgggcttatccggggttagtcaacgtcccgcgccactgggtgcgctgtaatccgcagggtacacaaatcgcgtttttaatgcgagatgataacggcattgtgcaactgtggcttatctcgccacagggcggcgagccgcgccagttaacccataacaaaacggatattcagtctgcatttaactggcatccgtcaggagaatggttgggctttgtgctggataatcgaattgcttgtgcccatgcgcaaagcggcgaggttgagtatttaaccgaacaccacgccaattcaccttctgcggacgccgtcggtccttctcgccggatgccgctggtgcgcaaagatgtactgcatcaaaccgccagtctgaccgggctggtggaggtgttaaaacggcagggaaaaacggtcaccagccaggtgctgatttttgaaatcattggcccctgcgcctccggccattgccagccagttacggattcaaatcaacgagcagatctacttctcccgtcgcgttcgttttgtggaagggaaaccgctgatgctggaagacagctatatgccggtaaaactgttccactgctggcgcggcaaatgaaggtagcggaacacacgccactgctgcggatcacctcgttgtcatatagcgagagcggggagtttttgaattattcagtgatgttcagaaatgccagcgaataccaggaacattaccaacggatagacagtggcgtaagagagcgccgccgcaccgctggttggatgaagattattagcaaacgccagcgccggaggatcggtcatggaacctgccagcatcccgcacatggtcagcattatcgtgcgttatggacctcaaggtatggtcagtacgccgccgttgatttcgcagtcgatatcgctgtcgccatcccagtcgtccaggcgttcttcaatggtcagccagagttgatcagccaggcgatgaaattcactgtcgttcattgttgtatcctgtttttaagtgatggcggcagtatagcggcatggggtcaggtcttcaaagtttgcacctctgcggctgcgttccggcacgattcatccgtcaccggaataatgatgtctctgtgtagcgaaagatttgtctcttcattagggcgcagttacaccacgtctttccctgtttctggtaaacattatgatcaggtgattactaaagtccgtgttgtaccccgtgatggagtaatatgcgtctccaaatggtgcctggacgattttggtctccgggacaaaatatgcattgatggagtagttgatcgccccggaagcatcaaacgaagcctgcgatgtctgatcggcaatcacgcccgccagatagttcgcgatcgcgccagaaagcagcatgtagatgccggtcagaatgcagaatccggcgctcatcaggccaaggccaagagcaaatttcccccagatgcgcacggtacgattacccgcgacactctcttttaccacccacgccaggaacacaccgcacagcataactgcgaaggcattaatcgactggaacatcgcggtcggaacggtataaccaaacatatcgcggttaacgaagcggtcgatataaaggctaatcgagctaccgccctgttgtgcgaaggcccagaacaacatactgaagaaggcttagctgttggtctggctttgcaggggtcactgtctaacctggccgctggcgtgttacttgtcatgttccgcccgttccgtgccggagaatatgttgacctgggcggcgtagccggtactgtgctgagtgtgcagattttctccaccaccatgcgtactgcagacggtaaaattatcgttattccgaacggtaaaattattgccggaaatattattaacttctcccgcgagccagttcgccgtaacgaatttattattggcgtggcgtatgattccgatatcgatcaggttaagcagatcctgaccaatattatccagtctgaagatcgcattttgaaagatcgcgaaatgactgtgcgcctgaacgaacttggtgcatcgtcgattaatttcgtggtccgcgtctggagcaacagcggcgatctgcaaaacgtgtactgggatgtgctggagcgtattaaacgtgaatttgatgccgccggtatcagcttcccgtacccgcaaatggatgtgaactttaagcgggtgaaagaagacaaagctgcgtcttgcacttggggcggctatgatcctaccgctcggtccacaaaatgcttttgtgatgaatcagggcatacgtcgtcagtaccacattatgattgccttactttgtgctatcagcgatttggtcctgatttgcgccgggatttttggtggcagcgcgttattgatgcagtcgccgtggttgctggcgctggtcacctggggcggcgtaaacttcttgctgtgacaaacagactaccgggggaagaagagacggaagaaggaggaggagaagcagagcacgacacgacgcgaacgagggaacacagaaggagcagacaggagacagaggacggagcagcggaagacgacagaaagaggacgaaggacgacgaaggcaggagcgacggagaggcaagagaccgtcagcggagcagagaacgagagaacaacaaggccggaaaggaccgacaagcacgaagcacagccgccaccgagcaacgcaaggcagaagaacccacacacaggacagtactggatgtcccatcagtttcttatggtgtctacgccagtaacacattgatcaatcaacatggcgacatcaatcacacccatgaggtgcttcaggatgacagcaagtgcgagatgattgttggcattgaccacttcatgacggcctcggctaagtattgcgatatcctgttgcccgacctgatgccaacagagcaagaagaccttatctctcatgaatctgcagggaatatgggctatgtgatcctcgcccaacccgcaacctcagcaaaatttgaacgcaaacccatctactggatgctgagtgaagtcgccaaacgcttaggaccagacgtttatcaaacctttactgaaggtcgcagtcagcatgaatggatcaaatatctccatgcgaaaacgaaggaacgtaaccctgagatgcccgactacgaggagatgaaaacgaccgggatctttaagaaaaaatgcccggaagaacactacgtcgctttccgcgcattccgtgaagatccacaggcaaacccgttgaaaacaccttcggggaaaatcgaaatttattctgaacgactggcgaagattgcagatacctgggaattgaaaaaagatgaaattattcatccccttcctgcgtataccccaggttttgatggctgggacgatcccctgcggaaaacctatccactgcagttaacgggcttccattacaaagcgcgtacccactccagctacggcaatattgatgtgttacagcaggcctgcccacaagaggtgtggatcaaccccattgatgctcaggcacgcggtatccgtcatggcgataccgtgcgggtatttaacaataatggagaaatgctgattgccgcaaaagtgactccgcgtattctgcctggcgttaccgccatcgggcaaggtgcgtggcttaaagcggatatgtttggtgaccgggtcgatcacggcggcagtatcaatattctgacctctcaccgcccttcaccgctggcaaagggaaacccgtcgcacagcaatcttgtccagatcgaaaagcctgtcccgagaaatcggtacgatatcgacgaggtggataacatcagcgccgaactgttgcgccactactgcaaagaagtggaaaaataccagaacccgcgcggcggctacttcacgccgggatcgtataccgtttctgctcacgtcccgttgggatcggtggttggcgcgacgccagacggtcgttttgccggagaacagctggcagacggcggcttgtcacccatgctgggccaggacgcacaagggccaacagcggtactgaagtcagtcagtaagctcgataacacgctgctgtctaacggtacgttgctgaacgtgaaattcactccggcgaccctggaagcgccttctttgtcgaactgtcgaaggagatccaggatgacatcatccgccggacagcgcatcagctgtaacgttgtggaaacgcgccgcgatgatgtggcgcgcattttcaacattcagcgttattcactgaatgacggcgagggcattcgtacggtggtcttttttaaaggctgtccgcatctttgcccgtggtgtgctaatccggagtcgatctccggcaaaatccagacggtacgcagagaggcgaaatgtctgcactgtgcgaaatgtttgcgtgatgcggatgaatgcccctccggggcgtttgaacggattggtcgcgatatcagccttgacgctctggaacgggaagtgatgaaagatgacattttctttcgcacgtccggcggcggcgtcacgctttctggcggcgaagtgttaatgcaggcggagtttgctacccgttttttacagcgactgcggctgtggggtgtgtcatgcgccattgaaactgccggagacgcaccagccagcaagctattaccgctggcgaaattgtgcgatgaagtgttgttcgatttaaaaattatggacgcgactcaggcgcgggatgtggtgaagatgaacctgccacgcgtgctggagaatctgcgtttgctggtgaacgtcactggctttggcttcttcgtccgtctggacgacttgttcattgatggtctggtccatgtctcttcgctggacaatgactactatcgctttgaccaggtagggcaacgcctgatgggggaatccagcggccagacttatcgcctgggcgatcgcgtggaagttcgcgtcgaagcggttaatatggacgagcgcaaaatcgactttagcctgatctccagcgaacgcgcaccgcgcaacgtcggtaaaacggcgcgcgagaaagcgaaaaaaggcgatgcaggtaaaaaaggcggcaagcgtcgtcaggtcggtaaaaaggtaaactttgagccagacagcgccttccgcggtgagaaaaaaacgaagccgaaagcggcgaagaaagacgcgagaaaagcgaaaaagccatcggcgaaaacgcagaaaatagctgcagcgaccaaagcgaagcgtgcggcgaagaaaaaagtggcagagtga

SEQ ID NO: 7183 - DNA, 2209 bp, Homo sapiens
ctttgtgccccctatttttgaaaagggcgttccactcctttaagggatccctgcatatcgcgctaggagagtcactaggcgtaacacttatgtaatcgttcccttctcgagaagagacagcgttccctcgggtatccgtatcgccttttattctcgtgataaatctcactaatacgcttttaaccgtccgcatactgtcaaggcttgctgagagctttttcgtgggatgagctaaggctttcagcttttttagatacataagccgcgtttcaagaaatcgaacttgcctttcaagatcctcaatgcgtcggtcttttgacagctccaatgctgatgccgctttttctggatcaactgatattgcaatgtttcttttggtgccaatcttgagcgcgcgtaaaccagcttctccgcgctcttcatagaccttcagccacctggctacagaaccactaccagcaagcataaagtgagcagcagcctgattaagggacatgtgctgctcgatcacagctttcacgaccttaatacgcaactctggatcagcactaacgcctttaggtttgggaattaaacctttttctccatgtttttcatagagggcaacccatgtcctgacctgggttcgggggacaccaaaacgtgccgagatgatcgccgcaatggcgttcatgatcgccggaacggaaagctctgccagcgggatctccgccacctgtttgcgatcgcgcatgataatcacccgatcggcatagcccaccagctcttccagttcggaggagatcaccagcagcgccagaccatcggcgcatagcgtttcaatcaggcggatgatctcggcgtgggcaccaacatcaatgccgcgggttggctcatcgaggatcagaaattgcggtcgggtcagtagccaacgtgaaagcaacactttttgctgattgccgccggagagaaattcaatcggttgttcagttgaaggtgtgcgaatgccaagctggcggataaagcgttcggcaatctcttgctgttctttgcggggaatgggacgtacccagccgcgctgtgcccggagaacgaggatgattgctgcacgctctgtcgcttgttcaccggccagacggccgaagaccaccagttccgccagggagttagaacccagacggtttgcaccgtgcagaccaacagaggaacattcacccacggcgaacagacctttaatgcgggtttcacagttctgatcggtttcgataccttcaactttcacccacttgcctttttcgaggtctttgtagtgctcgaagaagtgagcgatttgcgctttcagcagttcaggcagatcgttaacgtctttaatgtgatcgtattctttgctcagcttgctgtgcggaaccgcaaccagtttcgcatcttcaccggcttcgtcggtcattttcagaacgccaaccggacggcaacggatcacagaacccggcgtccagagacagggtgtggttgatgtaaccgtaattgcatggatagaacatcgcggtggacatgaagcgcccagcggaccaggcgaggacggcatggacgcacccgccatcgcagcgggaacgttcagccccagagaggccagcacgctgccggtccaggtctcctgagtatgcaggttgaattgctgttcgcgtgatgtgccaaaggccacgcgtgtccctttgggaagctggctggcccactgcgccatcctctctttatgttgttccagacgtgcctgcatctctcgctttttacccaccatttcgccgatgatagccgcagattgcaaattttcagcgtaggtttcgttgcgggacttaagcagcagtaccggcgcgatttgctgcaaggcgatgtaaacccccgcatggcgactgctgtcggcaatgatcaggtctggtttcagagcggcaatggcttccaggctcggctgcgcgcgcgttccgacggactgccacggtttcaggtgcgcacgcacttcgggcaggatgcgttttgcatcgttatcgtcggcaataccgatcgggatgacgtccacggcggccagcgcatcggcgaacgagagttccagcaccacaatccgttgtggcgttttttcgagtgttaacgtgccgtgttcgtcctgaaccgtggcggcaaaggcgtggctgatcaccagcagcagggctgcaaaaagaaaacggattaatgcccacat

SEQ ID NO: 7184 - DNA, 1358 bp, Homo sapiens
  SIMILAR (905)..(1342): 971254mologous to Escherichia coli 100 pct identical to sp:YI5B_ECOLI,accession number AP002527,Smith-Waterman Score=736.
aaatccgatcccacacttattggatacttgttggcccctcaccgttgatgagcacgccaatcgatccagtatcggaaacaacaatatctcctttgttgttaaccgtgccgttgtcaccaatgttctcaacaccatgcgcaccgcctgtaacagtcaggctaccatccagatttacaatgccgatattgcccgcgattttggtacccgtggaatcttttccatcaacagtggtttttccactgttattcgcggtggcgtcgttaccgttgatctgagtgccggtgccgccattggtgatagtgctctcgccttcgttattgacgatggcctggtcgccgtcaatctggataccgatggactccggatcggtgacggtcatggtgcccttgttatccaccgttgcgctgtcgccggtgatatcaataccgtgaccgccgccgctgacatggatctagaggatcccaggatcatctcggcacgttttggtgtcccccgaacccaggtcaggacatgggttgccctctatgaaaaacatggagaaaaaggtttaattcccaaacctaaaggcgttagtgctgatccagagtgcgtattaggtcgtgaaagctgtgatcgagcagcacatgtcccttatcaggctggtgctcactttatgcttgctggtagtggttctgtagccaggtggctgaaggtctatgaagagcgcggagaagctggtttacgcgcgctcaagattggcaccaaaagaaacattgcaatatcagttgatccagaaaaagcggcatcagcattggagctgtcaaaagaccgacgcattgaggatcttgaaaggcaagttcgatttcttgaaacgcggcttatgtatctaaaaaagctgaaagccttagctccttccccgaaaaaagtgaaagttctcacgaagctaaggcagttttatcctcttgatgagcttctcagggctgcggagataccgcgcagtacgttttattatcatctaaaggctctcagcaagcctgacaagtatgcggacgttaaaaagcgtattagtgagatttatcacgagaatagaggccgatacggataccgtagggtaacgctgtctcttcatcgagaagggaaacagattaaccataaagctgttcagcgcctgatgggaaccctctcacttaaagcagcgattaaggtcaagcgataccgctcttacagaggagaggtagggcaaaccgcccctaatgttctccaaagagatttcaagggtacgcggccaaacgagaagtgggttaccgatgttactgaatttgcagtcaatgggcgcaagctgtatttgtctccagtaatagatccccgggtaccgagct

SEQ ID NO: 7185 - DNA, 3694 bp, Homo sapiens
  SIMILAR (2105)..(2965): 861254mologous to Escherichia coli 100 pct identical to sp:YI5B_ECOLI,accession number AP002527,Smith-Waterman Score=1254.
atgcggcgtattgctcagcaataccgtcggcacggcaaagacattcaggccgttctgtttgatagcaggcacggcaatgctgttgcccacgctgccgtaaaccacctgcgactgcacggcgacgatatccgcctgcagtgccctactcttatcttaactgcccatgaagaagcccgcatcaacgccatgctggagggattagcacagaaaaaggatttgatatttgtgcgcaacggtgatgaacatacctgctatgaagcggtttctcatctgcgtctgaagctcggcaatacccgtaaccgcatcgacactgccgagcagtttattgataaggttgcttcgtcgtcatcgattactgggaagccgtatattgtgaagatccccggtgaccactctgcacgtggtggcgggtacagaataggctgcaccctagacagtccgatgaggacctcagaggatgcggatcgggctaaaggaaggccaacaagcagcgccggcaggatatcacctaaattcaagcgttcttcccgcgtaccgacgggcgctaccactcaggatgccgaagtggatgatgcgaaatacggcttcgtcgcctctggcacgctgaacccgcaaaaagcgcgcgttctgctgcaactggctctgacgcaaaccaaagatccgcagcagatccagcagatcttcaatactctagaggatccccgagaccggcgtgaaccttctgttggggaccggccaactgctttacaaaccctcgctacggcgcgggtgcggcgacgaacccagatcctgaagtcttcagctgggcggcaacgcaagttgttacagcgatggaagcaacccataaattgggcggtgaaaactatgtcctgtggggcggtcgtgaagatggtggttgagcataaagataaaatcggtttccagggcattgctaccgtgaatgaaatcgctttcccggcgaacactccggtgtacttcaaagtgacctccaactccgtgatgaactccttcttcattccgcgtctgggtagccagatttatgccatggccggtatgcagactcgcctgcatctgatcgccaacgaacccggcacttatgacggtatctccgccagctacagcggcccgggcttctcaggcatgaagttcaaagctattgcaacaccggatcgcgccgcattcgaccagtgggtcgcaaaagcgaagcagtcgccgaacaccatgtctgacatggctgcgttcgaaaaactggccgcgcctagcgaatacaaccaggtggaatatttctccaacgtgaaaccagacttgtttgccgatgtaattaacaagtttatggctcacggtaagagcatggacatgacccagccagaaggtgagcacgcgcacacgaaggtacatctaggccgcattcagtctgcctttttgagcctcggcagcgacaccgcgacggcgctgggcagtcgcgtggcgcgcacacagttgattggtctgctggcgattaccgtgctttgtggtagtgcgacggcaatagttggcccgattgcctttattggcctgatgatgccgcatatggcgcgttggctggtgggtgccgatcatcgctggtcgctgcccgtcacgctacttgctacccctgcccctgctgctgtttgccgatatcatcgggcgcgtgattgtgcccggcgaactgcgcgtttctgtgccaaaatacccttttgaaaagcgccttgaagtcgtgaatcactacttcacaactgatgatggttacaggatcatctcggcacgttttggtgtcccccgaacccaggtcaggacatgggttgccctctatgaaaaacatggagaaaaaggtttaattcccaaacctaaaggcgttagtgctgatccagagttgcgtattaaggtcgtgaaagctgtgatcgagcagcacatgtcccttaatcaggctgctgctcactttatgcttgctggtagtggttctgtagccaggtggctgaaggtctatgaagagcgcggagaagctggtttacgcgcgctcaagattggcaccaaaagaaacattgcaatatcagttgatccagaaaaagcggcatcagcattggagctgtcaaaagaccgacgcattgaggatcttgaaaggcaagttcgatttcttgaaacgcggcttatgtatctaaaaaagctgaaagccttagctcatcccacgaaaaagctctcagcaagcctgacaagtatgcggacgttaaaaagcgtatttagtgagatttatcacgagaatagaggccgatacggataccgtagggtaacgctgtctcttcatcgagaagggaaacagattaaccataaagctgttcagcgcctgatgggaaccctctcacttaaagcagcgattaaggtcaagcgataccgctcttacagaggagaggtagggcaaaccgcccctaatgttctccaaagagatttcaaggctacgcggccaaacgagaagtgggttaccgatgttactgaatttgcagtcaatgggcgcaagctgtatttgtctccagtaatagatctcttcaacaacgaagttatttcttacagcctttcggaaagaccagtgatgaacatggttgagaatatgctcgatcaggcattcaaaaagcttaatcctcacgagcatcctgttctgcactctgaccagggatggcagtatcgtatgagaagatatcaaaatatccttaaagaacatggtattaaacaaagcatgtccagaaaaggcaattgtctggataatgctgtggtggagtgtttctttggaaccttaaagtcggagtgtttttatcttgatgagttcagtaatataagcgaactgaaggatgctgttacggaatatattgaatactacaacagcagaagaattagcctgaaattaaaaggtctgactccaattgaatatcggaatcagacctatatgcctcgtgttaactgtccactttttgatactctaaggattccggacatcggcggcgttgtgcgtgcccgcgctatcgctaagctgctgaacgataccgatatggcaatcatcgacaaacgtcgtccgcgtgcgaacgtttcacaggtgatgcatatcatcggtgacgttgcaggtcgtgactgcgtactggtcgatgatatgatcgacactggcggtacgctgtgtaaagctgctgaagctctgaaagaacgtggtgctaaacgtgtatttgcgtacgcgactcacccgatcttctctggcaacgcggcgaacaacctgcgtaactctgtaattgatgaagtcgttgtctgcgataccattccgctgagcgatgaaatcaaatcactgccgaacgtgcgtactctgaccctgtcagaaaaatatactgccgcacggtttacccgtgacctgattgccgggataaccgtcgggattattgctatcccgctggcgatggcgttggctattggtagtggtgtggcaccccagtacggtttatataccgcagctgttgcggggattgtcattgctctgacgggtgggtcacgctttagcgtttccggtccgactgcggcatttgtggtaattctctatcccgtgtcgcaacagtttggactggcaggactgctggttgcgaccttgctgctcggggatctttttgattctgatgggtctggcacgctttggtcgcctgattga

SEQ ID NO: 7186 - DNA, 4321 bp, Homo sapiens
  SIMILAR (3855)..(3923): 1001254mologous to Escherichia coli K12 putative lipase (EC 3.1.1.-),accession number AE000153,Smith-Waterman Score=115.
atgctgccggttgaagtacgtatcttcccgacggtggaagtcatcgccaacctgcagatgctcgacagctacgccggtttaacgctgccgctgatggcctcggcgaccgctactttcctgttccgccagttctttatgacgctgccggatgagctggtggaagccgcgcggatcgacggcgcatcgccaatgcgcttcttttgcgacatcgtttttccgctctccaaaagtaatctggcggcgctgtttgtgatcacctttatctacggctggaatcagtatttgtggaccgttgttgattattaccgatgtggatctcggcaccaccgtggcagggatcaaagggatgatcgctacaggcgaaggcaccacggaatggaactcagtgatggtggcgatgttgttaacgcttatccctccggtggtgattgttttagtgatgcagcaggcgtggaagctgtcggacgactacatcggcgggcgcggcttcttcaccggcgcgtttgtgggcctgcactgcgaggacatcagcggcgacggctgctacgcggacttcgactacttcacctacgagccggccgggtagcccagcgcgcgcgagagcgcgagcccggcctgctgaagctgctcgcggaaattagccagctccgcgtcgtccacgcgggaggtcagcgtcgacaggctcagggcggcgatgacgcgggactcgtggttccacaccggcaccgccacgcagcgcacgccctgctcgttctcttcgctgtccagggcgtagccttgctcgcggccaaatacccttttgaaaagcgccttgaagtcgtgaatcactacttcacaactgatgatggttacaggatcatctcggcacgttttggtgtcccccgaacccaggtcaggacatgggttgccctctatgaaaaacatggagaaaaaggtttaattcccaaacctaaaggcgttagtgctgatccagagttgcgtattaaggtcgtgaaagctgtgatcgagcagcacatgtcccttaatcaggctgctgctcactttatgcttgctggtagtggttctgtagccaggtggctgaaggtctatgaagagcgcggagaagctggtttacgcgcgctcaagattggcaccaaaagaaacattgcaatatcagttgatccagaaaaagcggcatcagcattggagctgtcaaaagaccgacgcattgaggatcttgaaaggcaagttcgatttcttgaaacgcggcttatgtatctaaaaaagctgaaagccttagctcatcccacgaaaaaggctgcggagataccgcgcagtacgttttattatcatctaaaggctctcagcaagcctgacaagtatgcggacgttaaaaagcgtattagtgagatttatcacgagaatagaggccgatacggataccgtagggtaacgctgtctcttcatcgagaagggaaacagattaaccataaagctgttcagcgcctgatgggaaccctctcacttaaagcagcgattaaggtcaagcgataccgctcttacagaggagaggtagggcaaaccgcccctaatgttctccaaagagatttcaaggctacgcggccaaacgagaagtgggttaccgatgttactgaatttgcagtcaatgggcgcaagctgtatttgtctccagttatagatctctttcaacaacgaagttatttcttacaggctttcgggaaagaaccagtgattgaacctgggttgagaaatatggctcgaatcaggggctttcaaaaagcttaatcctcacgagcatcctgttctgcactctgaccagggatggcagtatcgtatgagaagatatcaaaatatccttaaagaacatggtattacccaaaagcatgtccaaaaaaggcaattgtctggatattgctgtggtggagtgtttattcggacccttaaagtcggagtgtttttatcgtgatgagttcagtaatataagcgaagtgaaggatgctgttccggaatatattgaatactacaacagcagaagaattagcctgaaattaaaaggtctgactccaattgaatatcggaatcagacctatatgcctcgtgtttacctgtccaactttttggggtcagtacaaggtgtgctgcacccattttgttggacgatgaaatggaatagcccctaatatgtcaaagccgaaatccccttttgaaaagcgccttgaagctcgtgaatctctacttcacaactgatgatggttgcaggatcatctcggcacgttttggtgtcccccgaacccaggtcaggacatgggttgccctctatgaaaaacatggagaaaaaggtttaattcccaaacctaaaggcgttagtgctgatccagagttgcgtattaaggtcgtgaaagctgtgatcgagcagcacatgtcccttaatcaggctgctgctcactttatgcttgctggtagtggttctgtagccaggtggctgaaggtctatgaagagcgcggagaagctggtttacgcgcgctcaagattggcaccaaaagaaacattgcaatatcagttgatccagaaaaagcggcatcagcattggagctgtcaaaagaccgacgcattgaggatcttgaaaggcaaggctgcggagataccgggcagtacggttattatcatctaaaggtcttagaagccctgaaagatatgggctactttggtcatagttggggggctgggagtggcatttactctggaaaatggagaaatgcaaaaaccatgttgaagaagaagaaataccccttaaagcttcttaagaattaccttagtggcttgccgctggatgcgattgcccgttatgccgggcaacctgcagtgcttgacgccattgccgctccggcaactaccgggttaagcagtgttccagtgaacggccacaaaataccggcggcgaccggaataccgatactgttgtaccgggtaaaaacgctttgggccgcgctgcgcggtaatcattacacctggcctgccatcgatatcaccctccccggcaatcgccattttcatctgattggcagtattcatatgggtagccacgatatggctcccctgcccacccgtttgctcaaaaagctcaaaaactgtctgccgatggcaaacgctgtatctggttgccccattcatcatattccgcgctccacgccgtatcgtccggaagagggcgttaagaaaaccggtttctctctggtaacgctgaaaaagccgctggagttcaacgccatccagaatcgcctggtagtaacgcggctctaccacatctgccgccaccagcagccagatagcccagcgacgctattttatttgcatggaggcggttttattctcggcaatctcgatacccacgatcgcatcatgcgcctgctggcaagctacagccaatgtacggtgattggtattgattacaccctttcacctgaagcgcgttttccgcaagcgatagaggaaattgtggctgcttgttgttatttccaccagcaggcggaggattatcaaatcaatatgtcccgcattggctttgccggtgattccgcaggtgccatgctggcgctcgccagtgcgttgtggttgcgtgataaacagatcgattgcggtaaagttgcgggcgttttgctgtggtatgggctttacggattacgggattccgtgactcgtcgtctgttgggcggtgtctgggatggcttaacgcaacaggatttgcagatgtacgaagaggcatatttaagcaacgacgcggaccgcgagtcgccgtattactgtctgtttaataatgatctcactcgcgaagcacgctgcacgcctttttgcatattcacggatgatgaaaaccgccgacgaggctcttcgcgacggcgctcagttctttaccgctcagctttagcgatacgcggcaacaagattagccatcatttcgatatgttccggcgtggcattaagcgccggaatatattcatattttttcccgccggcaccgaggaagacctcacggttttgctcggcaatctcttccagcgtctccagacaatccgcagcaaagcccgggcacatcacctgaatatgacctacgcctttttctccgagcattttcagcgtttcgtcggtataaggcatcagccagggttcccgaccaaagcgcgactgaaaggtcatcatcactttttccggtgccatccccaatgcggaagccagttcacgagtcgttgtgcggcaacgttgcgggtaatcatcgccttcatctgcataacgctggggaatgccatgataagagagcagtag

SEQ ID NO: 7187 - DNA, 421 bp, Homo sapiens
  SIMILAR (220)..(285): 311254mologous to Homo sapiens Human Ksr-1 (kinase suppressor of Ras),accession number W19919,Smith-Waterman Score=36.
  misc_feature (1)...(421): n = a,t,c or g
cccgggtcgacgatttcgtgggtggcgcaggggccccggccagcccggggctgtagcagtgcggacagctccagaagctcatcggcatctccattggcagcctgcgcgggctgggcaccaagtgcgctgtgtccaacgacctcaccgagcaggagatacggaccctggagcattgtcccaattccttcttctaatgaagaaatacgcttagttgatgatgcgtttggaaaaatttgtcacatggtcagtgatggctcttgggtggttcgtgttcaggcagcaaaactgttggtaagttatactttttatgtatgtatgaatgcatgtatatatttatttgttttcttttctgtaaagatgaggcnnnnnnnnnnnnnnnnnnnnnnnnnnnnnnnnnnnnnnnnnnnnnnnnnnnnnnnnn

SEQ ID NO: 7188 - DNA, 419 bp, Homo sapiens
  SIMILAR (26)..(214): 771254mologous to Homo sapiens Human Ksr-1 (kinase suppressor of Ras),accession number W19919,Smith-Waterman Score=227.
  misc_feature (1)...(419): n = a,t,c or g
gactctcgggttacgttcactaacgaaggagggcggtggtgggggtgatgtggcggcctttgaggttggcacaggggctgcggccagccgggcgctggggcagtgcgggcagctccagaagctcatcgtcatcttcattggcagcctgtgcgggctgtgcaccaagtgcgctgtgtccaacgacctcacccagcaggagatacagaccccggagatacaacagagaaatgcataatgtccagtcaatttattaaagttccaaagtnnnnnnnnnnnnnnnnnnnnnnnnnnnnnnnnnnnnnnnnnnnnnnnnnnnnnnnnnnnnnnnnnnnnatttcaatatgattaaagcaggagtgaggacacagcgaaagtgagacaaggaaaagagaacaaaataaaacaggagagacagaata

SEQ ID NO: 7189 - DNA, 1395 bp, Homo sapiens
  SIMILAR (1395)..(709): 901254mologous to Homo sapiens putative p150,accession number U93563,Smith-Waterman Score=1071.
ctaggcccctgtggcctgcatagagcggcgctgcctgcggaggcgatgggggagaagaaggatggtggtggtgggggtgatgcggcggccacggagggtggcacaggggctgcggccagccgggcgctgcagcagtgcgggcagctccagaagctcatcgtcatcttcattggcagcctgtgcgggctgtgcaccaagtgcgctgtgtccagtgacctcacccagcaggagatacagacccccctgaatttccatctggtccagccctctcatcttgtaggtgaggaaaccgaaggcctgagggagaaatgacttgccaggaacccctgattgctccacttttagtggtgctaaattcaaataattcagctggtgagaaactgactcccgtgggagtgcgggcgtgcgtgcgtgccgcggaaatcccgccttccggcgccggcggttggccctggctgcagtgggtgagctccaagtaggaagataaacgggattgcgggaagcgggagagtcaggaggagcagggaagggctcctcttccccattggctgcgcccgcagagccgccttgcgattggcggtaagcgcgggtcggtggagggggcggcagtcccgcgcgggcacgcccctcgggtagcgagaggcgtcgggatcgcgggcgccggctgagccagcggctgctgggaggctgtgtgcgcacgcctctggtaaattctgctgtgaatccatctggtcctggactctttttggttggtaagctattgattattgccataatttcggagcctgttattggtctattcagagattcaacttcttcctggtttagtcttgggagagtgtatgtgtcgaggaatttatccatttcttctagattttctagtttatttgcatagaggtgtttgtagttttctgtgatggtagattgtatttctgtgggatcggtggtgattacccctttatcattttttgttgcatctatttgattcttctctcttttcttctttattagtcttgctagtggtctatcaattttgttgatctgttcaaaaaaccagctgctggattcattaattttttgaaaggttttttgtgtctctatttccttcagttctcctctgattttagttatttcttgctttctgctagcttttgaatgtgtttgctcttgcttttcaagttcttttaattgtgatgttagggtgtcaattttggatctttcctgctttctcttgtgggcatttagtgctataaatttccctctacacactgctttgactgtgtcccagagattctggtatgttttgtctttgttctcgttggtttcaaagaacatctttatttctgcctttattttgttatgtacccagtggtcattccggagcaggttgttcat

SEQ ID NO: 7190 - DNA, 758 bp, Homo sapiens
  SIMILAR (15)..(149): 861254mologous to Mus musculus protein kinase related to Raf protein kinases; Method: conceptual translation supplied by author,accession number U43585,Smith-Waterman Score=183.
tttcgtgcccggggctgcagcagtgcggacagctccagaagctcatcggcatctccattggcagcctgcgcgggctgggcaccaagtgcgctgtgtccaacgacctcaccgagcaggagatacggaccctggaggcctgtaaattactctctgatgactatgaacaagtgtgcagtgctgcagtctagcttatctgggttgtcagtcagctctatcctgaaagcattgtcccaattccttcttctaatgaagaaatacgcttagttgatgatgcgtttggaaaaatttgtcacatggtcagtgatggctcttgggtggttcatgttcaggcagcaaaactgttgggctctatggagcaagtcagttctcatttcttggagcagacccttgacaagaagctgatgtcagatctgaggaggaaacgtactgcacatgagcgtgccaaggaactttacagttcgggggagttttccagtggcagaaagtggggagatgatgctcccaaggaagaagtagataccggggctgtgaacttgattgagtcaggagcttgtggagcttttgttcatgggttggaagatgagatgtatgatgattctctggagaaattacacctgaatcttaagaatatggctttaaaggtgtcggcaccacctgtttacctgctaccaccacacccacaggcagaaggtccaagacctgcagaaaaagtccacccatttctgtcctctataacagaagagattcaggaaaaataa

SEQ ID NO: 7191 - DNA, 1780 bp, Homo sapiens
  SIMILAR (422)..(646): 971254mologous to Rattus norvegicus Munc13-1,accession number U24070,Smith-Waterman Score=365.
atggagggcatccaaggtgtccccgtattcaagaggagactgtcatatagggctgcgaccctccgtaccaccgcaaccgggcgtgaataccgatgtccgaagtctcggcctattctgattcgatatgtacgagtcctaatgggcctaattaacatctctacgggaccatataggaaaactgacgcagagagcaggagatatgagaagtcaaacccctggttggggtccagcaatgtctcctactacctgggtggtttgggcaaatgcttggcatccctggtctatggttttctcacgggtcaaaggaaagagaggcccacgctggtccagcctacgtcgttcctccgcactcgagtagtcgggcttagggaagaggccttagagggtggggctccaaaaaccagtggggactccaaggggggctgcggagaagagctccaagcacggggcggaggaccggacacagaacatcatcatggtgctcaaggaccgcatgaagatccgggagcgcaacaagcccgagatcttcgagctcatccaggagatcttcgcggtgaccaagacggcgcacacgcagcagatgaaggcggtcaagcagagcgtgctggacggcacgtccaagtggtccgccaagatcagcatcacccctcatgtgggtttccccataaacagacctgagatgaggatttcaggttatgtgggttatccaggaagtgaccccaggacgagctggggtgtcaaaaaagccaagtttgatggtgcccaagggggtgagtggccagaaattcctgaggggatcacagcagatggtctagagcttgggaagggcattggagagtccctgagccccagcgctgacccctactctcactgccacgagaaattcaacacgtacgtgaccctgaaagtgcagaatgtcaagagcagaccatcgcgcttggagactcagaagtaccaacaccttcaggtctcgctgcagctgagccaggggacccagagcacactcatcattttacacacaagattcatcagcaacaaagcctccacctcctcatctccacctcctcgctgctcctatgccctgccagacccgtttccactaccgcccttgcaacagctgtttcccctgcctggaagtccatccccctgcgcccccacctgttcctactggccagggggcccttccccctcagcaccttgggtgctaagactgactgtcctctcagtcccttgcagccttctcatcctccgacaccatgtgaagcaggggcccatctccaccaaggagctggcggacttcatccggggaggtgaggtccccaagccccatccaccagaggccacgcccaccatccttagtcacgcccacctaatggctacgccctgcatgtaccacggacatatgtggatcctggggggtcgccgatcccgggaggctaagtgccggctgcggtttctacccgtggtcgccattgtccgagcttcgtccgacatttatgttaaagggcaactttttctgccactctcaatggaaattgggaccctctgccgcatgaaaggagtaggaaaaaatgaggcaacactatatcttaacgccggccagattctgtcacctgggaagggcatcatgctgaacactactaagctgtccattaaaaatggtatcatgccggggggcgtggctcacactgtgtcccgcacttgggagccccggaggcgatattgcagcggagtcagacaactgcccctggtgacccgtcccttaagtaaaattccgtga

SEQ ID NO: 7192 - DNA, 447 bp, Homo sapiens
  SIMILAR (5)..(148): 621254mologous to Homo sapiens hook1 protein,accession number AF044923,Smith-Waterman Score=147.
aatcagggagaaacttattcgtcttcagcatgagaataagatgttaaagcttaaccaagaaggttcggacaatgaaaaaatagccttattgcagagccttctagatgatgcaaatctacgcaagaatgaactggagacagagaataggtacttgtgcccataaatttccctcttactacggcttttgctgtatcccatagatttcggctggtgaatcaaagacttctggaagtacagtcacaagttgaagaattacaaaaatctttacaggatcaaggctcaaaagcagaagattcagtccttctaaaaaagaagcttgaagaacatctagagaagctgcatgaggccaataatgaactacagaagaagagagccattattgaagatctcgagccaagatttaacaacagctccttaaaaattgaagaattacaagaagctttacga

SEQ ID NO: 7193 - DNA, 1042 bp, Homo sapiens
  SIMILAR (86)..(973): 351254mologous to Homo sapiens dJ782L23.1 (HOOK1),accession number AL035416,Smith-Waterman Score=342.
tcccggcccgtaattcccgggtcgacgatttcgtgtcttttttgcctcatagttataatcatttaaatcttgatttcagctgatgagtaaagaatctcctgtctctgctggaaatgatgcctatgttgaccttgatcgtcagctgaagaaaactacagaggaactaaatgaagctttgtcagcaaaggaagaaattgctcaaagatgccatgaactggatatgcaggttgcagcattgcaggaagagaaaagtagtttgttggcagagaatcaggtattaatggaaagactcaatcaatctgattctatagaagaccctaacagtccagcaggaagaaggcatttgcagctccagactcaattagaacagctccaagaagaaacattcaggttcctgttatcggcagttgacacctcatggtacccagagcatctgcatgaacttctcattctggttttaatctctgaggatttcccttattttcttgtagtagaactacaaaacagattatccgaagaatcaaagaaagcagataaactagattttgaatataagcggctaaaagaaaaagttgacagtcttcaaaaagaaaaggacaggctgagaacagaaagggattctctgaaggaaaccattgaagagcttcgttgtgtacaagctcaagaagggcagctcacaacacaaggctgtacaggagtggtgcgatttgggctggctggattctctcttcttcaggttgtagagattctcttctgtcatcctcctggggagaaacttattcgtcttcagcatgagaataagatgttaaagcttaaccaagaaggttcggacaatgaaaaaatagccttattgcagagccttctagatgatgcaaatctacgcaagaatgaactggagacagagaatagagagaagctgcatgaggccaataatgaactacagaagaagagagccattattgaagatctcgagccaagatttaacaacagctgcttcatataccaggaaactcatggtcgtgctcctccatactgcttctag

SEQ ID NO: 7194 - DNA, 273 bp, Homo sapiens
  SIMILAR (155)..(57): 751254mologous to Homo sapiens reverse transcriptase,accession number L27428,Smith-Waterman Score=123.
aacaggccccggtgtgtgatgttccccttcctgtgtccatgtgctctcattgttcaattcccacctatgagtgagaacatgcggtgtttggttttttgtccctgcaacagtttgctgagaatgatggtttccagcttcatccatgtccctgtccactctgatggtagtttcttttgctgtgcagaagctctttagtttaattagatcccatttgccaattttggcttttgttgccattgcttttggtgttttagacatgaagtccttgcccat

SEQ ID NO: 7195 - DNA, 666 bp, Homo sapiens
  SIMILAR (483)..(214): 781254mologous to Homo sapiens putative p150,accession number U93572,Smith-Waterman Score=375.
ctgctcctggccccagggggcgcgcatgcccagcgggagcgcatcttcacctgcggacgtgaggctgcagcgctgccggccccagccagccagggtgccctctcccggcttgaggggttcgtattgctgcctccaggcctccaagggagatttccgctcactctctggcggcaccttctccccagcttctgggacggtcaccaaatctgagatcctgtttattctgttgatagtttcttttgctgtgcagaagcttttaagtttaattagatcccatttgtcaatttttgcttttgttgcagttgcttttggtgtctttgtcataaaatccttgcccattcctacgtccagaatgatactgcctagtttgtcttccagagttgttatagttttgggttttacatttaagtctttaatccatttggagttaatttttgtatatggtataaggatggggtccagcttcaatcttctggcgaaggcatcaggaaggtctattgcacttctgtgcttcagatctgtatctctgctgagcagttgttgattggtctctttgtagcagcatctgtctagaggtaagaaaagctggtcattatctggcttccaattgtgtacaaagtctgataacactttctgtttttcaagaataattaaagcttttctgaa

SEQ ID NO: 7196 - DNA, 809 bp, Homo sapiens
  SIMILAR (712)..(302): 851254mologous to Homo sapiens putative p150,accession number U93568,Smith-Waterman Score=593.
ttaagtatttgtcctaatgctctccctcccctttcccccacaaccccggacaggccccggtgtgtgatgttcccctccctgtgcccatgtgttctcattgttcagttcccacttatgagtgagaacatgcagtgtttggttttctgttcctgtgttagtttgctgagtatgatggtttccagcgtcatccatgtccctgttgtttcctgactttttaatgattgccattctaactggtgtgagatggtatctcattgtggttttgatttgcatttctctgatggccagtgatgatgagcaatttttccatacatttgttggctgcataaatgtcttcttttgagaagtgtctgttcatgtgcttcgcccactttttgatggggttgtttgtttttttcttgtaaatttgtttaagttccttgtagattctggatattagacctttgtcagatggatagattacaaaaatgctctcccgttctgtaggttgcctgtacactctgatgatagtttcttttgctgtgcagaagctctttagtttaattagatcccatttgtcaattttggcttttgttgccattgcttttggtgttttagtcatgaagtctttgtccatgactatgtcctgaatggtattacctaggttttcttctagggtttttatggttttaggttttacatttaaatctttaatccatcttgagttaatttctagtttattgagtgtttttagcatgaagcgatgttcagttttattgaaggccttttctgcatctattgagataatcatgtggtttttgtcgttggtt

SEQ ID NO: 7197 - DNA, 1039 bp, Homo sapiens
  SIMILAR (330)..(467): 971254mologous to Homo sapiens Human cerebellum derived growth factor 2,accession number W27538,Smith-Waterman Score=257.
atgacggaacaattcaccgggcacatgccagatccgattgaccggcaccctctagagctgatcagaagctcaccacagagccccagaaaggcttcaaaaaccgtggccccagatgggtatatgccattttctgaactggtctctttggcccagagaataccatgggaagttggaaaaagcctaggttacccgaatcaatctctgtggcaagaggaagagaacattcttgaaggccttcccgctgatgggggagacacaagagcgtgagcgggtccacacacacttctcccgccggtactgccagtgcaaccctgatgacagcacttcgaagatgtccaaatggattcttcggacagagatgtttggagaaactgcctttgcgattgtacatgccagatcctaagcaaagtgtcctgtgggatacaccggggacaggtgtcagcagttcgcaatggtcaacttctccaggaggacagctgggccccatgaggagtgtggaccaagtgtccacatggcactggatactgggagggtctctcctccttcactctatgcagttcccgagcaatcttgtaaagtcacagctctgctgaagccggtcttcctgtttaccacccaggctgagggaacaaggtacagaggtgatcagtctgccccaaatcacacggtggtggagctgggcttagaaaatctggctacttcccagagcctacagcagactgggtctctctgccctggtgtggtgtcatgtttagcaccttccaaggctgctcctttacgtaaggaggcccatgtcttcttgtcactccgtatctccacaatgactaaaacaccaaaagcaatgcaacaaaagccaaaattggcaaatggattaattaaattaaacagcttctgcacagcaaaagaaactatcaacaggcagaagatctttgccggggaaggcaagaaggccgtgtcctacttccactctggaccaagccgagtgggcccacttgtcccttgctgggatgatgaccatggccttgctctagtctcctag

SEQ ID NO: 7198 - DNA, 316 bp, Homo sapiens
  SIMILAR (121)..(315): 1001254mologous to Homo sapiens Human potassium channel molecule ERG-LP2 partial protein,accession number Y44905,Smith- Waterman Score=337.
atggtggaaggcaaggaggagcaagtcacatcttacatggatggcagcagcccaactaaactccccttccccataaacaaacttaaaaatctaactgcttactgttcaacttgcaaacgttggcttcatgagttgggaaagagactggaatctccatactatggcaacaataccttggggggcccgtcgatccgaagtgcctatattgccgctctgtacttcacgctgagcagcctcaccagcgtgggttttgggaacgtctctgctaatacagatgcagaaaagatcttctccatctgcaccatgctgattggtg

SEQ ID NO: 7199 - DNA, 1062 bp, Homo sapiens
  SIMILAR (298)..(498): 601254mologous to Caenorhabditis elegans GLY7,accession number AF031841,Smith-Waterman Score=213.
atggatactgaagcaacgctttccagggtttgtgcatgttcattaggggtcgatcatgagaggccttacagcagccattaccgaagccactctcaaatatcaaaactggggactgggattctgcaattgcagaaaaggataatcttggaaagaggcagaacagaagtaaagcgagtgggagctgaggaaaatgaggtcatatggtgtgaaatgacttacccaaagtcacgcagccagtcagcaacaggactaggactcatgtctttgactcttctgactatgcaaattgctgaagaacacctgaaggataaattggaagaatacatggcccgattttccaaagtgaggattgttcgcaccaagaaaagagaaggactcatccggacccgtctcctgggggcatctatggccagaggagaagtcctgacattcctggactcccactgcgaggtcaatgtgaactggctgcccccactcctcactctgccatcagaaagaaggggcggtgatccccaccagctccagctagaaaaacgtgaagggaagacctatcttgtgcaggcctatgtcacagccacttccacccccatggctctggccaggactgtgcccgagagaactgcctgccaaggaaagaagaggatgggctgcccttccagcatgggagttgagggaggtggaaccaagagatcagctggacaggaagacatcaatcatgtcagggtggcccctgacaaatgcacccttggagagggccaatatctgggcacctgccatgacagaggaaacccaacagccaagagagatctagaaagagcaccagctaatcaaatggccattggccgctttcctccactgtctccttctctcaccctggaggagcctgaagcaaagcagggagaaatgaagggagaggatgtgaaggcacgggagtacaccagagcgatgcttccacaagccaaggaatgcatgcagcttggagaagctaagagaggcttggaacagatccttccccagtgtttcagagggagcatgcatagctccgccgacaccttgacttag

SEQ ID NO: 7200 - DNA, 516 bp, Homo sapiens
  SIMILAR (1)..(414): 1001254mologous to Homo sapiens C361A3.1 (JNK/SAPK-associated protein-1),accession number AL031717,Smith-Waterman Score=707.
gaagatgctctggaacaagagaagaaagagctgcaaatccaggtggagcattacgagttccagacgcgccagctggagctgaaggccaagaactatgccgatcagatttcccggttggaggagcgggagtcggagatgaagaaggagtacaatgccctgcaccagcggcacacagagatgatacagacctacgtggagcacattgagaggtccaagatgcagcaggtcggaggaaacagccagaccgagagcagcctgccggggcggagcaggaaggagcgccccacctccctgaacgtgttccccctggctgacggcacggtacgtgcacagatcgggggcaagctcgtgcctgcgggggaccactggcacctgagtgacctcggccagctgcagtccagctccagctaccaggttttgtagccgtgccgtggagtgagaggctcctccctgttgctggtgttccccgttcactggggcgggagcctcgtctgcaggcagcccttcacggctctg

SEQ ID NO: 7201 - DNA, 1179 bp, Homo sapiens
aaattcattgagtttgaagatgctctggaacaagagaagaaagagctgcaaatccaggtggagcactacgagttccagacgcgccagctggagctgaaggccaagaactatgccgatcagatttcccggttggaggagcgggagtcggagatgaagaaggagtacaatgccctgcaccagcggcacacagagatgatacagacctacgtggagcacattgagaggtccaagatgcagcaggtcggaggaaacagccagaccgagagcagcctgccggggcggaggtacgcggggcgcggcggggtggagccagggctgcgatggcaaaagcctccctcacaccccatcaaggcctggccagctgcgaaagctgcatcgtgcctgcctgttctgggggttacacctgcaaacgagaagggtcagaacgtccagctctgggcttcatgggtcacgttctggatgatacagaagaagctgtcagactctgcttccgagtctctggacgtgagagcaaatgcacggcccacagacaacacccgagaggtcctgagagccccagggccatgtgagctcagccaagagcagaggctgccccagctccagagccgcctgatgctgccgtcgtcatgggccaggccaggcctacctggaagaggcgcgtggctgcggggcaaggagtacttcgtcctgcatgtttctctcatggtgtggggcagaagggaaccagacggtgccctctggaagaagcccctcgatcattttgtaagggatggatctggggtgctctcttgtcagcgctgccacaaccaggtccttctgcctgacctggccccagccattcacttcttctgggcacacaggacctttggcaccggccgtgggagcaacgccagcagcagtggctgtgtggtaggggccttccccagccacggaccccaggaagcctccatttgtgaaacaggacccctgcacctctgtgggagagggaggggtctcatccaggtttacaccaaagccttggttgccatgactggatccagccagaaggcaccctgcagtggggtctgcgcagctacattactctggcccctgggcctccttgccagatctccacagcacgtgagaagacgttggccctgcgggaagaaggcgctggggctggcggccctgtctccctga

SEQ ID NO: 7202 - DNA, 914 bp, Homo sapiens
  SIMILAR (52)..(747): 1001254mologous to Homo sapiens dJ680N4.3 (G-protein coupled receptor),accession number AL121755,Smith-Waterman Score=1225.
ctaacgtttccacgtattcatcattactactgttggcttccctcccccaccagatatctcgccatcgttcaccccttgaaaccacggatgaattatcaaacggcctccttcctgatcgccttggtctggatggtgtccattctcattgccatcccatcggcttactttgcaacagaaacggtcctctttattgtcaagagccaggagaagatcttctgtggccagatctggcctgtggatcagcagctctactacaagtcctacttcctcttcatctttggtgtcgagttcgtgggccctgtggtcaccatgaccctgtgctatgccaggatctcccgggagctctggttcaaggcagtccctgggttccagacggagcagattcgcaagcggctgcgctgccgcaggaagacggtcctggtgctcatgtgcattctcacggcctatgtgctgtgctgggcacccttctacggtttcaccatcgttcgtgacttcttccccactgtgttcgtgaaggaaaagcactacctcactgccttctacgtggtcgagtgcatcgccatgagcaacagcatgatcaacaccgtgtgcttcgtgacggtcaagaacaacaccatgaagtacttcaagaagatgatgctgctgcactggcgtccctcccagcgggggagcaagtccagtgctgaccttgacctcagaaccaacggggtgcccaccacagaagaggtggactgtatcaggctgaagtgacccactggtgtcacacaattgaaaaccccagtccagtactcagagcatcacccaccatcaaccaagatcataggctgcatgggaaatgacatctgtgttcatgcctcccccgtgccctcaagaagccgaatgctgcaaagtcgtaacatacaatgagactgtat

SEQ ID NO: 7203 - DNA, 691 bp, Homo sapiens
  SIMILAR (229)..(498): 511254mologous to Caenorhabditis elegans weak similarity to drosophila tyrosine kinase (GB:G455391),accession number AF024497,Smith-Waterman Score=221.
atgaatgaaaagattctgcagaaaaattgtactagagatgctgagtgggaggaggacagtctaggcgggaggacatttaccgaagcatgtgtgagactacagactcctacgcagtcagccccaaaagaaagcagactttttttggttgggtcctctttaaatggatttggtacccggagcagtgatggtgatttatgcctagttgttaaggaagaaccagtaacgggctacattgagagacctcagctgattcgagcaaaagtgccaattgtgaagttcagggataaagtcagttgtgtggagtttgacttgaatgtaaacaatattgttggaataagaaacacattccttctcagaacttatgcataccttgaaaatcgagttcgtccgttagtgctggtgattaagaagtgggcaagtcaccatcagataaatgatgccagtcgtggtactttaagcagctatagtcttgtattgatggttttgcactatttacaaaccctattggtggccagcattaggttaggttttcagcccctgttgcaaaacagatctagttacctggagattgctcaactcatcacttctgcggctgcttctgtggttctctggggcctctccacacctgccaggctggctgctcttcatggctggtgctgccatgggccaaccccaggatggcatgctttga

SEQ ID NO: 7204 - DNA, 813 bp, Homo sapiens
  SIMILAR (328)..(810): 981254mologous to Homo sapiens GKAP/SAPAP interacting protein,accession number AF141901,Smith-Waterman Score=806.
ggtgatgatgacgggctacaataatggtcgctgtccccggaattctctctacagtgactgcattattgaggagaagacggtggtcctgcagaaaaaagacaatgagggctttggattcgtgcttcgaggggccaaagctgacacacccattgaagaattcacaccaacaccggctttcccagccctacagtacctgggagtccgtggatgaaggtggggtggcgtggcaagccggactaaggaccggggacttcttgattgaggttaacaatgagaatgttgtcaaagtcggccacaggcaggtggtgaacatgatccggcagggagggaatcaccctgttccttaaggtggtcacggtgaccaggaatctggaccccgacgacaccgccaggaagaaagctcccccgcctccaaagcgggcaccgaccacagccctcaccctgcgctccaagtccatgacctcggagctggaggagctcgtggataaagcctcggtccggaagaagaaggataaacccgaggagatagtcccggcctccaagccctcccgcgctgctgagaacatggctgtggaaccgagggtggcgaccatcaagcagcggcccagcagccggtgcttcccggcgggctcagacatgaactctgtgtacgaacgccaaggaatcgccgtgatgacgcccactgttcctgggagcccaaaagccccgtttctgggcatccctcgaggtacgatgcgaaggcagaaatcaataggtaagaagtgtggcactcccccacagaagttgcccctgggctttcaaacacagccttag

SEQ ID NO: 7205 - DNA, 1419 bp, Homo sapiens
  SIMILAR (518)..(697): 361254mologous to Rattus norvegicus proline rich synapse associated protein 1,accession number AJ131899,Smith-Waterman Score =48.
atgatgaacgtccccggcggaggagcggccgcggtgatgatgacgggctacaataatggtcgctgtccccggaattctctctacagtgactgcattattgaggagaagacggtggtcctgcagaaaaaagacaatgagggctttggattcgtgcttcgaggggccaaagctgacacacccattgaagaattcacaccaacaccggctttcccagccctacagtacctggagtccgtggatgaaggaggggactgggcagggcgcaccgtcttctgttttggggagaggttacgatgcacgtcctccttggaggacagctcatcaattcctatgaaaatgatcgatgcagatgccctctggcccagcctctgtgctaacaggactggatcccacagctctacttgtccaggtgtgtccccaggaaagcgcgggccagacgcgctgcaggccgactccaacgggggctgctttctctccatgcagcagctgtgctgctgttttctttcacgtcctccaggaagccggagccctcctgtgctctcctgtagctgcctcatccctgcgctctgggccgtcagtgtgtctttctggtcgcctcccgctcagactgtgggaatcttggaggacacagctgtgaggggccccccacccacagctcccccaggccccactgtcagctcttgccctggccccgcggtgctgccagcctgctccctgctcccggctttagcagcaagaccgacatcaagctctggaatgagcctcccaagggtcacatccagcctcagagccaggactgccaactccatctgggctcctcccccactgctgagcatccagaacatctgtctggaagcttccatatggaacgccctccatgatgaaattggaccgccaatgagcggcgtgggcctgcagcctgggctgctggggacccggccttgtctgggcagtctgggtctgctcggtgttgccagaagaaattgtgggcacctggtggcacccacgggggctcaagatgaaggaggagggagtgcacctaagtgttcgtcactgcgaggccttctgaggagccaccagggaggggggatgccagatctaggggcaagaggcacctggaccaagaatagattaaggttcagggcactcccttctccagaaatcaccatgaggatctccatcagggacgacggcaaaagggcatcgccttctcagtgtccctggaccttcctggagagcgtttaccactgcagcgtggctgtttgggtccacacgtgtctgctcatgaggctagacaagttcctctccataaccatccatccacacctcgatgtttctcagacctgctccatggaggccctgaggctggactcacatttccaccacctctgggccctcctggagcttgtcctgccctga

SEQ ID NO: 7206 - DNA, 1144 bp, Homo sapiens
  SIMILAR (746)..(1057): 321254mologous to Feline leukemia virus gag,accession number K01803,Smith-Waterman Score=148.
ggagagcatcgaccagggcgcagtgcgacgacacgacgcgtgccgacggatgggagcgtacagggcgaggaggtacggcgccaggtcgagcagcgggggtggtgtgccgggggaacaggtggaagcggagagctcacttaatctctccaaacctcatttgcaaagcagggatgacgatgcctacctaatggttcgtttgtgggcattaagtgaggtgatgtatgcaggaagcttcattcaggaagtacacgccacaaatggcagctctcgcagcatttggcaggctttgttgttagctgcttcattatctcttactagaatggagaattggataggagctgggtttttcattctatttagacctgcattcggggaaccaatgttcacgggaatgaagggttccagttacattttccagaatcatgatgataaatacacaacggaaatacaggacagagtcagcaaagtaaaagtccatcagtggattatccctgcccccatagctggagagctgctctgcctggtggctttctatggccctgcatgggccttccctggaggctctccaatttctccttgtcctcctgagaagctgaataaccttgttcttacggggacccacagtgaacctacagagggggggagccgtgcaaggatgctgagctgtatgcaggcaacattctacgtggtttcagatattgtaggtgaaaagaaaaggaatctaaaccccaaagataaagatcttagggaaatgataattaaaggaattcgggagtcagtgccccacactcagaatctttcccgagcatttgacgtacaacaggaaaaagatgaaggccccatgaaatttctaaaaagaccaagggaacaaacaaaaaaatatgcagatttagatccagaagactctctcgggcaagaaatgttaaagctacatgttgtcacaaacagctggtcagacataacaaagcagttgcaaaaactagaaaactggaaaaacctgtccatagagaaactcctaggagaagcccaaaaattctatgcatccataaggaagcccattgacctaattgctgccatcaacccagggacaaagccaatcgggtggacagcggagaggcaatatgggaaggaccttggtccttga

SEQ ID NO: 7207 - DNA, 579 bp, Homo sapiens
  SIMILAR (328)..(513): 931254mologous to Homo sapiens Derived protein of clone ICA13 (ATCC 40553),accession number R06463,Smith-Waterman Score=281.
atggtggaaacagtaagagaactagaattagaagtggagcctgaagatgtgactgaattatttcagtcttataataaaaccttaatggatgtgaagttgcgccttatagaaaaaataaaaggaaaaaagtcaagagaaaagaaaaccattaactacagttcggtggaagcagggacgaggcaaatgcacaatgaagttacgtcttcggttcagggtcacatgcctccgctcatgatcccaatttttccacatgaccagcggaccctggcagcagctgctgctgcccaacagggattcctcttcccccctggaataacatacaaaccaggtacacctgagagcctggcagaaaaagaacggcagctctccaccatgattacccagctgatcagtttacgggagcagctactggcagcgcatgatgaacagaaaaaactggcagcgtcacaaattgagaaacaacggcagcaaatggaccttgctcgccaacagcaagaacaggttggcagtgagtgtgttctcactaaggatcatctctctggacttcgagctgtagcagctcagcttttgagtcaatag

SEQ ID NO: 7208 - DNA, 290 bp, Homo sapiens
  SIMILAR (27)..(266): 541254mologous to Homo sapiens alpha-1 type XIII collagen,accession number M69008,Smith-Waterman Score=245.
atggctcggtccaagtctgaaggcctcagggtgaacggggggaagcagggcctcctggaagaggtgagcgaggggaacctggagcccccggaccaaaggggaaacaaggtgaatcaggaactagaggcccaaaggggtcaaagggggatcgtggagaaaaaggggactctggagctcagggaccaaggggtccacctggtcaaaaaggggatcaaggagccactgagatcatagactacaacggcaacctccacgaagccttacaggcaagtgactggtccctgccctga

SEQ ID NO: 7209 - DNA, 482 bp, Homo sapiens
  SIMILAR (262)..(35): 971254mologous to Homo sapiens putative ribosomal protein (AA 1-184),accession number X53777,Smith-Waterman Score=379.
  misc_feature (1)...(482): n = a,t,c or g
ccttttaattacatttattttaatgctgaatttactcccgtgccataagtttttgtttcttcagtttcttctgggatatctttttcttctgggcaacctcctcttctggtttaggaacaatctgttccttttccgtaaggatcatctcaatgtggcagggagagctcatgtatgggttaatccgaccatgagctctgtaggtccggcggcgcatcttaggtgctttgttcacttggatatgctcaatgaccagagaattcagcactctttttgggccaccgaccttgtgtccagccccattgcttggcctgcgcacacctgccaactccaccattgtaacgtcggaatggtacacactgtttctgtaaagtgacatctttcagatacttcgtggctnttcgtatatgcatacccttgatggcctgagcagtttcacgagtgttcttaaagtgaacacgaagattggaacctcttgatttgca

SEQ ID NO: 7210 - DNA, 879 bp, Homo sapiens
  SIMILAR (264)..(4): 961254mologous to Homo sapiens putative ribosomal protein (AA 1-184),accession number X53777,Smith-Waterman Score=423.
ttactcctgtgccataagtttttgtttcttcagtttcttctgggatatctttttcttctgggcaacctcctcttctggtttaggaacaatctgttccttttcagtaaggatcatctcaatgtggcagggagagctcatgtatgggttaatccgaccacgagctctgtaggtccggcggcgcatcttaggtgctttgttcacttggatatgctcagtgaccagagaatctacatctaaacccttaagttcagcgttactctctgccaaacttttacacagggcacgttcccgaaccggcctctcaggacggaacccaaagacaatttcacaggatttacaatttgcagctattggttctcctttgaccgaatccttgaatttgcactcacgccaggcgctgcgcgactgctgctggacacacacgatcccaccgaatccagacacggtatggcggttcccactttcctcaccagtcagcgcggctccgaagcaggagagggccagctccgagccctgctcgtggagccattggtgcaggtgctccctttcctggctgagcagtatccccacagaagggtgcaccccagtctgttcatccatctgcttgttgatggccacgttcccaatgttcagtttaatcaagattgtcaggtaagatttcatgaagataacatctgagtcaaaaccttgatgagataaaggaggaagtgcattccaggcagaaggaacagcaagcacaagggccctgatggcgctgggaggccctgagtgtgcagggagcagcaggaaggccagtgcgcctggacaggttacccaggggcacagggcccagacccgtactgtggaaaaggtccgtacagctaggcttgatgcagccat

SEQ ID NO: 7211 - DNA, 1728 bp, Homo sapiens
  SIMILAR (64)..(1269): 751254mologous to Homo sapiens myoferlin,accession number AF182316,Smith-Waterman Score=1546.
atggctcataaagaaggagatatgccagctgagcaaggatttggggcaggatatggattcaagagattttatgtgcccatgaaggaaggcttgaagggctcatggtcatttctgaaataccagcgaaggcggaagtacagcctgtctgccgtgtttcattcagccaccatgttgcaagatgttggtgaggccattcagtttgaagtcagcattgggaactatggcaacaagtttgacaccacctgtaagcctttggcatcaacaactcagtacagccgtgctgtatttgatggcaactactattattacttgccttgggcccacaccaagccagttgttaccctgacttcatactgggaggatattagtcatcgcctggatgcggtgaacactctcctagctatggcagaacggctgtatccacaggagaaaaacaacgggccaaaggtgcctgtggagttgcgagtgaacatctggctaggcttaagtgctgtggagaagaagtttaacagcttcgcagaaggaactttcaccgtctttgctgaaatgtatgaaaatcaagctctcatgtttggaaaatggggtacttctggattagtaggacgtcataagttttctgatgtcacaggaaaaataaaactcaagagggaattttttctgcctccaaaaggctgggaatgggaaggagagtggatagttgatcctgaaagaagcttgctgactgaggcagatgcaggtcacacggagttcactgatgaagtctatcagaacgagagccgctaccccgggggcgactggaagccggccgaggacacctacacggatgcgaacggcgataaagcagcatcacccagcgagttgacttgtcctccaggttgggaatgggaagatgatgcatggtcttatgacataaatcgagcggtggatgagaaaggctgggaatatggaatcaccattcctcctgatcataagcccaaatcctgggttgcagcagagaaaatgtaccacactcatagacggcgaaggctggtccgaaaacgcaagaaagatttaacacagactgcttcaagcaccgcaagggccatggaggaattgcaagaccaagagggctgggaatatgcttctctaattggctggaaatttcactggaaacaacgtagttcagataccttccgccgcagacgctggaggagaaaaatggctccttcagaaacacatggtgcagctgccatctttaaacttgaaggtgcccttaacacttgtgaaactgctcaggccatcaagggtatgcatatacgaaaagccacgaagtatcttaaagatgtcactttacagaaacagtgcgtaccattccgacgttacaatgctggagttggcaggtgtgcgcaggccaagcagcggggctggacacaaggtcggtggcccagaaagagtactgaatttttgctgcatatgcttaaaaacgcagagagtaatgctgaacttaagggtttagatgtagattctctggtcattgagcatatccaagtgaacaaggcacctaagatgcgccgctggacctacagagctcatggtcggattaacccatacatgagctctccctgccgcattgagatgattcttactgaaaaggaacagattgttcctaaaccagaagaggaggttgcccagaagaaaaagatatcccagaagaaactgcagaagcaaaaacttatggcatgggagtaa

SEQ ID NO: 7212 - DNA, 935 bp, Homo sapiens
  SIMILAR (764)..(871): 661254mologous to Homo sapiens dJ612B15.1 (novel protein similar to 60S ribosomal protein L17 (RPL17)),accession number AL049597,Smith-Waterman Score=113.
ggcacgaggagcaagcctggagggtgcctggattggtgaggcccgtgtggctacttctgtggaagcagtgctgtagttactggaagataaaagggaaagcaagcccttggtgggggaaagtatggctgcgatgatggcatttcttaggacacctttggattaataatgaaccacactctcttctgaagcaagctgttcgaatcatctgatatttatactgaatgagttactgtaagtacgtattgacagaattacactgtactttcctctagggtgatctgtgaaaatggttcgctattcacttgaccccggagaactcctatgaaatcatgcaaaatcaaagaggttccaatcttcgtgttccctttaaggaccactcgtgaaaactgcctcaggcccatcaaagggtatgccatatacgaaaaagccccacgaagtatcctgaaagatgtccaccttaccagaaaccagtgtgtccccattcccgaccgttacaaatggtggagttggcaggtgtgccgcaggcccaagcaatggggctggacacaaggtccggtggccccaaaaaggagtgctgaattttttgctgcacatgcttaaaaacgcagaagagtaatgctgaacttaaggggtttagatgtagattctctggtcattgagcatatccaagtgaacaaagcaccctaagatgccgccgccggacctacagagctcatggtcggattaacccatacatgagctctccctgccacgattgagatgactccttacggaaaaggaacagattgttcctaaaccagaagaggaggttgcccagaagaaaaagatatccccagaagaaactgaaagaaacaccaactttatggcacggggagtaaatttcagcattaaaataaatgtaatttaaaaggaaaaaaaaaaaaaaaaaaatttca

SEQ ID NO: 7213 - DNA, 279 bp, Homo sapiens
  SIMILAR (1)..(261): 971254mologous to Rattus norvegicus PAPIN,accession number AF169411,Smith-Waterman Score=415.
atggagctgctcaaagaatcggatgggctgggaattcaggttagtggaggccgaggatcaaagcgctcacctcacgctatcgttgtcactcaagtgaaggaaggaggtgccgctcacagggatggcaggctgtccttaggagatgagctgctggtaatcaatggtcatttactggtcgggctctcccacgaggaagcagtggccattcttcgctccgccacgggaatggtgcagcttgtggtggccagcaagatcagcggcggcactggactctcatag

SEQ ID NO: 7214 - DNA, 729 bp, Homo sapiens
  SIMILAR (124)..(576): 281254mologous to Saccharomyces cerevisiae Gle1p,accession number U68475,Smith-Waterman Score=150.
atgacgagctatgagctgtggaagggaatgggggaagtgaagggcacaaacagaagtactggagggagacgctgggctctcaggaagcagcaggcacgtgccagttggaagccagctgcagccaggaggaaggaggccttaatcttctctgtcatggaccattactgtgccgtaagggagaatccagaaagaccccctttcatacgtgaagagcagaaacaaaaggaggagacagagagaagagagaacgagcgcagacaggacgcaaaaaggaagagagaagagaagacgaaggagaagagcagaacaaaacgagaaagagaggaagcgaggaaaagacgagaggacaaaaagaagtacgaaggagggccggcaagaaaaaaaagagagaaaagaagcaaaaaaacacaagaacatgatttctctctagccatgggaaggaaaaaagattatgtctatgaagttatatttacccgttgtctgaaggttttcaaaatctgccttataacgtctatggtaacactgtccaaaagaactttcggaaactatggaaatgtgatttctaatagggaaagaattgagttgatagggtatgagaaggaggagagtgatttccacttagatatattaataacgatagaaataacgaaaatgataatgatgactaatgttattgagcacttgctgtttgctaagcacaattctaggcattttgtgcatctaatttaa

SEQ ID NO: 7215 - DNA, 700 bp, Homo sapiens
  SIMILAR (15)..(227): 1001254mologous to Homo sapiens tumor-associated antigen,accession number X81109,Smith-Waterman Score=348.
cggacgcgtgggggaagttggaggaagagaacaggagcctgaaggctgacctgcagaagctaaaggacgagctggccagcactaagcaaaaactagagaaagctgaaaaccaggttctggccatgcggaagcagtctgagggcctcaccaaggagtacgaccgcttgctggaggagcacgcaaagctgcaggctgcagtagatggtcccatggacaagaaggaagagtaagggcctccttccttcccctgcctgcaagctggcttcccacctggcacgtgcctgctgcttccctgaagaaccccggcctctccctccagtaacttctgtttgtgcccttctgcttcccccaattcccttccacagctcatagctcgtcatctcggcccttgtccacactctccaagcacattacagggggacctgattgctacacgttcagaatgcgtttgctgtcatcctgccttgcctggccaggctctgcacagccttggcatctcacgcctgagcggacgaagcacgagttagttgtagtccggcttgcggtggggctgacttcctgttggttttgagccccttttttgttttggccctctgggtgttttctttggtcccgcagaagggtgggtggaagcaggtggactggagtttctctatgagggccctaaaagttcgtcatggtgtgtaaaaaaaaaaaaaaa

SEQ ID NO: 7216 - DNA, 412 bp, Homo sapiens
  SIMILAR (58)..(198): 971254mologous to Homo sapiens put. HMG-17 protein,accession number X13546,Smith-Waterman Score=242.
cgagcggctgcatcccgcgtccagcacctacgtcccgctgccgtcgccgccgccaccatgcccaagagaaaggctgaaggggatgctaagggagataaagcaaaggtgaaggacgaaccacagagaagatccgcgaggttgtctgctaaacctgctcctccaaagccagagcccaagcctaaaaaggcccctgctgaaggtgctggagatgccaagtgaagtgtgtgcatctttcagcatagacttaactcccttaagcccagacatctgttgagacctgacccctagtcattggttaccagtgtgtcaggcaatctggactttccagtgatgccactgagatggcacctgtcaaaagagcagtggttccatttctagattgtggatcttcagataaattctgccattttca

SEQ ID NO: 7217 - DNA, 283 bp, Homo sapiens
  SIMILAR (3)..(191): 951254mologous to Homo sapiens put. HMG-17 protein,accession number X13546,Smith-Waterman Score=308.
  misc_feature (1)...(283): n = a,t,c or g
ccaagagaaagactgaaggggatgctaaaggagataaagccaaggtgaaggatgaatcacagagaagatctgcgaggttgtctgctaaacctgctcctccaaagccagagcccaagcctaaaaaggcccctgcaaagaagggagagaaggtacccaaagggaaaaagagaaaagctgatgctggcaaggagcgggaaggttactggagatcccaagtgaagtgtgtncattttttataactgtacttctggtgactgtacagtttgaaatattactttataca

SEQ ID NO: 7218 - DNA, 1191 bp, Homo sapiens
  SIMILAR (4)..(807): 441254mologous to Murine leukemia virus pol,accession number M93052,Smith-Waterman Score=549.
atgtttacagacggtagcagcttccttgagcagggagttcaaaagactggtgcggccatcactatggagactgatattctgtgggcccaagctctaccagtggtcacttcagctcagagagctgagttggttgccttcacacaggctctccgatggggcaaggacaaacatattaacatttacactgacagtaggtatgcttttgctactgtgcatgtgcacagagccatctatcaagagcatgggctacttaccttagcaggaaagactatcaaaaacaaagaagaaattctagccctgcttgaagccacagggattcctcagcaggtggctgtaattcactgcaaaggacatcaaagggaagacatggccattgcccgtggtaatcagagggcagattctgcagcccaggaggcagcacggcttccagtcgcacctctaatcttactgcctgcagtgtcttttccacagtctaacctacaagatcatccaatatactcagcagaggaagtaaaactggtttcggatccccaggccagtaaaaatcaggaaagttggtggattcttcctgactcaagaatcttcataccccaaactcttggagaaattttaattggtcgcctgcattctaccacccatttgggaggagtaaaactgacccagctcctaagaagctgtttcaagatcccccaccttcagaacttagcgaaccaagcatctctccagtgcaaggcttgtgctcaggtaaacgccaagcaaggtcctaaaccgagctcaagcaaccgcctctggggagacttgccaggagaaaggggcctttctaggcttgggctgtctggctttggaggaggaggtttagcagacaaccttgcggatcttctctgtggttcatccttcaccttggctttatctcccttagcatccccttcagcctttctcttgggcatggtggcagtggcgacagtggcgggaggatgcaaagctggaataagagcaatgactgccacacctgacagacctgtcgctgaacacatctgcactctccaatccaaaagacctgatgcagaaaacaaaaaaggggagatgtggtggtttagtcaggctggttggaaaaaaaaattagttataatagccacaaaccctcttggaaggcatgagattttgcataactttggtaataaatctggctga

SEQ ID NO: 7219 - DNA, 1276 bp, Homo sapiens
ctaaccggtccggggctcccagcgctataaaaactttataaaccccccggagcccgagcattgttatagaagaggcgagaacgacccccggaccgaccagagcccgcgcgccgctgcatcccgcgtccagcacctacgtcccgctgccgtcgccgccgccaccatgcccaagagaaaggctgaaggggatgctaagggagataaagcaaaggtgaaggacgaaccacagagaagatccgcgaggttgtctgctaaacctgctcctccaaagccagagcccaagcctaaaaaggcccctgcaaagaagggagagaaggtacccaaagggaaaaagggaaaagctgattcttggcaaggaggggaataacccttgcagaaaaatgggggatggccaaacagaccacgctcagaaagctgaaagtgctggagatgccaagtgaaagtgtgtgcattttttgattaactgtgttacttctggtgactgtacagtttgaaatactagttttttatcaaggttttataaaaatgcatgaattttgttttactttttttttttttttttaaaagctatgttgttagcacacagaaacactttcattgttgtttttttgggggaaagggggcataatgtcactaataagaatgtctccaaagctggattgatgtgggagaaaacacctttcccttctagttttgagagacttcctcttggctcccaggaggagggattccctgactttgacacacatggccaccttggcacaaaagccttgtggtataaaaaaacaaatttgtttttatgtcctcttctccctttccatctttcagcatagacttaactcccttaagcccagacatctgttgagacctgacccctagtcattggttaccagtgtgtcaggcaatctggactttccagtgatgccactgagatggcacctgtcaaaagagcagtggttccatttctagattgtggatcttcagataaattctgccattttcatttcacttcctgaaagtcagggtcggcttgtgaaaagttgttaaacaacatgctaaatgtgaaatgtcaaccctcactctaaactttccctgttcagagcatcagatgaagacttcattgggttttatagtggctttctgatttttggtagtccattgaagaagggagtttgaaagttgttgtatactgttaacgattgtctgcccatgtcctgcctgaaataccatgattgtttatggaaagtatctttaataaagctggatacagtttggc

SEQ ID NO: 7220 - DNA, 456 bp, Homo sapiens
  SIMILAR (31)..(321): 791254mologous to Escherichia coli Glucose repression mediator protein,accession number D90806,Smith-Waterman Score=380.
atgctcatggataggaagagtcaatattgtgaaaatggccatactgcccaagcacgggaagcccgtaaagcgcaagccagagcgaaacaggcagaactgcagcaaactaacgacgcagcaaccgttgctgatccaccgcgcaagctggaacagcaacaggctaatgcgtgtccagaacaacaggtcgatccgcgcagagccgccgtcgaagccgctattgcccgtgccaaagcgcgcaagctggaacagcaacaggctaatgcggaaccagaagaacaggtcgatccgcgcaaagccgccgtcgaagccgctattgcccagtttttcgagctgtacaggaaaatgctgtcacggtccatgatgtcaattctggatgaccacattagccacgatccacagctagaggatcccatgggcttcctgaatgcatacctgggcttcatcaagtccttttga

SEQ ID NO: 7221 - DNA, 2503 bp, Homo sapiens
cggcaaccagcacaccccggcacctcctctgcggcagctgcgcctcgcaagcgcagtgccgcagcgcacgccggagtggctgtagctgcctcggcgcggctgccgccctgcgcgggctgtgggctgcgggctgcgcccccgctgctggccagctctgcacggctgcgggctctgcggcgcccggtgctctgcaacgctgcggcgggcggcatgggataacgcggccatggtgcgccgagatcgcctccgcaggatgagggagtggtgggtccaggtggggctgctggccgtgcccctgcttgctgcgtacctgcacatcccaccccctcagctctcccctgcccttcactcatggaagtcttcaggcaagtttttcacttacaagggactgcgtatcttctaccaagactctgtgggtgtggttggaagtccagagatagttgtgcttttacacggttttccaacatccagctacgactggtacaagatttggaagggtctgaccttgaggtttcatcgggtgattgcccttgatttcttaggctttggcttcagtgacaaaccgagaccacatcactattccatatttgagcaggccagcatcgtggaagcgcttttgcggcatctggggctccagaaccgcagaatcaaccttctttctcatgactatggagatattgttgctcaggagcttctctacaggtacaagcagaatcgatctggtcggcataccataaagagtctctgtctgtcaaatggaggtatctttcctgagactcaccgtccactccttctccaaaagctactcaaagatggaggtgtgctgtcacccatcctcacacgactgatgaacttctttgtattctctcgaggtctcaccccagtctttgggccgtatactcggccctctgagagtgagctgtgggacatgtgggcagggatccgcaacaatgacgggaacttagtcattgacagtctcttacagtacatcaatcagaggaagaagttcagaaggcgctgggtgggagctcttgcctctgtaactatccccattcattttatctatgggccattggatcctgtaaatccctatccagagtttttggagctgtacaggaaaacgctgccgcggtccacagtgtcggattctggatgaccacattagccactatccacagctagaggatcccatgggcttcttgaatgcatatatgggcttcatcaaactccttctgagctggaaagagtagcttccctgtattacctcccctactcccttatgtgttgtgtattcccacttgggaagaaatgcccaaaaagaggtcctgggccatcaaacatatattctctcacacagtccactyttactcaaattggtgaacagtgtataggaagagvgccagcaggagctctgactaaggttgacataatagtccacctcccattaactttgatatctgattcaaatgtatagacttgggctttggtttttttgtgctattagggaaattctgatgagcattactattcactgatgcagaaagacgttcttttgcataaaagactttttttttaacactttggacttctctgaaatatttaggaagtgctaatttctggcccacccccaacagggaattctatagtaaggggggcagggagaaggggggctccttccctctcctcggaattgacgttatggggcacatgccttttttaaaagttccttttaaggccaacacagagctgagtcctctttgtcatacctttgggatttagtgtttcatcagctgtttttagttataaacattttgttaaaataggatattgggttaaatgatacagtattttagggtatggatttaaggactatgatttacccatacattatatatattttataaaggtaccaaaccagcatacccttactctgccagagtaagtgaagctaattaaacacgtttggtttccgaataaattgaactaaatccaaactatttcctaaaatcacaggacattaaggaccaatagcatctgtgccagagatgtactgttattagctgggaagaccaattctaacagcaaataacagtctgagactcctcatacctcagtggttagaagcatgtctctcttgagctacagtagaggggaagggattgttgtgtagtcaagtcaccatgctgaatgtacactgattcctttatgatgactgcttaactccccactgcctgtcccagagaggctttccaatgtagctcagtaattcctgttactttacagacaggaaagttccagaaactttaagaacaaactctgaaagacctatgagcaaatggtgctgaatactttttttttaaagccacatttcattgtcttagtcaaagcaggattattaagtgattatttaaaattcgtttttttaaattagcaacttcaagtataacaactttgaaactggaataagtgtttattttctattaataaaaatgaattgtgacaa

SEQ ID NO: 7222 - DNA, 1957 bp, Homo sapiens
  SIMILAR (20)..(1873): 211254mologous to Saccharomyces cerevisiae mal5, sta1, len: 1367, CAI: 0.3, AMYH_YEAST P08640 GLUCOAMYLASE S1 (EC 3.2.1.3),accession number Z38061,Smith-Waterman Score=282.
tcatgtacagttgcctatagtctcaacttcagcctcagaccctggagggacatccacacagttgatgacatctccagtctttgacaccatgtctgcacctctaatgggagtaccaaactctggagcattgtccccacccctaatgccagcctcagactctggggcactttccccattgctaatgccagcctcagactctggggcactgtccccattgctaatgccagccttagattctggaacattgtccccattgctgtccacttcagagtatggggtaatgtccccagggatgatgacaattcctgattttggaacgatgtccgcaacgctaatggtagcaccagattctgcagagatatcaccattggcaatgccagctccatcctctggagtggtgtgtacacctataatgagcacttcatcctctgaggcaatgtccacaccattaatgctagccccagattctggagagttatccccaattctaatgcaagatatgaatcctggagtgatgtctacacagccagtgccagctcccagctctgaggcaatgtccccattgcaaattacagatgaagacaccgaagcaatgtccaaagtgctaatgactgctctagcctctggagagatatcttcgctgctaatgtcaggcacggactctgaagcaatatcctcactgataatgtcagctgtagcttctggaggtacatcaccccagccaacaagcacccaaaactctgggggaatacctaccccgctcatgtcagatctagactctggaataatgtcatcgcttttaatgtcatctccaggctctgaagtaatgtccacaccgctactgtcagtcccagatgctggagaaatgtccacattaccaaagccagctccagatgctgaagcaatgtccccagcactaatgacggccctaccctctggagtgatgcccacccaaacgatgccagccccaggctctggggcgatgtccccatggtcaacacaaaatgtagactctgaaatgatgtctaatccgccagtgagagcaacagcctctggggtgatgtctgcaccaccagtaagagctttagattctggagcaatgtccacaccgctaatgggagccccagcctctggaaatatgtctacattgcaaaagacagttccagcctctggagccatgaccacctcactgatgacagtcccaagctctggagtgatgtccacagagcaaatgtcagccacagcctctagagtaatgtccgcacagttaacaatggccaaaacttctggagcaatgcccacaggctctatgaaagccgtggcaaaacaatacaagagagccacagcctctggaaagatgtccacgccactgaggagagctccaacttctggagcaatgtccacccaaccagttacggcaacagcctctgaaacaatgtccatgccacaattgacagtcccagcctctggatcaatgtccatgctgcaaatgagagcccctgtctctgaagcaatgtccatgccacaaatgagaaccatggcctcaggattgacatctgcagcacagatgaaagccatgacttctggagcaatgtccaccccactaatgacagcccaaacctctggatcaacatccacgctgttaatgagagacacagcctcaggagtgatgtcctgtccacaaatgagatctctggcctctggagcattgtccaagccactaatgacacccaaagcctcaggaacgatgttcacggagaaaatgacaaccacagcttctgaagcaatgcccacactgctaatgagagacacagtttctggagctctgtccatgccgcaaatgacagacacagccttttggaaggttgtctgcatcgctaatgagagacacagcttctggagcaatgtccacatcacaaatgacagccacagtctctggagggatgtccatgccact

SEQ ID NO: 7223 - DNA, 681 bp, Homo sapiens
  SIMILAR (25)..(294): 721254mologous to Homo sapiens TATA-binding protein- associated factor hTAFII130,accession number R56494,Smith-Waterman Score=307.
atggaacaaggtgcccaccttgccaccggcagcaccttctgcccacagtgtctgcagcccccagtggaccagctgacccacaaagcccttctgcccccaggaatggtcctcgtccgaagtgagaatgggcagttgttaatgattcctcagcaggccttggcccagatgcaggcgcaggcccatgcccagcctcagaccaccatggcgcctcgccctgccacccccacaagtgcccctcccgtccagatctccaccgtacagaggatccctggtataaacatctgtgcgcagcgatttcgtgtggacataaattttcagcccctttgggtaaataccaaggagcacgattgctggaccgtgtgtgttctcgacgtcctttctgccccggaccctcgcggcttctcgctccttggtctcctctgcttggtggtagctgctcagtctttcctggtctttgatggccttgacgtgctggagagctctggtccttgtctggtggacgtttccttagtttgcgtttgtctggtgtctcctcgtgatgacgtccaggctgtagaatctcagttagaatgccgcgggccggctggcgtgtcctcagagcactggattgggaggcaggcctttggcccctgcgtgggcattcgcaaggacgctgccagtggaggctgctgtggcgtctga

SEQ ID NO: 7224 - DNA, 723 bp, Homo sapiens
  SIMILAR (76)..(270): 841254mologous to Rattus norvegicus potassium channel TREK- 2,accession number AF196965,Smith-Waterman Score=283.
atgattttgtccaagttcctgaaagtacctgaaaaaagttctgagagcttttttgcatatttaaatcaaaatcctgggtatgggaatattgctccgagcactgaaggaggcaaaatcttttgtattttatatgccatctttggaattccactctttggtttcttattggctggaattggagaccaacttggaaccatctttgggaaaagcattgcaagagtggagaaggtctttcgactccttgcagcaccatcaaagatcaagattcttttaggaaggcgagacagttgcatattattgaattggcagtgcacaatgaatgcatttgctgagtattggagggtgctattggaaagggtgaccgaattccagggggaatttatgacagccaaaatgtctccagacattactaaatgtgtcctcaggggcaaaatcgccctagttaatttgaccatagctatactgggatataaggggacaattgccccaaagactaccaggtgcatgccctggtcccctgtccaaatcttccacacgagctctggtgcctccaccaatgatcctaatcagtttttcagtgctagcgccattccgactcagaactctcctccttcagatgggtccttaaagagggctttgcagattttatactccgggaatgagatcatttctcaccaagaaagcaaaaatgcctggagacttgactctgatgagtacacataa

SEQ ID NO: 7225 - DNA, 2948 bp, Homo sapiens
  SIMILAR (1788)..(2945): 991254mologous to Homo sapiens PDZ domain-containing protein AIPC,accession number AF338650,Smith-Waterman Score=1986.
ctgtgaactagccagtgctctgtcccatctggatgccagccacctcacagagaacctgcccaaagctgcatcagagctggggcaacaacccatgactgtccaacaagtctcggtacgccacacgcagccctcgcccgtgtcccgctccaagctccaggagctgagagccttgagcatgcctgaccttgacaagctctgcagcgaggattactcagcagggccgagcgccgtgctcttcaaaactgagctggagatcacccccaggagaagggcgggaacagggcctgtccaggaggaagtggccctaaaaccagtgctgctgagacacccagttcagccagtgatacgggtgaagctgcccaggatctgccttttagaagaagctggtcagttaaggggtgtacaccgccttgagtcagttgaagaatattacgaggctgatggtgcggaatggggacccccggataccgcgatgttggagagtctcccggagatggccgggaaacactccctcccgcagctgctggactcttccagtgcctcacagccaggggcgattcagatcatctattctcatcctatatcaaattcattacctaaaacatttattgagctcttactggggtgccagccagtggaaacataccaggcatacacattacttcgaatctttgtggtaggaacatctgccatcatagaaataccaaaagagagaaaaatgggcagatctcacaaggagcctggaaaacccagagccaacagcctcgtgactcttgggagccatcgggcttctgggctcttccacaagcaggtgacagttgccagacaagccagtctccccggaagcccacaggccctccgaaaccctctcctccgccagaggaaggtaggctgctacgatgccaacgatgccagtgatgaggaagagtttgacagagaaggggactgcatttcactctccaggggccctcccgggtcccatcaggcctctgtcagaggatgacccgagggcgtgtctcaatttcctcttccaagggcatggacgtccacaaccaagaaggaacgaccccggaaaacactgctcagtggacttagaggagagtatcccagagggcatggtggatgctgcgtcctatgcagccaacctcacggactctgcagaggcccccaaggggagccctggaagctggtggaagaaggaactgtcaggatcaagtagtcgcaccctaaattggaatacacagtccgtacagacacccagagtccgagcgaacacgtgggagaccccagttccccccagcagaaaagtgaaggcctgggctccaggcacagaccagtggccacgaaacccaccagagaccagtagcaagggctctgattcggaactaaagaaatcacttggtcctttgggaattcccaccccaacgatgaccctggcttctcctgttaagaggaacaagtcctcggtacgccacacgcagccctcgcccgtgtcccgctccaagctccaggagctgagagccttgagcatgcctgaccttgacaagctctgcagcgaggattactcagcagggccgagcgccgtgctcttcaaaactgagctggagatcacccccaggagaagggcgggaacagggcctgtccaggaggaagtggccctaaaaccagtgctgctgagacacccagttcagccagtgatacgggtgaagctgcccaggatctgccttttagaagaagctggtcagttaaagggggatttggcagggtcacaggacaatagtggagggaagacctcccacaaaacactttctaaggcagtgtcacagcggctccatgtagccgaccacgaggaccctgacagaaacaccacagctgcccccaggtccccccagtgtgtgctggaaagcaagccacctcttgccacctctgggccactgaaaccctcagtgtctgacacgagcatcaggacatttgtctcgcccctgacctctcccaagcctgttcctgagcaaggcatgtggagcaggttccacatggctgtcctctctgaacccgacagaggttgcccaaccacccctaaatctcctaagtgtagagcagagggcagggcgccccgtgctgactccgggccggtgagtccggcagcgtctaggaacggcatgtccgtggcagggaacagacagagtgagccgcgcctggccagccatgtggcagcagacacagcccaacccaggccgactggcgaaaaaggaggcaacataatggccagcgatcgcctcgaaagaacaaaccagctgaaaatcgtggagatttctgctgaagcagtgtcagagactgtatgtggtaacaagccagctgaaagcgacagacggggagggtgcttggcccagggcaactgtcaggagaagagtgaaatcaggctctatcgccaggtcgcagaatcatccacaagtcatccatcctcactcccatctcatgcctcccaggcagagcaggaaatgtcacgatcattcagcatggcaaaactggcgtcctcctcctcctcccttcaaacagccattagaaaggcagaatactcccagggaaaatcaagcctgatgtcagactcccgaggggtgcccagaaacagcattccagggggcccctcgggggaggaccatctctacttcaccccaaggccagcgaccaggacctactccatgccagcccagttctcaagccattttggacgggagggtcaccccccacacagcctgggtcgctctcgggacagccaggtccctgtgacaagcagtgttgtccccgaggcaaaggcatccagaggtggtcttcccagcctggctaatggacagggcatatatagtgtaaagccgctgctggacacatcgaggaatcttccagccacagatgaaggggatatcatttcagtccaggagacgagctgctag

SEQ ID NO: 7226 - DNA, 440 bp, Homo sapiens
  SIMILAR (3)..(437): 861254mologous to Rattus norvegicus PAPIN,accession number AF169411,Smith-Waterman Score=628.
ggggtgtacaccgccttgagtcagttgaagaatataacgagctgatggtgcggaatggggacccccggatccggatgttggaggtctcccgagatggccggaaacactccctcccgcagctgctggactcttccagtgcctcacaggaataccacattgtgaagaagtctacccgctccttaagcacgactcaggtggaatctccttggaggctcattcggccatccgtcatctcgatcattgggttgtacaaagaaaaaggcaagggccttggctttagtattgctggaggtcgagactgcattcgtggacagatggggatttttgtcaagaccatcttcccaaatggatcagctgcagaggacggaagacttaaagaagatgcagatccaggaagcctgcatgaggtctctgctgaaccacttacagaggaggcatag

SEQ ID NO: 7227 - DNA, 276 bp, Homo sapiens
  SIMILAR (127)..(270): 951254mologous to Mus musculus neurobeachin,accession number Y18276,Smith-Waterman Score=228.
atgaagacactggtagtgcatagcattgaaaatgaagagatgaggtcagaaatggaatatctttcactgatagagccaacaggactatctgatgtaatacaggggcacagggaaggttactggaggagtggcccagtggttctcagcacccctgcccagctcatcgctcccgtggtggtggccaaggggactctctccatcaccacgacagaaatctacttcgaggtagatgaggatgattctgccttcaagaagatcgacacgaaagtgagttaa

SEQ ID NO: 7228 - DNA, 1666 bp, Homo sapiens
  SIMILAR (1250)..(1603): 941254mologous to Homo sapiens neurofibromatosis type 1 protein,accession number M38106,Smith-Waterman Score=570.
gtcgggctgggccctgcagcgctcctactcccccttcccagcccccagacttaatgctgataccaccactagcaccgatgccaatacaaccgctgtcgccctcaatgcagcagcccaccctacaaggctcctaccaccttgcccccgcgggcaccctcctaccactccagtcgagctgcagtctccgtcgctgccaccaatctcgaaaagctcccactgcaggccacccttcgaccgctccatccccaccaccaaccggagacagccagtgccctggctccagctggcagcagatggcgagctgctcagggcccagcttagaggaccgggaatgggtaatcacaggccgtacgctggaggctggagccgcggtaggacggctcgcctcgctgcggtttgtggtgacggcaacggagaaagcagtgtggtgcaagagccgggccaggagcagctgtactgggacacgctgaagcagctgtccaagcacatcaagcccctgcaccgcgtggtcaacaagatcgacaagagtgaaggtcccctgaagaccttgccaaagtgtgagatcaccctggagaaactcaagaatgacatggcggtgcccgctgcccctggtgccgctgaccaaacagcagtacctatgccagcagctcctggatgctgtcctagccaatatctgctcaccctcttcagccattccctgtaccgcacattcgctccagccatgactgccatccacggcccactcatcacatacatccagctgggctgggctttacagagggcggatggccagccctggaccatgtgtgcccactgtgtggtgtgcacccggaagcacaggcttgaggacgatgagcggcagagcatccccagcatgctccagggcgaggtggccaggctggaccccaagtgcatgataaacctggactcttctcgctgcagcaacaatggcaccgtccacctgagtcttatatttaaagaaaaagtaacaagccttaaatttaaagaaaaacctacaggcttggagacaagaagctcgcagaccagtctagaagtggccctgtacatgtttctgcggaaccctgacactgaagctgttctggttgccatgtcctgtttccgccacctctgtgaggaagcagatacccggtgtggggtggacgaagtgtcgacttgggaagatacacatgcaaaatgggaacaagcaacaaaactaatccttagctatccaaaagcccaaatggaagatggccaggttttattgactgataccaatactcaatttgtagaggaaaccctagctatattgaagaacttgctagataatcatactgaaggcagctctgaacatctagagcaagctagcattgaaacaatgatgttaaatctggtcaggtacgtttgtgtgcttgggaatatggtccatgcaattcaaataaaaacgaaactgtgtcagttggttgaagtaacgatggcaaggagagatgacctctcattttgccgagagatgaaatttaggaataagatggtagaatacctgacagactgggttatgggaacatcaaaccaagcagcagatgatgatgtaaaatgtcttacaagactttcaggaaaaataaatgtgcgagagcggtatgtttgggaagttattgttgtcagtttatga

SEQ ID NO: 7229 - DNA, 7790 bp, Homo sapiens
  SIMILAR (1)..(7509): 1001254mologous to Homo sapiens neurofibromatosis protein type 1,accession number M38107,Smith-Waterman Score=12946.
aattgggaagataactctgtcattttcctacttgttcagtccatggtggttgatcttaagaacctgctttttaatccaagtaagccattctcaagaggcagtcagcctgcagatgtggatctaatgattgactgccttgtttcttgctttcgtataagccctcacaacaaccaacactttaagatctgcctggctcagaattcaccttctacatttcactatgtgctggtaaattcactccatcgaatcatcaccaattccgcattggattggtggcctaagattgatgctgtgtattgtcactcggttgaacttcgaaatatgtttggtgaaacacttcataaagcagtgcaaggttgtggagcacacccagcaatacgaatggccccgagtcttacatttaaagaaaaagtaacaagccttaaatttaaagaaaaacctacagacctggagacaagaagctataagtatcttctcttgtccatagtgaaactaattcatgcagatccaaagctcttgctttgtaatccaagaaaacaggggcccgaaacccaaggcagtacagcagaattaattacagggctcgtccaactggtccctcagtcacacatgccagagattgctcaggaagcaatggaggctctgctggttcttcatcagttagatagcattgatttgtggaatcctgatgctcctgtagaaacattttgggagattagctcacaaatgcttttttacatctgcaagaaattaactagtcatcaaatgcttagtagcacagaaattctcaagtggttgcgggaaatattgatctgcaggaataaatttcttcttaaaaataagcaggcagatagaagttcctgtcactttctccttttttacggggtaggatgtgatattccttctagtggaaataccagtcaaatgtccatggatcatgaagaattactacgtactcctggagcctctctccggaagggaaaagggaactcctctatggatagtgcagcaggatgcagcggaacccccccratttgccgacaagcccagaccaaactagaagtggccctgtacatgtttctgtggaaccctgacactgaagctgttctggttgccatgtcctgtttccgccacctctgtgaggaagcagatatccggtgtggggtggatgaagtgtcagtgcataacctcttgcccaactataacacattcatggagtttgcctctgtcagcaatatgatgtcaacaggaagagcagcacttcagaaaagagtgatggcactgctgaggcgcattgagcatcccactgcaggaaacactgaggcttgggaagatacacatgcaaaatgggaacaagcaacaaagctaatccttaactatccaaaagccaaaatggaagatggccaggctgctgaaagccttcacaagaccattgttaagaggcgaatgtcccatgtgagtggaggaggatccatagatttgtctgacacagactccctacaggaatggatcaacatgactggcttcctttgtgcccttggaggagtgtgcctccagcagagaagcaattctggcctggcaacctatagcccacccatgggtccagtcagtgaacgtaagggttctatgatttcagtgatgtcttcagagggaaacgcagatacacctgtcagcaaatttatggatcggctgttgtccttaatggtgtgtaaccatgagaaagtgggacttcaaatacggaccaatgttaaggatctggtgggtctagaattgagtcctgctctgtatccaatgctatttaacaaattgaagaataccatcagcaagttttttgactcccaaggacaggttttattgactgataccaatactcaatttgtagaacaaaccatagctataatgaagaacttgctagataatcatactgaaggcagctctgaacatctagggcaagctagcattgaaacaatgatgttaaatctggtcaggtatgttcgtgtgcttgggaatatggtccatgcaattcaaataaaaacgaaactgtgtcaattagttgaagtaatgatggcaaggagagatgacctctcattttgccaagagatgaaatttaggaataagatggtagaatacctgacagactgggttatgggaacatcaaaccaagcagcagatgatgatgtaaaatgtcttacaagagatttggaccaggcaagcatggaagcagtagtttcacttctagctggtctccctctgcagcctgaagaaggagatggtgtggaattgatggaagccaaatcacagttatttcttaaatacttcacattatttatgaaccttttgaatgactgcagtgaagttgaagatgaaagtgcgcaaacaggtggcaggaaacgtggcatgtctcggaggctggcatcactgaggcactgtacggtccttgcaatgtcaaacttactcaatgccaacgtagacagtggtctcatgcactccataggcttaggttaccacaaggatctccagacaagagctacatttatggaagttctcacaaaaatccttcaacaaggcacagaatttgacacacttgcagaaacagtattggctgatcggtttgagagattggtggaactggtcacaatgatgggtgatcaaggagaactccctatagcgatggctctggccaatgtggttccttgttctcagtgggatgaactagctcgagttctggttactctgtttgattctcggcatttactctaccaactgctctggaacatgttttctaaagaagtagaattggcagactccatgcagactctcttccgaggcaacagcttggccagtaaaataatgacattctgtttcaaggtatatggtgctacctatctacaaaaactcctggatcctttattacgaattgtgatcacatcctctgattggcaacatgttagctttgaagtggatcctaccaggttagaaccatcagagagccttgaggaaaaccagcggaacctccttcagatgactgaaaagttcttccatgccatcatcagttcctcctcagaattcccccctcaacttcgaagtgtgtgccactgtttataccaggtggttagccagcgtttccctcagaacagcatcggtgcagtaggaagtgccatgttcctcagatttatcaatcctgccattgtctcaccgtatgaagcagggattttagataaaaagccaccacctagaatcgaaaggggcttgaagttaatgtcaaagatacttcagagtattgccaatcatgttctcttcacaaaagaagaacatatgcggcctttcaatgattttgtgaaaagcaactttgatgcagcacgcaggtttttccttgatatagcatctgattgtcctacaagtgatgcagtaaatcatagtctttccttcataagtgacggcaatgtgcttgctttacatcgtctactctggaacaatcaggagaaaattgggcagtatctttccagcaacagggatcataaagctgttggaagacgaccttttgataagatggcaacacttcttgcatacctgggtcctccagagcacaaacctgtggcagatacacactggtccagccttaaccttaccagttcaaagtttgaggaatttatgactaggcatcatcaggtacatgaaaaagaagaattcaaggctttgaaaacgttaagtattttctaccaagctgggacttccaaagctgggaatcctattttttattatgttgcacggaggttcaaaactggtcaaatcaatggtgatttgctgatataccatgtcttactgactttaaagccatattatgcaaagccatatgaaattgtagtggaccttacccataccgggcctagcaatcgctttaaaacagactttctctctaagtggtttgttgtttttcctggctttgcttacgacaacgtctccgcagtctatatctataactgtaactcctgggtcagggagtacaccaagtatcatgagcggctgctgactggcctcaaaggtagcaaaaggcttgttttcatagactgtcctgggaaactggctgagcacatagagcatgaacaacagaaactacctgctgccaccttggctttagaagaggacctgaaggtattccacaatgctctcaagctagctcacaaagacaccaaagtttctattaaagttggttctactgctgtccaagtaacttcagcagagcgaacaaaagtcctagggcaatcagtctttctaaatgacatttattatgcttcggaaattgaagaaatctgcctagtagatgagaaccagttcaccttaaccattgcaaaccagggcacgccgctcaccttcatgcaccaggagtgtgaagccattgtccagtctatcattcatatccggacccgctgggaactgtcacagcccgactctatcccccaacacaccaagattcggccaaaagatgtccctgggacactgctcaatatcgcattacttaatttaggcagttctgacccgagtttacggtcagctgcctataatcttctgtgtgccttaacttgtacctttaatttaaaaatcgagggccagttactagagacatcaggtttatgtatccctgccaacaacaccctctttattgtctctattagtaagacactggcagccaatgagccacacctcacgttagaatttttggaagagtgtatttctggatttagcaaatctagtattgaattgaaacacctttgtttggaatacatgactccatggctgtcaaatctagttcgtttttgcaagcataatgatgatgccaaacgacaaagagttactgctattcttgacaagctgataacaatgaccatcaatgaaaaacagatgtacccatctattcaagcaaaaatatggggaagccttgggcagattacagatctgcttgatgttgtactagacagtttcatcaaaaccagtgcaacaggtggcttgggatcaataaaagctgaggtgatggcagatactgctgtagctttggcttctggaaatgtgaaattggtttcaagcaaggttattggaaggatgtgcaaaataattgacaagacatgcttatctccaactcctactttagaacaacatcttatgtgggatgatattgctattttagcacgctacatgctgatgctgtccttcaacaattcccttgatgtggcagctcatcttccctacctcttccacgttgttactttcttagtagccacaggtccgctctcccttagagcttccacacatggactggtcattaatatcattcactctctgtgtacttgttcacagcttcattttagtgaagagaccaagcaagttttgagactcagtctgacagagttctcattacccaaattttacttgctgtttggcattagcaaagtcaagtcagctgctgtcattgccttccgttccagttaccgggacaggtcattctctcctggctcctatgagagagagacttttgctttgacatccttggaaacagtcacagaagctttgttggagatcatggaggcatgcatgagagatattccaacgtgcaagtggctggaccagtggacagaactagctcaaagatttgcattccaatataatccatccctgcaaccaagagctcttgttgtctttgggtgtattagcaaacgagtgtctcatgggcagataaagcagataatccgtattcttagcaaggcacttgagagttgcttaaaaggacctgacacttacaacagtcaagttctgatagaagctacagtaatagcactaaccaaattacagccacttcttaataaggactcgcctctgcacaaagccctcttttgggtagctgtggctgtgctgcagcttgatgaggtcaacttgtattcagcaggtaccgcacttcttgaacaaaacctgcatactttagatagtctccgtatattcaatgacaagagtccagaggaagtatttatggcaatccggaatcctctggagtggcactgcaagcaaatggatcattttgttggactcaatttcaactctaactttaactttgcattggttggacaccttttaaaagggtacaggcatccttcacctgctattgttgcaagaacagtcagaattttacatacactactaactctggttaacaaacacagaaattgtgacaaatttgaagtgaatacacagagcgtggcctacttagcagctttacttacagtgtctgaagaagttcgaagtcgctgcagcctaaaacatagaaagtcacttcttcttactgatatttcaatggaaaatgttcctatggatacatatcccattcatcatggtgacccttcctataggacactaaaggagactcagccatggtcctctcccaaaggttctgaaggataccttgcagccacctatccaactgtcggccagaccagtccccgagccaggaaatccatgagcctggacatggggcaaccttctcaggccaacactaagaagttgcttggaacaaggaaaagttttgatcacttgatatcagacacaaaggctcctaaaaggcaagaaatggaatcagggatcacaacaccccccaaaatgaggagagtagcagaaactgattatgaaatggaaactcagaggatttcctcatcacaacagcacccacatttacgtaaagtttcagtgtctgaatcaaatgttctcttggatgaagaagtacttactgatccgaagatccaggcgctgcttcttactgttctagctacactggtaaaatataccacagatgagtttgatcaacgaattctttatgaatacttagcagaggccagtgttgtgtttcccaaagtctttcctgttgtgcataatttgttggactctaagatcaacaccctgttatcattgtgccaagatccaaatttgttaaatccaatccatggaattgtgcagagtgtggtgtaccatgaagaatccccaccacaataccaaacatcttacctgcaaagttttggttttaatggcttgtggcggtttgcaggaccgttttcaaagcaaacacaaattccagactatgctgagcttattgttaagtttcttgatgccttgattgacacgtacctgcctggaattgatgaagaaaccagtgaagaatccctcctgactcccacatctccttaccctcctgcactgcagagccagcttagtatcactgccaaccttaacctttctaattccatgacctcacttgcaacttcccagcattccccagcttctctgccttgctctaactcagcagttttcatgcagctgttccctcatcaaggaatcgacaaggagaacgttgaactctcccctaccactggccactgtaacagtggacgaactcgccacggatccgcaagccaagtgcagaagcaaagaagcgctggcagtttcaaacgtaatagcattaagaagatcgtgtgaagcttgcttgctttcttttttaaaatcaacttaacatgggctcttcactagtgaccccttccctgtccttgccctttccccccatgttgtaatgctgcacttcctgttttataatgaacccatccggtttgccatgttgccagatgatcaactcttcgaagccttgcctaaatttaatgctgccttttctttaactttttttcttctacttttggcgtgtatctggtatatgtaagtgttcagaacaactgcaaagaaagtgggaggtcaggaaactt

SEQ ID NO: 7230 - DNA, 5049 bp, Homo sapiens; identical to SEQ ID NO: 3643
  SIMILAR (1903)..(4035): 991254mologous to Homo sapiens GAP-related protein,accession number M82814,Smith-Waterman Score=3657.

SEQ ID NO: 7231 - DNA, 9026 bp, Homo sapiens
  SIMILAR (198)..(8714): 1001254mologous to Homo sapiens neurofibromin,accession number M89914,Smith-Waterman Score=14667.
ccggggcggcgcgggggcctcccactcccgctcggcgctgaccccccatccccacccccgtgggaacactgggagcctgcactccacagaccctctccttgcctcttccctcacctcagcctccgctccccgccctcttcccggcccagggcgccggcccacccttccctccgccgccccccggccgcggggaggacatggccgcgcacaggccggtggaatgggtccaggccgtggtcagccgcttcgacgagcagcttccaataaaaacaggacagcagaacacacataccaaagtcagtactgagcacaacaaggaatgtctaatcaatatttccaaatacaagttttctttggttataagcggcctcactactattttaaagaatgttaacaatatgagaatatttggagaagctgctgaaaaaaatttatatctctctcagttgattatattggatacactggaaaaatgtcttgctgggcaaccaaaggacacaatgagattagatgaaacgatgctggtcaaacagttgctgccagaaatctgccattttcttcacacctgtcgtgaaggaaaccagcatgcagctgaacttcggaattctgcctctggggttttattttctctcagctgcaacaacttcaatgcagtctttagtcgcatttctaccaggttacaggaattaactgtttgttcagaagacaatgttgatgttcatgatatagaattgttacagtatatcaatgtggattgtgcaaaattaaaacgactcctgaaggaaacagcatttaaatttaaagccctaaagaaggttgcgcagttagcagttataaatagcctggaaaaggcattttggaactgggtagaaaattatccagatgaatttacaaaactataccagatcccacagactgatatggctgaatgtgcagaaaagctatttgacttggtggatggttttgctgaaagcaccaaacgtaaagcagcagtttggccactacaaatcattctccttatcttgtgtccagaaataatccaggatatatccaaagacgtggttgatgaaaacaacatgaataagaagttatttctggacagtctacgaaaagctcttgctggccatggaggaagtaggcagctgacagaaagtgctgcaattgcctgtgtcaaactgtgtaaagcaagtacttacatcaattgggaagataactctgtcattttcctacttgttcagtccatggtggttgatcttaagaacctgctttttaatccaagtaagccattctcaagaggcagtcagcctgcagatgtggatctaatgattgactgccttgtttcttgctttcgtataagccctcacaacaaccaacactttaagatctgcctggctcagaattcaccttctacatttcactatgtgctggtaaattcactccatcgaatcatcaccaattccgcattggattggtggcctaagattgatgctgtgtattgtcactcggttgaacttcgaaatatgtttggtgaaacacttcataaagcagtgcaaggttgtggagcacacccagcaatacgaatggcaccgagtcttacatttaaagaaaaagtaacaagccttaaatttaaagaaaaacctacagacctggagacaagaagctataagtatcttctcttgtccatggtgaaactaattcatgcagatccaaagctcttgctttgtaatccaagaaaacaggggcccgaaacccaaggcagtacagcagaattaattacagggctcgtccaactggtccctcagtcacacatgccagagattgctcaggaagcaatggaggctctgctggttcttcatcagttagatagcattgatttgtggaatcctgatgctcctgtagaaacattttgggagattagctcacaaatgcttttttacatctgcaagaaattaactagtcatcaaatgcttagtagcacagaaattctcaagtggttgcgggaaatattgatctgcaggaataaatttcttcttaaaaataagcaggcagatagaagttcctgtcactttctccttttttacggggtaggatgtgatattccttctagtggaaataccagtcaaatgtccatggatcatgaagaattactacgtactcctggagcctctctccggaagggaaaagggaactcctctatggatagtgcagcaggatgcagcggaacccccccgatttgccgacaagcccagaccaaactagaagtggccctgtacatgtttctgtggaaccctgacactgaagctgttctggttgccatgtcctgtttccgccacctctgtgaggaagcagatatccggtgtggggtggatgaagtgtcagtgcataacctcttgcccaactataacacattcatggagtttgcctctgtcagcaatatgatgtcaacaggaagagcagcacttcagaaaagagtgatggcactgctgaggcgcattgagcatcccactgcaggaaacactgaggcttgggaagatacacatgcaaaatgggaacaagcaacaaagctaatccttaactatccaaaagccaaaatggaagatggccaggctgctgaaagccttcacaagaccattgttaagaggcgaatgtcccatgtgagtggaggaggatccatagatttgtctgacacagactccctacaggaatggatcaacatgactggcttcctttgtgcccttgggggagtgtgcctccagcagagaagcaattctggcctggcaacctatagcccacccatgggtccagtcagtgaacgtaagggttctatgatttcagtgatgtcttcagagggaaacgcagatacacctgtcagcaaatttatggatcggctgttgtccttaatggtgtgtaaccatgagaaagtgggacttcaaatacggaccaatgttaaggatctggtgggtctagaattgagtcctgctctgtatccaatgctatttaacaaattgaagaataccatcagcaagttttttgactcccaaggacaggttttattgactgataccaatactcaatttgtagaacaaaccatagctataatgaagaacttgctagataatcatactgaaggcagctctgaacatctagggcaagctagcattgaaacaatgatgttaaatctggtcaggtatgttcgtgtgcttgggaatatggtccatgcaattcaaataaaaacgaaactgtgtcaattagttgaagtaatgatggcaaggagagatgacctctcattttgccaagagatgaaatttaggaataagatggtagaatacctgacagactgggttatgggaacatcaaaccaagcagcagatgatgatgtaaaatgtcttacaagagatttggaccaggcaagcatggaagcagtagtttcacttctagctggtctccctctgcagcctgaagaaggagatggtgtggaattgatggaagccaaatcacagttatttcttaaatacttcacattatttatgaaccttttgaatgactgcagtgaagttgaagatgaaagtgcgcaaacaggtggcaggaaacgtggcatgtctcggaggctggcatcactgaggcactgtacggtccttgcaatgtcaaacttactcaatgccaacgtagacagtggtctcatgcactccataggcttaggttaccacaaggatctccagacaagagctacatttatggaagttctgacaaaaatccttcaacaaggcacagaatttgacacacttgcagaaacagtattggctgatcggtttgagagattggtggaactggtcacaatgatgggtgatcaaggagaactccctatagcgatggctctggccaatgtggttccttgttctcagtgggatgaactagctcgagttctggttactctgtttgattctcggcatttactctaccaactgctctggaacatgttttctaaagaagtagaattggcagactccatgcagactctcttccgaggcaacagcttggccagtaaaataatgacattctgtttcaaggtatatggtgctacctatctacaaaaactcctggatcctttattacgaattgtgatcacatcctctgattggcaacatgttagctttgaagtggatcctaccaggttagaaccatcagagagccttgaggaaaaccagcggaacctccttcagatgactgaaaagttcttccatgccatcatcagttcctcctcagaattcccccctcaacttcgaagtgtgtgccactgtttataccaggcaacttgccactccctactgaataaagctacagtaaaagaaaaaaaggaaaacaaaaaatcagtggttagccagcgtttccctcagaacagcatcggtgcagtaggaagtgccatgttcctcagatttatcaatcctgccattgtctcaccgtatgaagcagggattttagataaaaagccaccacctagaatcgaaaggggcttgaagttaatgtcaaagatacttcagagtattgccaatcatgttctcttcacaaaagaagaacatatgcggcctttcaatgattttgtgaaaagcaactttgatgcagcacgcaggtttttccttgatatagcatctgattgtcctacaagtgatgcagtaaatcatagtctttccttcataagtgacggcaatgtgcttgctttacatcgtctactctggaacaatcaggagaaaattgggcagtatctttccagcaacagggatcataaagctgttggaagacgaccttttgataagatggcaacacttcttgcatacctgggtcctccagagcacaaacctgtggcagatacacactggtccagccttaaccttaccagttcaaagtttgaggaatttatgactaggcatcaggtacatgaaaaagaagaattcaaggctttgaaaacgttaagtattttctaccaagctgggacttccaaagctgggaatcctattttttattatgttgcacggaggttcaaaactggtcaaatcaatggtgatttgctgatataccatgtcttactgactttaaagccatattatgcaaagccatatgaaattgtagtggaccttacccataccgggcctagcaatcgctttaaaacagactttctctctaagtggtttgttgtttttcctggctttgcttacgacaacgtctccgcagtctatatctataactgtaactcctgggtcagggagtacaccaagtatcatgagcggctgctgactggcctcaaaggtagcaaaaggcttgttttcatagactgtcctgggaaactggctgagcacatagagcatgaacaacagaaactacctgctgccaccttggctttagaagaggacctgaaggtattccacaatgctctcaagctagctcacaaagacaccaaagtttccattaaagttggttctactgctgtccaagtaacttcagcagagcgaacaaaagtcctagggcaatcagtctttctaaatgacatttattatgcttcggaaattgaagaaatctgcctagtagatgagaaccagttcaccttaaccattgcaaaccagggcacgccgctcaccttcatgcaccaggagtgtgaagccattgtccagtctatcattcatatccggacccgctgggaactgtcacagcccgactctatcccccaacacaccaagattcggccaaaagatgtccctgggacactgctcaatatcgcattacttaatttaggcagttctgacccgagtttacggtcagctgcctataatcttctgtgtgccttaacttgtacctttaatttaaaaatcgagggccagttactagagacatcaggtttatgtatccctgccaacaacaccctctttattgtctctattagtaagacactggcagccaatgagccacacctcacgttagaatttttggaagagtgtatttctggatttagcaaatctagtattgaattgaaacacctttgtttggaatacatgactccatggctgtcaaatctagttcgtttttgcaagcataatgatgatgccaaacgacaaagagttactgctattcttgacaagctgataacaatgaccatcaatgaaaaacagatgtacccatctattcaagcaaaaatatggggaagccttgggcagattacagatctgcttgatgttgtactagacagtttcatcaaaaccagtgcaacaggtggcttgggatcaataaaagctgaggtgatggcagatactgctgtagctttggcttctggaaatgtgaaattggtttcaagcaaggttattggaaggatgtgcaaaataattgacaagacatgcttatctccaactcctactttagaacaacatcttatgtgggatgatattgctattttagcacgctacatgctgatgctgtccttcaacaattcccttgatgtggcagctcatcttccctacctcttccacgttgttactttcttagtagccacaggtccgctctcccttagagcttccacacatggactggtcattaatatcattcactctctgtgtacttgttcacagcttcattttagtgaagagaccaagcaagttttgagactcagtctgacagagttctcattacccaaattttacttgctgtttggcattagcaaagtcaagtcagctgctgtcattgccttccgttccagttaccgggacaggtcattctctcctggctcctatgagagagagacttttgctttgacatccttggaaacagtcacagaagctttgttggagatcatggaggcatgcatgagagatattccaacgtgcaagtggctggaccagtggacagaactagctcaaagatttgcattccaatataatccatccctgcaaccaagagctcttgttgtctttgggtgtattagcaaacgagtgtctcatgggcagataaagcagataatccgtattcttagcaaggcacttgagagttgcttaaaaggacctgacacttacaacagtcaagttctgatagaagctacagtaatagcactaaccaaattacagccacttcttaataaggactcgcctctgcacaaagccctcttttgggtagctgtggctgtgctgcagcttgatgaggtcaacttgtattcagcaggtaccgcacttcttgaacaaaacctgcatactttagatagtctccgtatattcaatgacaagagtccagaggaagtatttatggcaatccggaatcctctggagtggcactgcaagcaaatggatcattttgttggactcaatttcaactctaactttaactttgcattggttggacaccttttaaaagggtacaggcatccttcacctgctattgttgcaagaacagtcagaattttacatacactactaactctggttaacaaacacagaaattgtgacaaatttgaagtgaatacacagagcgtggcctacttagcagctttacttacagtgtctgaagaagttcgaagtcgctgcagcctaaaacatagaaagtcacttcttcttactgatatttcaatggaaaatgttcctatggatacatatcccattcatcatggtgacccttcctataggacactaaaggagactcagccatggtcctctcccaaaggttctgaaggataccttgcagccacctatccaactgtcggccagaccagtccccgagccaggaaatccatgagcctggacatggggcaaccttctcaggccaacactaagaagttgcttggaacaaggaaaagttttgatcacttgatatcagacacaaaggctcctaaaaggcaagaaatggaatcagggatcacaacaccccccaaaatgaggagagtagcagaaactgattatgaaatggaaactcagaggatttcctcatcacaacagcacccacatttacgtaaagtttcagtgtctgaatcaaatgttctcttggatgaagaagtacttactgatccgaagatccaggcgctgcttcttactgttctagctacactggtaaaatataccacagatgagtttgatcaacgaattctttatgaatacttagcagaggccagtgttgtgtttcccaaagtctttcctgttgtgcataatttgttggactctaagatcaacaccctgttatcattgtgccaagatccaaatttgttaaatccaatccatggaattgtgcagagtgtggtgtaccatgaagaatccccaccacaataccaaacatcttacctgcaaagttttggttttaatggcttgtggcggtttgcaggaccgttttcaaagcaaacacaaattccagactatgctgagcttattgttaagtttcttgatgccttgattgacacgtacctgcctggaattgatgaagaaaccagtgaagaatccctcctgactcccacatctccttaccctcctgcactgcagagccagcttagtatcactgccaaccttaacctttctaattccatgacctcacttgcaacttcccagcattccccaggaatcgacaaggagaacgttgaactctcccctaccactggccactgtaacagtggacgaactcgccacggatccgcaagccaagtgcagaagcaaagaagcgctggcagtttcaaacgtaatagcattaagaagatcgtgtgaagcttgcttgctttcttttttaaaatcaacttaacatgggctcttcactagtgaccccttccctgtccttgccctttccccccatgttgtaatgctgcacttcctgttttataatgaacccatccggtttgccatgttgccagatgatcaactcttcgaagccttgcctaaatttaatgctgccttttctttaacttttttcttctacttttggcgtgtatctggtatatgtaagtgttcagaacaactgcaaagaaagtgggaggtcaggaaacttttaactgagaaatctcaattgtaagagaggat

SEQ ID NO: 7232 - DNA, 461 bp, Homo sapiens
  SIMILAR (279)..(37): 901254mologous to Homo sapiens FLJ00003 protein,accession number AK000003,Smith-Waterman Score=395.
catccctgcagtcttggctaggcggctgagaggcagggcttggtggacgctctgggcccagttgttgagcaagccggtgaccgagtgcttgtccgggagctgcagcagcctggaggtcatgcagcggtgcaccgactggaggaaggggttggcgtcgtactgccactgccggtctatccacagcgggctttgggcaggatagtcagcgggcacactgagctccagtggtggcacacttgggaggtccttgtcatccagcttgcagatcaggtggacagtgccattgttgctgcagtgagaagggtccaggtttaccaggaacttggggtccagcctggccacctcaccctggagcacactggggatgctctgccgctcatcatcctcaagcctgcgcttccgggtgcacaccactggggccgtgatgggtgggcccctcgtgccaagcttggcgtatgcat

SEQ ID NO: 7233 - DNA, 2253 bp, Homo sapiens
  SIMILAR (961)..(2178): 901254mologous to Homo sapiens NIMA-like protein kinase 1,accession number U11050,Smith-Waterman Score=1836.
atgcagcggagccccccgacttgccgacaagcgcagaccagtctagaagtggccctgtacatgtttctgcagaaccctgacactgaagctgttctggttgccatgtcctgtttctgccacctctgtgaggaagcagatacccagtgtggggtggatgaagtgtcagtgcataacctcttgcccaactctaacacattcatggagtttgcctgtcagcaatgtgatgtcaacagcccacccgtgggtccggtcagtgaacataagggttccatgatttcagtgatgtcctcagagggaaacgcagatacacctgtcagcaaatatatggatcagctcttgtcgttaatggtgtgtaaccttgagaaagtgggacttcaaataccgaccaatgataaggacctggttttattgactgataccaatactcaatttgtagagcaaaccctagatataatgaagaacttgctagataatcatactgaaggcagccctgaacatctagagcaagctagcattgaaacaatgatgttaaatctggtcaggaataagatggtggaatacctgacagactgggttatgggaacatcaaaccaagcagcagatgatgatgtaaaatgtcttacaagccgcatcaccatcctggtggaactctcctgtgaggacagccaaggcctgaactacctgcgggtttgcccaggcaaccagccagccctggtccaaggcatcctggagcgagttgtggatggccccgtgccccaccagacagtgcgcctggaggacctggacgagagcggtgagccccaggctggggagccagtgctgcctggcatcctccggccaccctacctggctgaggggctgggcctgggcctgccggtccctggagctcccggtccctggagctctgcacttgggggcacaacttgcatgaggcagcgcgactctggcgactggctggccatgccgtcccgggctgagaactatgaagtgttgtacaccattggcacaggctcctgtggccgctgccagaagatccagaggaagagtgacggcaagatactagtttggaaagaacttcattatggctccatgacagaagctgagaaacagatgcttgtttctgaagtgaatttgctttgtgaactgaaaaatccaaacatcgttcattactatgatcgtattattgaccggaccaacacaacactgtacattgtaatggaatattgtgaagaaggagacctggctagtgtaattacaaagggaaccaaggaaaggcaatacttagatgaagagtttgttcttcgagtgacgactcagttgactctggccctgaaacgaagtgatggtgatcatactgtagtgcgtcgggatctgaaaccagccagtgttttcctggatggcaagcaaaacgtcaagcttggagatttggggctagccagaatattaaaccacgacacgagttttgcaaaaacatttgttggcacaccttattacatgtctcctgaacaaacgaatcacatgtcctacaatgagaaaccagatatctggtcattgggccgtttgctgtatgagttaggtgcattaatgcctccatttacagcttttagccagaaagaacttgctgggaaaatcagagaaggcaaattcaggcaaattctataccgtgactctgacgaattgaatgaaattattatgaggatgttaaaggattaccatcgaccttctgttgaagaaattctcgagaaccctttaatagcagatttggttgcagaagaacgaagaagaaatcttgagagaagagggcgacaattaggagagccagaaaaattgcaggattccagccctgtattgagtgagctgaaactaaaggaaattcagttagaggagcgagagcgagctctcaaagcaagagaagaaagattggagcagaaagaacaggagttttgtgtccgtgagagactagcagaggacagactggctagagcagaaaatctgttgaagaattacagcttgctaaagaagttcctgtctctggcaagtagtccagaacttcttagtcttccatcctcagtaattaagaagaaaggtcatttcagtggggaaagtaaagagaatgtcatgaggagtgagaattctgagagtcagctcacatctaagtccaagtgcaaggacctgaaggtccttgcttcatgcttcatgctgcccagctgcgggctcaagccctgtcagatattgagaaaaattatcaactaa

SEQ ID NO: 7234 - DNA, 8962 bp, Homo sapiens
ccccagcctccttgccaacgccccctttccctctccccctcccgctcggcgctgaccccccatccccacccccgtgggaacactgggagcctgcactccacagaccctctccttgcctcttccctcacctcagcctccgctccccgccctcttcccggcccagggcgccggcccacccttccctccgccgccccccggccgcggggaggacatggccgcgcacaggccggtggaatgggtccaggccgtggtcagccgcttcgacgagcagcttccaataaaaacaggacagcagaacacacataccaaagtcagtactgagcacaacaaggaatgtctaatcaatatttccaaatacaagttttctttggttataagcggcctcactactattttaaagaatgttaacaatatgagaatatttggagaagctgctgaaaaaaatttatatctctctcagttgattatattggatacactggaaaaatgtcttgctgggcaaccaaaggacacaatgagattagatgaaacgatgctggtcaaacagttgctgccagaaatctgccattttcttcacacctgtcgtgaaggaaaccagcatgcagctgaacttcggaattctgcctctggggttttattttctctcagctgcaacaacttcaatgcagtctttagtcgcatttctaccaggttacaggaattaactgtttgttcagaagacaatgttgatgttcatgatatagaattgttacagtatatcaatgtggattgtgcaaaattaaaacgactcctgaaggaaacagcatttaaatttaaagccctaaagaaggttgcgcagttagcagttataaatagcctggaaaaggcattttggaactgggtagaaaattatccagatgaatttacaaaactgtaccagatcccacagactgatatggctgaatgtgcagaaaagctatttgacttggtggatggttttgctgaaagcaccaaacgtaaagcagcagtttggccactacaaatcattctccttatcttgtgtccagaaataatccaggatatatccaaagacgtggttgatgaaaacaacatgaataagaagttatttctggacagtctacgaaaagctcttgctggccatggaggaagtaggcagctgacagaaagtgctgcaattgcctgtgtcaaactgtgtaaagcaagtacttacatcaattgggaagataactctgtcattttcctacttgttcagtccatggtggttgatcttaagaacctgctttttaatccaagtaagccattctcaagaggcagtcagcctgcagatgtggatctaatgattgactgccttgtttcttgctttcgtataagccctcacaacaaccaacactttaagatctgcctggctcagaattcaccttctacatttcactatgtgctggtaaattcactccatcgaatcatcaccaattccgcattggattggtggcctaagattgatgctgtgtattgtcactcggttgaacttcgaaatatgtttggtgaaacacttcataaagcagtgcaaggttgtggagcacacccagcaatacgaatggcaccgagtcttacatttaaagaaaaagtaacaagccttaaatttaaagaaaaacctacagacctggagacaagaagctataagtatcttctcttgtccatggtgaaactaattcatgcagatccaaagctcttgctttgtaatccaagaaaacaggggcccgaaacccaaggcagtacagcagaattaattacagggctcgtccaactggtccctcagtcacacatgccagagattgctcaggaagcaatggaggctctgctggttcttcatcagttagatagcattgatttgtggaatcctgatgctcctgtagaaacattttgggagattagctcacaaatgcttttttacatctgcaagaaattaactagtcatcaaatgcttagtagcacagaaattctcaagtggttgcgggaaatattgatctgcaggaataaatttcttcttaaaaataagcaggcagatagaagttcctgtcactttctccttttttacggggtaggatgtgatattccttctagtggaaataccagtcaaatgtccatggatcatgaagaattactacgtactcctggagcctctctccggaagggaaaagggaactcctctatggatagtgcagcaggatgcagcggaacccccccaatttgccgacaagcccagaccaaactagaagtggccctgtacatgtttctgtggaaccctgacactgaagctgttctggttgccatgtcctgtttccgccacctctgtgaggaagcagatatccggtgtggggtggatgaagtgtcagtgcataacctcttgcccaactataacacattcatggagtttgcctctgtcagcaatatgatgtcaacaggaagagcagcacttcagaaaagagtgatggcactgctgaggcgcattgagcatcccactgcaggaaacactgaggcttgggaagatacacatgcaaaatgggaacaagcaacaaagctaatccttaactatccaaaagccaaaatggaagatggccaggctgctgaaagccttcacaagaccattgttaagaggcgaatgtcccatgtgagtggaggaggatccatagatttgtctgacacagactccctacaggaatggatcaacatgactggcttcctttgtgcccttggaggagtgtgcctccagcagagaagcaattctggcctggcaacctatagcccacccatgggtccagtcagtgaacgtaagggttctatgatttcagtgatgtcttcagagggaaacgcagatacacctgtcagcaaatttatggatcggctgttgtccttaatggtgtgtaaccatgagaaagtgggacttcaaatacggaccaatgttaaggatctggtgggtctagaattgagtcctgctctgtatccaatgctatttaacaaattgaagaataccatcagcaagttttttgactcccaaggacaggttttattgactgataccaatactcaatttgtagaacaaaccatagctataatgaagaacttgctagataatcatactgaaggcagctctgaacatctagggcaagctagcattgaaacaatgatgttaaatctggtcaggtatgttcgtgtgcttgggaatatggtccatgcaattcaaataaaaacgaaactgtgtcaattagttgaagtaatgatggcaaggagagatgacctctcattttgccaagagatgaaatttaggaataagatggtagaatacctgacagactgggttatgggaacatcaaaccaagcagcagatgatgatgtaaaatgtcttacaagagatttggaccaggcaagcatggaagcagtagtttcacttctagctggtctccctctgcagcctgaagaaggagatggtgtggaattgatggaagccaaatcacagttatttcttaaatacttcacattatttatgaaccttttgaatgactgcagtgaagttgaagatgaaagtgcgcaaacaggtggcaggaaacgtggcatgtctcggaggctggcatcactgaggcactgtacggtccttgcaatgtcaaacttactcaatgccaacgtagacagtggtctcatgcactccataggcttaggttaccacaaggatctccagacaagagctacatttatggaagttctgacaaaaatccttcaacaaggcacagaatttgacacacttgcagaaacagtattggctgatcggtttgagagattggtggaactggtcacaatgatgggtgatcaaggagaactccctatagcgatggctctggccaatgtggttccttgttctcagtgggatgaactagctcgagttctggttactctgtttgattctcggcatttactctaccaactgctctggaacatgttttctaaagaagtagaattggcagactccatgcagactctcttccgaggcaacagcttggccagtaaaataatgacattctgtttcaaggtatatggtgctacctatctacaaaaactcctggatcctttattacgaattgtgatcacatcctctgattggcaacatgttagctttgaagtggatcctaccaggttagaaccatcagagagccttgaggaaaaccagcggaacctccttcagatgactgaaaagttcttccatgccatcatcagttcctcctcagaattcccccctcaacttcgaagtgtgtgccactgtttataccaggtggttagccagcgtttccctcagaacagcatcggtgcagtaggaagtgccatgttcctcagatttatcaatcctgccattgtctcaccgtatgaagcagggattttagataaaaagccaccacctagaatcgaaaggggcttgaagttaatgtcaaagatacttcagagtattgccaatcatgttctcttcacaaaagaagaacatatgcggcctttcaatgattttgtgaaaagcaactttgatgcagcacgcaggtttttccttgatatagcatctgattgtcctacaagtgatgcagtaaatcatagtctttccttcataagtgacggcaatgtgcttgctttacatcgtctactctggaacaatcaggagaaaattgggcagtatctttccagcaacagggatcataaagctgttggaagacgaccttttgataagatggcaacacttcttgcatacctgggtcctccagagcacaaacctgtggcagatacacactggtccagccttaaccttaccagttcaaagtttgaggaatttatgactaggcatcatcaggtacatgaaaaagaagaattcaaggctttgaaaacgttaagtattttctaccaagctgggacttccaaagctgggaatcctattttttattatgttgcacggaggttcaaaactggtcaaatcaatggtgatttgctgatataccatgtcttactgactttaaagccatattatgcaaagccatatgaaattgtagtggaccttacccataccgggcctagcaatcgctttaaaacagactttctctctaagtggtttgttgtttttcctggctttgcttacgacaacgtctccgcagtctatatctataactgtaactcctgggtcagggagtacaccaagtatcatgagcggctgctgactggcctcaaaggtagcaaaaggcttgttttcatagactgtcctgggaaactggctgagcacatagagcatgaacaacagaaactacctgctgccaccttggctttagaagaggacctgaaggtattccacaatgctctcaagctagctcacaaagacaccaaagtttctattaaagttggttctactgctgtccaagtaacttcagcagagcgaacaaaagtcctagggcaatcagtctttctaaatgacatttattatgcttcggaaattgaagaaatctgcctagtagatgagaaccagttcaccttaaccattgcaaaccagggcacgccgctcaccttcatgcaccaggagtgtgaagccattgtccagtctatcattcatatccggacccgctgggaactgtcacagcccgactctatcccccaacacaccaagattcggccaaaagatgtccctgggacactgctcaatatcgcattacttaatttaggcagttctgacccgagtttacggtcagctgcctataatcttctgtgtgccttaacttgtacctttaatttaaaaatcgagggccagttactagagacatcaggtttatgtatccctgccaacaacaccctctttattgtctctattagtaagacactggcagccaatgagccacacctcacgttagaatttttggaagagtgtatttctggatttagcaaatctagtattgaattgaaacacctttgtttggaatacatgactccatggctgtcaaatctagttcgtttttgcaagcataatgatgatgccaaacgacaaagagttactgctattcttgacaagctgataacaatgaccatcaatgaaaaacagatgtacccatctattcaagcaaaaatatggggaagccttgggcagattacagatctgcttgatgttgtactagacagtttcatcaaaaccagtgcaacaggtggcttgggatcaataaaagctgaggtgatggcagatactgctgtagctttggcttctggaaatgtgaaattggtttcaagcaaggttattggaaggatgtgcaaaataattgacaagacatgcttatctccaactcctactttagaacaacatcttatgtgggatgatattgctattttagcacgctacatgctgatgctgtccttcaacaattcccttgatgtggcagctcatcttccctacctcttccacgttgttactttcttagtagccacaggtccgctctcccttagagcttccacacatggactggtcattaatatcattcactctctgtgtacttgttcacagcttcattttagtgaagagaccaagcaagttttgagactcagtctgacagagttctcattacccaaattttacttgctgtttggcattagcaaagtcaagtcagctgctgtcattgccttccgttccagttaccgggacaggtcattctctcctggctcctatgagagagagacttttgctttgacatccttggaaacagtcacagaagctttgttggagatcatggaggcatgcatgagagatattccaacgtgcaagtggctggaccagtggacagaactagctcaaagatttgcattccaatataatccatccctgcaaccaagagctcttgttgtctttgggtgtattagcaaacgagtgtctcatgggcagataaagcagataatccgtattcttagcaaggcacttgagagttgcttaaaaggacctgacacttacaacagtcaagttctgatagaagctacagtaatagcactaaccaaattacagccacttcttaataaggactcgcctctgcacaaagccctcttttgggtagctgtggctgtgctgcagcttgatgaggtcaacttgtattcagcaggtaccgcacttcttgaacaaaacctgcatactttagatagtctccgtatattcaatgacaagagtccagaggaagtatttatggcaatccggaatcctctggagtggcactgcaagcaaatggatcattttgttggactcaatttcaactctaactttaactttgcattggttggacaccttttaaaagggtacaggcatccttcacctgctattgttgcaagaacagtcagaattttacatacactactaactctggttaacaaacacagaaattgtgacaaatttgaagtgaatacacagagcgtggcctacttagcagctttacttacagtgtctgaagaagttcgaagtcgctgcagcctaaaacatagaaagtcacttcttcttactgatatttcaatggaaaatgttcctatggatacatatcccattcatcatggtgacccttcctataggacactaaaggagactcagccatggtcctctcccaaaggttctgaaggataccttgcagccacctatccaactgtcggccagaccagtccccgagccaggaaatccatgagcctggacatggggcaaccttctcaggccaacactaagaagttgcttggaacaaggaaaagttttgatcacttgatatcagacacaaaggctcctaaaaggcaagaaatggaatcagggatcacaacaccccccaaaatgaggagagtagcagaaactgattatgaaatggaaactcagaggatttcctcatcacaacagcacccacatttacgtaaagtttcagtgtctgaatcaaatgttctcttggatgaagaagtacttactgatccgaagatccaggcgctgcttcttactgttctagctacactggtaaaatataccacagatgagtttgatcaacgaattctttatgaatacttagcagaggccagtgttgtgtttcccaaagtctttcctgttgtgcataatttgttggactctaagatcaacaccctgttatcattgtgccaagatccaaatttgttaaatccaatccatggaattgtgcagagtgtggtgtaccatgaagaatccccaccacaataccaaacatcttacctgcaaagttttggttttaatggcttgtggcggtttgcaggaccgttttcaaagcaaacacaaattccagactatgctgagcttattgttaagtttcttgatgccttgattgacacgtacctgcctggaattgatgaagaaaccagtgaagaatccctcctgactcccacatctccttaccctcctgcactgcagagccagcttagtatcactgccaaccttaacctttctaattccatgacctcacttgcaacttcccagcattccccaggaatcgacaaggagaacgttgaactctcccctaccactggccactgtaacagtggacgaactcgccacggatccgcaagccaagtgcagaagcaaagaagcgctggcagtttcaaacgtaatagcattaagaagatcgtgtgaagcttgcttgctttcttttttaaaatcaacttaacatgggctcttcactagtgaccccttccctgtccttgccctttccccccatgttgtaatgctgcacttcctgttttataatgaacccatccggtttgccatgttgccagatgatcaactcttcgaagccttgcctaaatttaatgctgccttttctttaactttttttcttctacttttggcgtgtatctggtatatgtaagtgttcagaacaactgcaaagaaagtgggaggtcaggaaacttttaactgagaaat

SEQ ID NO: 7235 - DNA, 2367 bp, Homo sapiens
  SIMILAR (1537)..(1959): 881254mologous to Homo sapiens GAP-related protein,accession number M82814,Smith-Waterman Score=656.
caccgatgccaatacaaccgctgtcgccctcaatgcagcagcccaccctacaaggctcctaccaccttgcccccgcgggcaccctcctaccactccagtcgagctgcagtctccgtcgctgccaccaatctcgtgagaccagctgcagagccatatgcaggctccagtttaccacaggcagtggagcagaaaatagtgcccctaacccatcacccacaaccagcagtacacattagtgcacacaatctgcctccctccaccacccccgccaccgcaggcagtgtagccagtgatagccagccaacccccccccaaccgccagcaataccccagagagtgccccgaaccagctgcctgccacagggagtgcagccttgggcagtgagccccaaaaggacacccaacccctgcccccagaggaaaagctcccactgcaggccacccttcgaccgctccatccccaccaccaaccggagacagccagtgccctggctccagctggcagcagatggcgagctgctcagggcccagcttagaggaccgggaatgggtaatcacaggccgtacgctggaggctggagccgcggtaggacggctcgcctcgctgcggtttgtggtgacggcaacggagaaagcagtgtggtgcaagagccgggccaggagcagctgtactgggacacgctgaagcagctgtccaagcacatcaagcccctgcaccgcgtggtcaacaagatcgacaagagtgaaggtcccctgaagaccttgccaaagtgtgagatcaccctggagaaactcaagaatgacatggcggtggtgagtgggatgctggggacccctgggggatcggggctccctcaagagctcctgggggcaccactggaggggccttcatggtcaggctggcccgctgcccctggtgccgctgaccaaacagcagtacctatgccagcagctcctggatgctgtcctagccaatatctgctcaccctcttcagccattccctgtaccgcacattcgctccagccatgactgccatccacggcccactcatcacatacatccagctgggctgggctttacagagggcggatggccagccctggaccatgtgtgcccactgtgtggtgtgcacccggaagcacaggcttgaggacgatgagcggcagagcatccccagcatgctccagggcgaggtggccaggctggaccccaagtgcatgataaacctggactcttctcgctgcagcaacaatggcaccgtccacctgagtcttatatttaaagaaaaagtaacaagccttaaatttaaagaaaaacctacaggcttggagacaagaagctgtaagtatcttctcttgtccatggtgaaactaattcatgcagatccagagctcttgctttgtaccagtctagaagtggccctgtacatgtttctgcggaaccctgacactgaagctgttctggttgccatgtcctgtttccgccacctctgtgaggaagcagatacccggtgtggggtggacgaagtgtcgacttgggaagatacacatgcaaaatgggaacaagcaacaaaactaatccttagctatccaaaagcccaaatggaagatggccagcttcacaagaccattgttaagaggcgaatgtcccatgtgagtggaggaggacccatagatttgtctgacacagactccctacaggcatggatcaacatgactagcttcctttgtgcccttgggggagtgtgcctccagcagagaaggaattctggcctggcaacctatagcccacccatgggtccggtcagtgaacataagggttccatgatttcagtgatgtcctcagagggaaacgcagatacacctgtcagcaaatatatggatcagctgttgtcgttaatggtgtgtaagcttgagaaagtgggacttcaaatacggaccaatggtaaggacctggttttattgactgataccaatactcaatttgtagaggaaaccctagctatattgaagaacttgctagataatcatactgaaggcagctctgaacatctagagcaagctagcattgaaacaatgatgttaaatctggtcaggtacgtttgtgtgcttgggaatatggtccatgcaattcaaataaaaacgaaactgtgtcagttggttgaagtaacgatggcaaggagagatgacctctcattttgccgagagatgaaatttaggaataagatggtagaatacctgacagactgggttatgggaacatcaaaccaagcagcagatgatgatgtaaaatgtcttacaagactttcaggaaaaataaatgtgcgagagcggtatgtttgggaagttattgttgtcagtttatga

SEQ ID NO: 7236 - DNA, 426 bp, Homo sapiens
  SIMILAR (1)..(114): 1001254mologous to Homo sapiens dJ273P12.2 (adenylyl cyclase- associated protein 2),accession number AL034372,Smith-Waterman Score=192.
atgcagggactggtggaaagactggaacgagctgtcagccgcctggagtcgctgtctgcagagtcccacaggccccctgggaactgcggggaagtcaatggtgtcattgcaggtttttttgggctgagaaaagccgtggggaagaagggacttcagaaaaagctttcaccaggaaagacctacattggtgcttctagaatttcaggcgaatttggacccgtgcctgtattacataccatgggacaaaaattactgtgtgtggcaccctccgtggaagcctttgacaagctgatggacagtatggtggccgagtttttaaagaacagtaggatccttgctggggacgtggagacccatatcagtggcggcattagattctcagaggagcataaaccctatggtgaactgcgcattcgagggatctag

SEQ ID NO: 7237 - DNA, 1690 bp, Homo sapiens
  SIMILAR (310)..(690): 691254mologous to Homo sapiens CAP2,accession number U02390,Smith-Waterman Score=379.
tcccctttatttccactccccacccgcgtggctttgctctccctctcccccctcagctcgtctgtatttggagctccggaagctgccggcgactctcccctggagcagcgtgactgacaccggctcctattcagctgggaggagggagaggggaggagaaggggagggccgcggaaggagggtacgagtggccgaccacagatctgcattgccgaggacgggaccccagggcagcgaagaggaattggccaacatgcagggacttggtggaaagactggaacgagctgtcagccgcctggagtcgctgttctgcagagtcccacaggccccctgggaacttgcggggaagtcaatggtgtcattgccaggtgtggcaccctcccgtgggaagcctttgcacaagctgatggacagtatggtggccgagttttttaaagaacagtaggatcctttctggggacgtggagacccttgcagaaattgtgcacagtgctttccaggcccagcgggctttccttctgatggcctctcagtaccaacaaccccacgagaatgacgtggccgcacttctgaaacccatatcggaaaagatttaaggaaatccaaacttttcaaagagagaaacccgggggagtaacatgtttaatcatctttcggccgtcagcgaaagcatccctgcccttggatgggatagctgtgtctcccaaacctggtccttatgtcaaggagatgaatgacgctgccaccttttacactaacagggtcttaaaggactacaaacacagtgatttgcgtcatgtggattgggtgaagtcatatttgaacatttggagtgaacttcaagcatacatcaaggaacaccacaccacgggcctcacatggagcaaaacaggtcctgtagcatccacagtatcagcgttttctgtcctctcctctgggcctggccttcctccaccccctcctcctctgcctcctccagggccacctccacttttcgagaatgaaggcaaaaaagaggaatcttctccttcacgctcagctttatttgcccaacttaaccagggagaagcaattacaaaagggctccgccatgtcacagatgaccagaagacatacaaaaatcccagcctgcgggctcaaggagggcaaactcaatctcccaccaaaagtcacactccaagtcccacatctcctaaatcttatccttctcaaaaacatgccccagtgttggagttggaaggaaagaaatggagagtggagtaccaagaggacaggaatgaccttgtgatttcagagactgagctgaaacaagtggcttacattttcaaatgcgaaaaatcaactattcagataaaagggaaagtaaactccattataattgacaactgtaagaaactcggcctggtgtttgacaatgtggtgggcattgtggaagtgatcaactcccaggacattcaaatccaggtaatggggagagtgccaacaatttccattaataagacagaaggttgccacatatacctcagtgaagatgcattagactgtgagatcgtgagcgccaagtcatctgaaatgaacatacttatccctcaggatggtgattatagagaatttcccattcctgaacagttcaagacagcatgggatggatccaagttaatcactgaacctgcagaaattatggcctaa

SEQ ID NO: 7238 - DNA, 433 bp, Homo sapiens
  SIMILAR (2)..(433): 1001254mologous to Rattus norvegicus Ca2+-dependent activator protein; calcium-dependent actin-binding protein,accession number U16802,Smith-Waterman Score=731.
aggtgctttgaaagctactctctcactcttggaaagggttttgatgaaagatattgttaccccagtgccacaagaggaggtaaaaacagttatccgtaaatgtctggaacaggctgcgttagtcaactattctcggctctcagagtatgccaaaatcgaagaaaatgtaggccggttaatcactcctgccaaaaagcttgaagatacaatacgtcttgctgaactagtcattgaagttcttcagcaaaatgaggagcaccacgcagaggcctttgcgtggtggtcagatttaatggtggagcatgcggagacgttcctgtcactctttgcagtagacatggatgcagccttagaggtgcaacctccagacacatgggacagttttccactatttcagctgctgaatgattttctccgtactgactataatttg

SEQ ID NO: 7239 - DNA, 3625 bp, Homo sapiens
  SIMILAR (1)..(1923): 961254mologous to Rattus norvegicus Ca2+-dependent activator protein; calcium-dependent actin-binding protein,accession number U16802,Smith-Waterman Score=3202.
agcgagaaggagaaggaagagttggagcggctgcagaaagaggaggaggagaggaagaagaggctgcagctgtatgtgttcgtgatgcgctgcatcgcctacccctttaatgccaagcagcccaccgacatggctcgccggcagcagaagatcagcaaacagcagctgcagacagtcaaggaccggtttcaggctttcctcaatggggaaacccagatcatggctgacgaagccttcatgaacgctgtgcagagttactatgaggtgttcctgaagagcgaccgtgtggcccgcatggttcagagtggaggctgttccgccaacgactcccgggaggtcttcaagaagcacattgagaagagagtgcgcagcctgcctgagattgacggcctcagcaaggagactgtgctgagctcctggatggccaaatttgatgccatctaccgtggagaagaggacccgcggaagcagcaggcccggatgacagccagcgcagcctccgagctgattctgagcaaggagcaactctatgagatgttccagaacattcttgggatcaagaagttcgaacatcagctcctttacaatgcctgccagctggacaatccagatgagcaagcagcccagatcagacgagagctggatggacgtctacaaatggcagaccaaatagccagggaacgcaaatttcccaagtttgtatccaaagaaatggaaaacatgtacattgaggagctgaagtcatctgtcaacctgctcatggccaacttggagagcatgccggtatccaaaggcggggagttcaagctccagaaactcaaacgcagccacaatgcttccatcatcgacatgggcgaggagagtgagaaccagctctccaagtcagatgtcgtgctgtctttctcattggaggtggtaattatggaagtccaaggcctcaaatctttggctccaaatcgcatcgtatattgcacaatggaggtggaaggaggagagaaactacagactgatcaggccgaggcttctaaaccaacctggggcacccagggtgacttctccacaacccatgcactgccagctgtgaaggtgaagctgttcacagagagcacaggcgtcctggcgttggaggacaaggagcttgggcgggttattctccatcccaccccgaacagccccaaacagtcagagtggcacaaaatgacagtctccaaaaactgccccgaccaagatctcaaaatcaaacttgctgtccgaatggataagcctcaaaacatgaagcattctgggtatttatgggccatcggtaagaatgtctggaagagatggaagaaaaggttttttgtattggtgcaggtcagtcagtacacgtttgccatgtgcagttatcgggagaagaaagcggagcctcaggaacttctacaattggatggctacactgtggattacaccgacccccagccaggtttggagggtggccgagccttcttcaatgctgtcaaggagggagacaccgtgatatttgccagtgacgatgaacaagaccgcatcctgtgggtccaggccatgtatcgggccacggggcagtcacacaagcctgtgcccccgacccaagtccagaaactcaacgccaagggaggaaatgtacctcagctggatgcccctatctctcaattttctggactgaaggacgcagatagagctcaaaaacatggcatggatgaatttatctcttccaacccctgtaactttgaccacgcttccctctttgagatggtacaacgccttactttggatcacagacttaatgattcctattcttgcctgggctggttcagtcctggccaggtgtttgtactagacgagtattgcgcccgaaatggagtccgggggtgtcaccgacatctctgctacctcaaaagacttgcttgaacgggcagaaaatggcgccatgatcgaccccacccttcttcactacagctttgccttctgtgcatcccatgtccatgggaacaggcctgatggaattggaactgtgactgttgaagaaaaggaacgttttgaagaaatcaaagagaggctccgagttctgctagaaaatcagattacacattttaggtattgctttccatttggtcgacctgaaggtgctttgaaagctactctctcactcttggaaagggttttgatgaaagatattgttaccccagtgccacaagaggaggtaaaaacagttatccgtaaatgtctggaacaggctgcgttagtcaactattctcggctctcagagtatgccaaaatcgaagagaatcaaaaggatgcagaaaatgtaggccggttaatcactcctgccaaaaagcttgaagatacaatacgtcttgctgaactagtcattgaagttcttcagcaaaatgaggagcaccacgcagaggggaaagaggcctttgcgtggtggtcagatttaatggtggagcatgcggagacgttcctgtcactctttgcagtagacatggatgcagccttagaggtgcaacctccagacacatgggacagttttccactatttcagctgctgaatgattttctccgtactgactataatttgtgcaatggaaaatttcacaaacacctgcaagacctgtttgccccacttgttgttagatatgtggatctgatggagtcctcaattgcacaatccattcacaggggctttgagcgggagtcatgggaaccagtcaataatgggtcaggcacctcagaagatctgttttggaaacttgacgcccttcagaccttcattcgggacctgcactggcctgaagaagagtttggaaagcacctggaacaacggctgaagttgatggcaagtgacatgatcgaatcttgtgtcaaaagaaccaggattgcatttgaagttaagctgcaaaaaaccagtcgatcaacagattttcgagtcccacagtcaatatgcaccatgtttaatgttatggttgatgccaaagctcaatcaacaaaactttgcagcatggaaatgggccaagagcatcaataccattcaaaaatagacgaactaattgaagaaactgttaaagaaatgataacactcttggttgcaaagttcgttactatcttggaaggagtgctggcaaaattatccagatatgacgaagggactttgttttcttcttttctgtcatttaccgtgaaggcagcttccaaatatgtggatgtacctaaacccgggatggacgtggccgacgcctacgtgactttcgtccgccattctcaggatgtcctgcgtgataaggtcaatgaggagatgtacatagaaaggttatttgatcaatggtacaacagctccatgaacgtgatctgcacctggttgacggaccggatggacttacagcttcatatttatcagttgaaaacactaattaggatggtaaagaaaacctacagagatttccgattgcaaggggtcctggactccaccttaaacagcaagacctatgaaacgatccggaaccgtctcactgtggaggaagccacagcatcagtgagtgaaggtgggggactgcagggcatcagcatgaaggacagcgatgaggaagacgaagaagacgattag

SEQ ID NO: 7240 - DNA, 1752 bp, Homo sapiens
  SIMILAR (511)..(882): 841254mologous to Rattus norvegicus Ca2+-dependent activator protein; calcium-dependent actin-binding protein,accession number U16802,Smith-Waterman Score=497.
atgacattacatccggtgcttctcaaccctttttcccacaaagataaagggcaaaaactgtgtagtggggatagctctgttttactaacctctgcatgtagcactttatatagcaggcaggcactgatgcggtataaaaaacacctccacattcttggtctcatgttacacactgaacacaaagattattgcacttgtgaacatgagcatgttgctggctggccttccaattctgagcaagttattctccatcccaccccgaacagccccaaacagtcagagtggcacaaaatgacagtctccaaaaactgccccgaccaagatctcaaaatcaaacttgctgtccgaatggataagcctcaaaacatgaagcattctgggacaattcaaaactttcctagcagcatgctaggtgattctagtttggagaggtcttacaggctccgcgtaccttgtcggaggcatccagatcattcaaactctgcatatgactcacttgcacctcaatcagcaacccacatctttgaggtgcctgatggaattggaactgtgactgttgaagaaaaggaacgttttgaagaaatcaaagagaggctccgagttctgctagaaaatcagattacacattttaggtattgctttccatttggtcgacctgaaggtgctttgaaagctactctctcactcttggaaagggttttgatgaaagatattgttaccccagtgccacaagaggaggtaaaaacagttatccgtaaatgtctggaacaggctgcgttagtcaactattctcggctctcagagtatgccaaaatcgaaggtttggagggtggccgagccttcttcaatgctgtcaaggagggagacaccgtgatatttgccagtgacgatgaacaagaccgcatcctgtgggtccaggccatgtatcgggccacggggcagtcacacaagcctgtgcccccgacccaagtccagaaactcaacgccaagggaggaaatgtacctcagctggatgcccctatctctcaatttttgagaaaatggtttgccgaaaacttaaaaggtgaattccgaagatgcccgccgtgtcagatccgatatagtctgctgtggctgaagagactcatttctggctccagtgatggcccgcagtggcacttagagtgtggtcctcgaaccagcagcactagcagcaccagtaaacttgttagaaatgcaagttctcaacccctaccccccagctctactgaatcagcaactttaggggaccaaccaatccaggttgtcaccagtaaatatcaagtatcccctgtgcttagagttagtgtggacatggttcccactttcaagggggctcataggctggtggagaaaccccaaaatgaacaagacatgtgtgatgagatttatgaagagaacataaactctaagatggtgtcatctgaagggaatgagacccttcactttaagcgggataatgacctccaaggcagtgtttctccaagggtggcctttggaccacctgcatcagtatctcctggggtgccttttataagtacggaatactgggccccaccccagacttactgtatcagagtcttctggatggcaccttggggtctgcattttaaacaacacctaatgcagatggtccaggcccccatttacagacactctctcattgcacaggaatgcttgaatctctgtcacagaagctcctcgcaactgcttcattcccttcacagttggtag

SEQ ID NO: 7241 - DNA, 1059 bp, Homo sapiens
  SIMILAR (436)..(1056): 871254mologous to Homo sapiens RNA helicase,accession number X98743,Smith-Waterman Score=950.
atggatcaaggtgcctgcaattcagtgtctagtgaagatttccgtctctgcttcatggatgatgcctcttgctgtgtccttagctggcttaatgttaagcttgttaaagagagggtctggagtgagcattcaaggccaaacagaaggaaggagttacccttcctgttcatggcctcggagccagcagagcagtgtgaaggaagctgggcactgctcagctcagtatcttgtgtgcacaagctctgccagtctgcaccctccagcaaatgtcttcactatccacggaccattgctatggaccagctcccatctgcagcctctgactcaaaagaatttttcattgtatacaagtcagttatgtttatgtctttgcatgtgtactggtttgtaagctccttgaagacagggcccatgtcatttgcaatgttatgcattgagccattgtatgttggcgatgatggtaaagctaatgcaacagtggatggtcttgagcagggatacgttgtttgtccctctgaaaaaagattccttctgccctttgctgtccttaagaagaaccgaaagaggaagattatggtcttcttttcatcttctatgtctgtgaaatatcactatgagttgctaaattacatggatttgcccatcttggccattcatggaaagcaaaagcaaaataagggtacaaccacattcttccagttctgcaaagcagattcaggaatactattgtgtatggatgtggcagcaagaggactggacattcctgaagtcgactggatcgttcagcatgaccctctggatgaccctaaggaatatattcatcgtgtaagcagaacagccagaggtctaaatgggagaggtcatgtcttgctcattttgtgcccagaagaaatggggttccttcactacttgaaacaatccaagtttccattaagtgaatttgacttttcctggtctaaaatttctgacattcagtctcagcttgagaaattaattgaaaagaactgctttcttcataaggcagcccaggaagcatataagtcatacacacgagcctag

SEQ ID NO: 7242 - DNA, 2192 bp, Homo sapiens
  SIMILAR (3)..(1850): 941254mologous to Homo sapiens Human RNA-associated protein- 10 (RNAAP-10),accession number Y70229,Smith-Waterman Score=2938.
aatcaaaacaaaagcccatgaatgtgggcttatcagaaactcaaaatggaggcatgtctcaagaagcagtgggaaatataaaagttacaaagtctccccagaaatccactgtattaaccaatggagaagcagcaatgcagtcttccaattcagaatcaaaaaagaaaaagaagaaaaagagaaaaatggtgaatgatgctgagcctgatacgaaaaaagcaaaaactgaaaacaaagggaaatctgaagaagaaagtgccgagactactaaagaaacagaaaataatgtggagaagccagataatgatgaagatgagagtgaggtgcccagtctgcccctgggactgacaggagcttttgaggatacttcgtttgcttctctatgtaatcttgtcaatgaaaacactctgaaggcaataaaagaaatgggttttacaaacatgactgaaattcagcataaaagtatcagaccacttctggaaggcagggatcttctagcagctgcaaaaacaggcagtggtaaaaccctggcttttctcatccctgcagttgaactcattgttaagttaaggttcatgcccaggaatggaacaggagtccttattctctcacctactagagaactagccatgcaaacctttggtgttcttaaggagctgatgactcaccacgtgcatacctatggcttgataatgggtggcagtaacagatctgctgaagcacagaaacttggtaatgggatcaacatcattgtggccacaccaggccgtctgctggaccatatgcagaataccccaggatttatgtataaaaacctgcagtgtctggttattgatgaagctgatcgtatcttggatgtggggtttgaagaggaattaaagcaaattattaaacttttgccaacacgtagacagactatgctcttttctgccacccaaactcgaaaagttgaagacctggcaaggatttctctgaaaaaggagccattgtatgttggcgttgatgatgataaagcgaatgcaacagtggatggtcttgaacagggatatgttgtttgtccttctgaaaagagattccttctgctctttacattccttaagaagaaccgaaagaagaagcttatggtcttcttttcatcttgtatgtctgtgaaataccactatgagttgctgaactacattgatttgcccgtcttggccattcatggaaagcaaaagcaaaataagcgtacaaccacattcttccagttctgcaatgcagattcgggaacactattgtgtacggatgtggcagcgagaggactagacattcctgaagtcgactggattgttcagtatgaccctccggatgaccctaaggaatatattcatcgtgtgggtagaacagccagaggcctaaatgggagagggcatgccttgctcattttgcgcccagaagaattgggttttcttcgttacttaaaacaatccaaggttccattaagtgaatttgacttttcctggtctaaaatttctgacattcagctctcagcttgagaaattgattgaaaaagaattactttcttcataagtcagccccaggaagcatataagtcatacatacgagcctatgattcccattctctgaaacagatctttaatgttaataacctaaatttgcctcaggttgctctgtcatttggtttcaaggtgcctcccttcgttgatctgaacgtcaacagtaatgaaggcaagcagaaaaagcgaggaggtggtggtggatttgggctaccagaaaaccaaggaaagttgaggaaatccaaaatcttttaaacacattaggcaagaaatcatctggacaggcagggcagttctctcactgaacacatgccttcctttcatcttgaataactttgtcctaaaatgaattttttttccccttgatttaacaggatttttgtagactttagaatttggacttacctaacaagagtataaattgacttgggttgcaagcactgagcactgttacttctatcacgtctctcttttatttctgggatataaaacaggctttaagtttcttggcttgcccaagggcagagcaacggaatatctggtgtttcttgtgatgataatattttaattttaaatatccctccctcatacaagtgtatgttaccattttaaaataattctttttgtacctttaaa

SEQ ID NO: 7243 - DNA, 987 bp, Homo sapiens
  SIMILAR (361)..(984): 881254mologous to Homo sapiens RNA helicase,accession number X98743,Smith-Waterman Score=955.
atggatcaaggtgcctgcaattcagtgtctagtgaagatttccgtctctgcttcatggatgatgcctcttgctgtgtccttagctggcttaatgttaagcttgttaaagagagggtctggagtgagcattcaaggccaaacagaaggaaggagttacccttcctgttcatggcctcggagccagcagagcagtgtgaaggaagctgggcactgctcagctcagtatcttgtgtgcacaagctctgccagtctgcaccctccagcaaatgtcttcactatccacggaccattgctatggaccagctcccatctgcagcctctggctttcggcgtggggttgttctggccgcccccgactttaaagagccattgtatgttggcgatgatggtaaagctaatgcaacagtggatggtcttgagcagggatacgttgtttgtccctctgaaaaaagattccttctgccctttgctgtccttaagaagaaccgaaagaggaagattatggtcttcttttcatcttctatgtctgtgaaatatcactatgagttgctaaattacatggatttgcccatcttggccattcatggaaagcaaaagcaaaataagggtacaaccacattcttccagttctgcaaagcagattcaggaatactattgtgtatggatgtggcagcaagaggactggacattcctgaagtcgactggatcgttcagcatgaccctctggatgaccctaaggaatatattcatcgtgtaagcagaacagccagaggtctaaatgggagaggtcatgtcttgctcattttgtgcccagaagaaatggggttccttcactacttgaaacaatccaagtttccattaagtgaatttgacttttcctggtctaaaatttctgacattcagtctcagcttgagaaattaattgaaaagaactgctttcttcataaggcagcccaggaagcatataagtcatacacacgagcctag

SEQ ID NO: 7244 - DNA, 1369 bp, Homo sapiens
  SIMILAR (11)..(1027): 901254mologous to Homo sapiens RNA helicase,accession number X98743,Smith-Waterman Score=1537.
gaggacttccgacgaggctgatcgtatcttggatgtggggtttgaagaggaattaaagcaaattattaaacttttgccaacacgtagacagactatgctcttttctgccacccaaactcgaaaagttgaagacctggcaaggatttctctgaaaaaggagccattgtatgttggcgttgatgatgataaagcgaatgcaacagtggatggtcttgaacagggatatgttgtttgtccttctgaaaagagattccttctgctctttacattccttaagaagaaccgaaagaagaagcttatggtcttcttttcatcttgtatgtctgtgaaataccactatgagttgctgaactacattgatttgcccgtcttggccattcatggaaagcaaaagcaaaataagcgtacaaccacattcttccagttctgcaatgcagattcgggaacactattgtgtacggatgtggcagcgagaggactagacattcctgaagtcgactggattgttcagtatgaccctccggatgaccctaaggaatatattcatcgtgtgggtagaacagccagaggcctaaatgggagagggcatgccttgctcattttgcgcccagaagaattgggttttcttcgctacttgaaacaatccaaggttccattaagtgaatttgacttttcctggtctaaaatttctgacattcagctctcagcttgagaaattgattgaaaaagaattactttcttcataagtcagccccaggaagcatataagtcatacatacgagcctatgattcccattctctgaaacagatctttaatgttaataacctaaatttgcctcaggttgctctgtcatttggtttcaaggtgcctcccttcgttgatctgaacgtcaacagtaatgaaggcaagcagaaaaagcgaggaggtggtggtggatttgggctaccagaaaaccaaggaaagttgaggaaatccaaaatcttttaaacacattaggcaagaaatcatctggacaggcagggcagttctctcactgaacacatgccttcctttcatcttgaataactttgtcctaaaatgaattttttttccccttgatttaacaggatttttgtagactttagaatttggacttacctaacaagagtataaattgacttgggttgcaagcactgagcactgttacttctatcacgtctctcttttatttctgggatataaaacaggctttaagtttcttggcttgcccaagggcagagcaacggaatatctggtgtttcttgtgatgataatattttaattttaaatatccctccctcatacaagtgtatgttaccattttaaaataattctttttgtacctttaaa

SEQ ID NO: 7245 - DNA, 4557 bp, Homo sapiens
  SIMILAR (727)..(2493): 981254mologous to Homo sapiens Zinc finger protein ZNF221,accession number AC035150,Smith-Waterman Score=3248.
atggatggtgccaaagcattttttagtgcagtggcagcaggatttgtcatcattctcacatgccagctgcagtggcagtggcaacatggtggggtgcatgctcatcagctgtggcagcttgctagtgggtaccgggatgcctgcttctgtgtgagcacttacagcagtggcccttctgaatttcctggacctactctcggaaccctcaacgagctagcgatagatttagaggaaaggaagcaccgtcggaaagcaaaggtttggaagggtgagggcggcggtttgcgatccccgcggcagagccttcttgcgtttagggctgtcctagcatcccgagggactcggtcctgtcacgtttcgccctatttgggggtttctggggctctcagctcgcccaatccgcatccctccactactggcgcggggccgattcccccggtacaacgttggggtcttccccagatcaaccagaaaaatagagaaattgctatcccactgacattgggtatgagcacacacttgcgaagagggtgcaagaacatgtctcgatttagcccatctttgcactgctgcactactcccatatccactaatttcacggacccaggcagccactgcaagggagcacatggggatatctgcttgttgattcaaaacctgaagggggctctgccaatgagcatcaacaggtcctactttaatgcacaccccctacttcaaatttctgaggcagtgacattcaaggatgtggctgtggtcttcactgaggaggagctggggctgctggaccctgcccagaggaagctgtaccgagatgtgatgctagagaacttcaggaacctgctctcagtagggaatcaaccattccaccaagatactttccacttcttagggaaggaaaagttttggaagatgaagacaacaagccaaagagaagggaattcaggaggcaagatccaaattgagatggagactgttccagaagcaggaccacatgaagagtggtcctgtcagcaaatatgggaacaaattgcaagtgacctaaccaggtctcaaaactccataaggaacagctctcagttcttcaaagaaggtgatgtcccctgccagattgaggcaagactatctataagtcacgtgcaacagaaaccttaccgttgtaatgaatgtaaacagtccttcagtgatgtttctgtctttgatcttcatcaacaatcacactcaggagagaaatctcatacatgtggtgagtgtggaaaaagcttctgttacagcccagcccttcatattcatcagagagtccatatgggagaaaaatgctataagtgtgatgtgtgtggtaaggaatttaatcagagctcacatctgcaaactcatcagagagtccatactggagagaaaccattcaaatgtgggcaatgtgggaaaggcttccatagtagatcagcacttaatgttcattgcaaattgcacacaggagagaaaccttataattgtgaggaatgtgggaaagccttcattcatgattcacagcttcaagaacatcagagaatccatactggggagaagccattcaaatgtgatatatgtggtaagagcttccgtgttagatcaagacttaataggcattccatggttcacacaggagaaaaagcattcagatgtgatacatgtggcaagaactttcgtcagagatcagcacttaatagtcattccatggtccacatagaagagaagccatacaaatgtgagcaatgtggaaaaggcttcatttgtaggcgagatttttgtaagcatcagatggtccacacaggagagaaaccatataattgtaaagaatgtgggaagaccttcagatggtcctcatgtcttttgaaccatcagcaagtccacagtggacaaaaatccttcaaatgtgaagaatgtgggaagggattttatacaaattcacgacgatcttcccatcagagatcccacaatggagaaaagccatataactgtgaggagtgtggtaaggactataaaaggaggttggatcttgagtttcaccagagggtccacacgggtgagagaccctataattgtaaggaatgtggcaagagctttggctgggcctcctgtcttttgaaacatcagagactccacagtggggaaaaacctttcaaatgtgaagagtgtggaaagagatttactcagagttcacaacttcattcccatcagacatgccatactggagaaaagctatacaaatgtgagcagtgtgagaaggggtacaacagtaaatttaatcttgacatgcaccagagggtccacgggggagagcgaccctataattgtaaggaatgtggaaagagctttggctgggcttcatgtcttttgaaacatcagagactccacagtggagaaaagccattgaaatctggagtgtgggaagagatctactcagaattcacagcttcatttacatcagagtcttcaggccagaaactggtcagtatccccctgggacagagtttccaaaagaaggagaaggctgccatctttgctgttttgcagctttcactggtgacacctccaggtacgggaaaaacggaggcaactagggtctcgagcagaccccagcaaactgtggcagccctacagttgctaacagtcagtggcttgactgttaaaaacaggcagaaaacaacaagaacatcaacaaaaagaccccacaaaaaccccattcaagggtcagcaacctcaagattgaagagcaaatggactccatttcccaagataccagcgaaacgcctgcgggagtctaattgcccggtcgatgcgcaggaaatttggctcccgcaggcgtttcgcgaactgtggcacgtttcaggcaggattcctccttcattcaaactgcatcacccaggagtctgcaaattccccaaagtaggaggaaaaatgaccacattcaaggaggcagtgaccttcaaggatgtggctgtggtcttcactgaggaggagctggggctgctggaccctgcccagaggaagctgtaccgagatgtgatgctggagaacttcaggaacctgctctcagtggggcatcaaccgttccaccaagatacttgccacttcctaagggaagaaaagttttggatgatggggacagcaacccaaagagaagggaattcaggaggcaagatccaaactgagttggagtctgttccagaagcaggagcacatgaagagtggtcctgccagcaaatctgggaacaaattgcaaaagacttaaccaggtctcaggactctatcataaataactctcagttctttgaaaatggtgatgtcccctcccaggttgaagcaggactacccacaattcatacaggacagaaaccttcccagggtgggaagtgtaaacagtccatcagtgatgttcccatctttgatcttcctcagcagttatactcagaagagaagtcttatacatgtgatgagtgtggaaaaagcatctgttacatctcagctcttcatgttcatcagagagtccacgtgggagagaaactctttatgtgtgatgtgtgtggcaaggaatttagtcaaagctcacatctgcaaactcatcagagagtccacactggagagaaaccattcaaatgtgagcaatgtgggaaaggtttcagtcgtagatcagcacttaatgttcatcgtaaattacacacaggagagaaaccttacatttgtgaggcatgtgggaaggccttcattcatgattcccagcttaaggaacataagagaatccatactggggagaaaccattcaaatgtgatatatgtggtaagaccttctattttaggtcaagacttaagagccattccatggttcacacaggagaaaaaccatttaggtgtgatacatgtgataagagctttcatcagagatcagcacttaataggcattgcatggtccacacaggagagaaaccgtacagatgtgagcagtgtggaaaaggctttattggtaggctagatttttataagcatcaggtggtccacacaggagaaaaaccatataattgtaaagaatgtgggaagagcttcagatggtcctcatgccttttgaaccatcagcgagtccacagtggagaaaaaagcttcaaatgtgaagaatgtggaaagggattttatacaaattcacaactgtcttcccatcagagatcccacagtggtgaaaagccatataaatgtgaggagtgtgggaagggctatgttactaagtttaatcttgacttgcaccagagggtccacacgggagagagaccttataattgtaaggaatgtgggaagaactttagccgggcctcaagtattttgaatcataagagactccactgccagaaaaaaccattcaaatgtgaggactgtggaaagaggcttgtacacaggacataccgtaaagaccagccgagagactatagtggggaaaacccatccaaatgtgaggattgtgggagacgctacaagaggcgcttgaatctggatatacttttatcattatttctaaatgacacataa

SEQ ID NO: 7246 - DNA, 326 bp, Homo sapiens
  SIMILAR (200)..(325): 1001254mologous to Homo sapiens KRAB A domain,accession number U46188,Smith-Waterman Score=206.
agggtgcaagaacatgtctcgatttagcccatctttgcactgctgcactactcccatatccactaatttcacggacccaggcagccactgcaagggagcacatggggatatctgcttgttgattcaaaacctgaagggggctctgccaatgagcatcaacaggtcctactttaatgcacaccccctacttcaaatttctgaggcagtgacattcaaggatgtggctgtggtcttcactgaggaggagctggggctgctggaccctgcccagaggaagctgtaccgagatgtgatgctagagaacttcaggaacctgctctcagtag

SEQ ID NO: 7247 - DNA, 443 bp, Homo sapiens
  SIMILAR (241)..(441): 911254mologous to Homo sapiens Zinc finger protein ZNF221,accession number AC035150,Smith-Waterman Score=303.
cggaattcccgcgtcgacgatttcgtggggcagttccgcgcgttgcaggcccttctgaatttcctggacctacgcattggatcctcaaagaactggtgatcgaattaggggaaaaggggcctcgtcggagagtagagctgaataccactagaaacatacctgtaaccagagacagctgattatagctttctgcagcaaggaagcccacgtaccaggggctgtcttggcacaattctgctttcccaggaactgcatcactcaggactctgcaagtttccagaagtaagagggaaaatgaccacgttcaaggaggcaatgaccttcaaggacgtggctgtggtcttcactgaggaagagctggggctgctggaccttgctcagaggaagctgtatcgagatgtgatgctggagaacttcaggaacctgctctcagtgggacatca

SEQ ID NO: 7248 - DNA, 2693 bp, Homo sapiens
  SIMILAR (755)..(847): 801254mologous to Homo sapiens zinc finger protein ZNF225,accession number AF187991,Smith-Waterman Score=125.
atggaccctggtacgttgcagagtgcttcacaaggccctacagccattaacccgtgtgactatgtactcaaaaggagaaatattcaaacatcttggcaacgactaactcctattatcaaatggcacgtttatattttgatgattgggcctggtgagaaggaagcaggaaggaatctaggcatatttggcaaatggactccatttcccaagataccagcgaaacgcctgcgggagtctaattgcccggtcgatgcgcaggaaatttggctcccgcaggcgtttcgcgagtatcttgggaggcgtgggaattttggcccaggcaggaggacctgtgaattctgggaagtggagtccatttgctctgtggagtcgtgggaactttggctcaggcaggcggattcgggggattctgggaagtgtagtccagacgcctgtggcatcatcgacacttccggtctccgagcaggacactgctacttaacaagactgtggcacgtttcaggcaggattcctccttcattcaaactgcatcacccaggagtctgcaaattccccaaagtaggaggaaaaatgaccacattcaaggaggcagtgaccttcaaggatgtggctgtggtcttcactgaggaggagctggggctgctggaccctgcccagaggaagctgtaccgagatgtgatgctggagaacttcaggaacctgctctcagtggggcatcaaccgttccaccaagatacttgccacttcctaagggaaggaaaagttttggatgatggggacagcaacccagagagaagggaattcaggaggcaagatccaaactgagatggagactggttccagaagcaggaacacatgaagaattttcctgcaagcaaatttgggaacaaattgcaagtgacttaaccaggtctcaagataccaccataagtaactctcagttatttgaacaagatgacaacccctcccagattaaagcaagactatctataattcacgttaagacagaaacttctgagggtaggacgtgtaaaaagtcctttagtgatgtctccgtccttgatcttcatcaacaactacagtcaagagagaagtctcatacatgtgatgaatgtggaaagagtttctgttatagctcagctcttcgtattcatcagagagttcacatgggggagaaactctataattgtgatgtgtgtggtaaggaattcaatcagagctcacatcagcaaattcatcagagaatccacactggagagaaaccattcaaatgtgagcagtgtgggaaaggctttagtcgtagatcaggactttatgttcatcgtaaattacacacaggagtgaaacctcatatttgtgagaaatgtgggaaggccttcattcatgattcccagcttcaggaacatcaaagaatccatactggggagaagccattcaaatgtgatatatgttgtaagagcttccgtagtagagcaaatcttaataggcattccatggttcacatgcgagagaaaccattcagatgtgatacatgtggtaagagctttggtctgaaatcagcacttaatagtcatcgcatggtccacacaggagagaaacggtacaaatgtgaggaatgtggaaaacgcttcatttataggcaagatctttataagcatcagatagaccacacaggggagaagccatataattgtaaagaatgtggaaagagcttcagatgggcctcaggtctttcaagacatgtgcgagtccacagtggagagacaacattcaaatgtgaagaatgtgggaagggattttatacaaattcacaacgttattctcaccagagagcgcacagtggagaaaagccatatagatgtgaggagtgtgggaagggctacaaaaggaggttggaccttgactttcatcagagggtccacagaggagagaaaccctataattgtaaggaatgtgggaagagctttggctgggcctcgtgtcttttgaatcatcagagaatccacagtggagaaaaaccatttaaatgtgaagaatgtgggaaaagatttactcagaattcacaactttatacccatcgtagagtccacagtggagaaaaaccattcaaatgtgaagagtgtgggaaaagatttactcagaattcacaactttattctcatcgcagagtccacactggagtaaagccatacaaatgtgaagagtgtgggaagggcttcaacagtaagtttaatcttgacatgcaccagagggtccacaccggagagagaccttataattgtaaagaatgtgggaagagctttagccgggcctcaagtattttgaatcataagagactccatggtgatgaaaagccattcaaatgtgaagagtgtgggaagagatttactgagaattcacagcttcattcccatcagagggttcacactggggaaaagccatacaaatgtgagaagtgtggaaagagcttcagatgggcctcaactcatctaacccatcagagactccacagtagagaaaaactacttcaatgtgaggactgtgggaagagcattgtgcacagttcatgccttaaagaccaacaaagagaccaaagtggagagaaaacatctaaatgtgaggactgtgggaagcgctacaagaggcgcttgaatcttgatacgcttttgtcattatttttaaatgacacataa

SEQ ID NO: 7249 - DNA, 585 bp, Homo sapiens
  SIMILAR (109)..(585): 941254mologous to Homo sapiens A secreted protein encoded by clone cw1543_3,accession number W80398,Smith-Waterman Score=771.
aagaggactgccatttcgccaaaggatgcttttgaaactcggcaggacttaaatgaggaagaagctgctcaggtgcatggagtcaaggacccggcgccacatcaacccagagcgtgcttgccgatgggacagattctgcaggtaactaagcaagacaagaacctcataaagccgctttatgaccgatacagaattatcaagcaaatcttgtcaacaccttcccttattccaacaattcaggaggaagaggactctgatgaagaccgtccacagggaagccaacaaccttctttggcagatccagcatctcaccttcctgttggtgaccacctcacctactctaatgagactgagcctgttagggcccttttaccagatgaaaagaaagaagtaaaaccaccagctctctccatgtctaatttacatgaggctaccatgcctgtacttcttgaccatctccgagaaactagggctgacaagaagagactgcggaaagccttaagagaatttgaagaacagttttttaaacaaacaggaagaagtccacaaaaggaagataggataccaatggcagatgagtattat

SEQ ID NO: 7250 - DNA, 369 bp, Homo sapiens
  SIMILAR (208)..(297): 961254mologous to Homo sapiens A secreted protein encoded by clone cw1543_3,accession number W80398,Smith-Waterman Score=147.
atgcccagagaagcacgggatatgggtcatattactgagccaccaaattcatatgttgaagccttaatctccaatgtagctgtattcagcgatgagggctgtaaggaagtaattaagccccaagctctgggctctgactcctttgtgcagaattccttgctgaagctgcaagccctcgaatctgatctgtgctctgcatttttaacaaaccaggaagaagctgctcaggtgcatggagtcaaggacccggcgccagcatcaacccagagcgtgcttgccgatgggacagattctgcagctgaagcaaatatttccagcatggaattagtaagcacctattctgatgtgattgaacggaaaatggaatga

SEQ ID NO: 7251 - DNA, 1267 bp, Homo sapiens
  SIMILAR (443)..(1234): 891254mologous to Homo sapiens A secreted protein encoded by clone cw1543_3,accession number W80398,Smith-Waterman Score=1214.
aggtaccggcccggaattcctgggtcgacgatttcgtctctggtagaagagcacgcgccgccctcttgggagccgcagcatcagaatgtagaggcgaccgtgctggtggacagcgtattgcgacccagcatgggcaacttcaagtccaggaagcccaagtccatcttcaaagcggagagcgggaggagccacggagaaagtcaggagacagagcatgtggtatccagccagtcagagtgtcaggtgagagcaggaacaccagctcatgagagtccacaaaacaatgccttcaagtgccaagaaaccagtgcgacttccaaccaagaatagaccagaggactgccacttcgccaaaggatgcttttgaaactcggccaggacttaaatgaggaagaagctgctcaggtgcatggagtcaaggacccggcgccagcatcaacccagagcgtgcttgccgaatgggacagattctgcagacccctcaccagtccacaaagatgggcagaatgaggccgacagtgcaccagaagacctccactctgtggggaccagcaggctgcttctattcacatcactgatggtgataacccactgctgttcgccacggttgttccctctttcaggccaaagccagagattcaacttagaccccgagtcagccccatctccacccagcactcagcagtttatgatgccgcggagttcttcacgctgcagctgtggagatggcaaggagccacagaccatcacccagctcaccaagcacatccagagcctcaagcggaaaattcggaaatttgaagaaaaatttgaacaagaaaagaaataccggccttcacatggtgacaagacttctaatcctgaagtcctgaaatggatgaatgatttggctaaaggtcgtaaacagctcaaagaactaaagctaaagctgtcagaagaacaagggagtgctcccaaaggtccacctagaaacctgttgtgtgagcaacccacagtccccagagaaaatgggaaaccggaagctgcgggcccggagccaagctcctctggagaagagactccagatgctgccttgacatgcctgaaggagagaagagagcaacttcctccccaggaggattctaaggtaactaagcaagacaagaacctcataaagccgctttatgaccgatacagaattatcaagcaaatcttgtcaacaccttcccttattccaacaattgtaagtcaggatacttgcatgctgttactttgtactgatgtgtag

SEQ ID NO: 7252 - DNA, 1782 bp, Homo sapiens
  SIMILAR (1278)..(895): 391254mologous to Homo sapiens glycoprotein beta-Gal 3'- sulfotransferase,accession number AB040610,Smith-Waterman Score= 140.
tcacaatcggcagcataagcacagacgtaaacgcaggaaccaatgcgattttaggttgaatttaggacagcgctggaacttcactttacccctcttgcggtcacacgaggtgggcggcggccggcaggtttgggcgggagaaacgcggttcgggactccgctgccgcctaggcgcgggggctgacctttgatgacacctgcgcagtccccggtctgcctccacccctggccattcgcaattttattcctcatcccaactgcagcaaagcagaggacggccaaatagagccgatcctggagctccgggctgggaagacgcacggtgttcgcctctgtaaggcgtcgcggggctgcggacggccctctggcagtggtgttggaggttgcctctttgctgggatcccgggccgtcagaaggaagacatcgggagtcattaagtgtgatgtttccttgtagctgtaagtttgcttgtagatgagctttatcaagttgagaaacagcatctctattcctaatttgctgagaatttttcgtgaatggatgtaggattcggtaaatgctttttctaaatcatttgatataatcatataatttttcttctttagcctgttgctatggttattagaataattttcaagtattgaaacaaccttggatatcccgtcctctggtgggcagcagccctgggcccagccgctctgtccgggaacgcgcctggcgaactgcagctctggggtggccaggtcctggcagtggcggcgggtggcctggtccaggtctggtggcagccggtagcccaggatgggcgccaggccgcgcgctcccgcagcgcagccacctccagcggcagcccagcggcccccagcgcgcccagccacgcccacagcgtgcggttcaagtgcgcacagagcgccaagtccagcgcgttctaggcgctcgccctgcactccacgcgcggctccagcggctccgggcccgaaggccgcgcgccagtgggcggggacggccaccaggtcatccaggccccagcgcagtgcgcgcaggagccccagggactcgtccaggtgctgggcgatcagcagcaggtcgaagcgcgcggccaccgcttgcacccccggggccaagaggcgcgttgccaccaaggcgcgcggcgcgttgtggtcgaagcctaagtccaaggccatgaggttgtggccatggtgcctgtcgggccgcctggggtcgtagaaggcgcaggaagtggcgcaggatccgggctccgacgaagggagaggccgtcttgtagaaagcggactccaggacgagggctgggtcccgcagggtggtgaaggaggtgtcgcggggcaggatgcgtcgcatcgtgggagtttcaggggtgcattaaagtagaacatgacaatatccatcagaagaaccccttccaggatcagaaggtgatcggaactggcaaatgggagtcctggtgcattcacttgggatggccacaagggcccatggaagccgtggatgtggaggctgcagcggcgcagggaagggctgcgcctaaacatgtcctccccctcaacacaccctcggagccatgagatgcaactatctgctgatacagagacagagactgcagatggctgcagggcagatttaccttttctttctttcatggctattgtctttggtgttgtgtctaaaaagtcatcaccaaacccaagatcctctagaatttctcctatgttagtttctaagggtctacagttttgtgttttacatttaaggatgttatccat

SEQ ID NO: 7253 - DNA, 981 bp, Homo sapiens
  SIMILAR (867)..(301): 241254mologous to Homo sapiens oxidoreductase,accession number U13395,Smith-Waterman Score=89.
ttagctctcaatctcgatttttctctctttctcactctcttgtgctctcaccttccacagtgggatgatgcagtaaggaggcccttgccagatgctaggcaccttgatctcagattttccagcctccagaagttcttgatgctttttgcttttccccctcacaaccgaaagagaaagtttttgccagcaggtggcagcgctggtgcctgaaaacgccaaaaagcatcgtcctgggttggcccggagactaacgattgccgccgggaatcggcagcataagcacagacgtaaacgcaggaaccaatgcgattttaggttgaatttaggacagcgctggaacttcactttacccctcttgcggtcacacgaggtgggcggcggccccggcagggtttgggcgggagaaacgcggttcgggactccgctgccgcctaggcgcggggctgacctctttcgagatgaatatttccttctctgatcagttttcctacactcagaattttctgtggttctcgagtccctctcttctgagtgcggcataggttgaatttcgcgcatttgttccggtgggtttgatatctgtgcgtccctggctctttgatgacacctgcgcagctccccggtctgcctccacccctggccattcgcaattttattcctcatcccaactgcagcaaagcagaggacggccaaatagagccgatcctggagctccgggctgggaagacgcacggtgttcgcctctgtaaggcgtcgcggggctgcggacggccctcccctgcggaattgggaaggccaatcagcggcacacatgctgtatgtctgacccacatgctgtaagggcattgtggttgggttcctcagtgggttggggtcttgagattctagagtggaagtcctgggatccagcctccaatccagtgcagcagcccctataggattctgcaggactgtagccttgagagctggtttggttttcat

SEQ ID NO: 7254 - DNA, 1266 bp, Homo sapiens
  SIMILAR (529)..(1263): 1001254mologous to Homo sapiens KIAA1697 protein,accession number AB051484,Smith-Waterman Score=1299.
atgatggaagaaatagagataagaatggatcaacagttggaggattcagaggttgacaatgtaggtatcacaggcatctattttgcacccatggctgacagcctacaagagtttaaggactacattgaaaatctgcctttgatcgatgacccagaaatttttggaatgcatgaaaatgctaatctagtcttccagtacaaagagaccagcactttaatcaacaccatacttgaggttcagccaaggtcatctactggtggagagggaaaaagcaatgacgaaattgttcaagaacttgttgcttctgtccagaccagagttccagaaaaactggaaatggagggtgcttctgagagcctttttgtcaaggatcttcaaggacgtctgaactccttgaccaccgttcttggacaggaagtggaccggtttaacaacctgctgaagttaattcatccaggtggcaaacatcgccctgtactccactccagcccagtgtctcccaggactgtggcctgcctccatcttctgacttctctggaaacactcaacaaagccatcgctggatttgtggtgatgtctgaagaaatggaaaaagtgtataacagtttcctcaacaaccaggttcccgctctgtggtccaacacagcctacccatccctgaagccactaggatcatgggtcaaagaccttatcctgaggacctcatttgtggatctgtggctcaaaagaggacagcctaagtcctactggatctctggtttcttctttcctcaaggatttctaacaggaactcttcaaaatcatgctcgaaaatacaatttgcctatagatgagctgagtttcaaatacagcgtaattcccacctatcgggatcaagctgcagtgatagaagctgccaagacagtgcaatttggacaagaactgcccatggacatggagttgccctctcctgaggatggtgttcttgttcatgggatgttcatggatgcttctcgatgggatgataaggagatggtgatagaagatgcattgcccggacagatgaatccagtgctgcctgtggtgcattttgaaccacaacaaaactataagccaagcccaacactttaccactgcccactttataaaacaggagcccgggcaggaacactctcaaccacaggacattcaaccaattttgtggtaaccgtcctgttaccctccaagcggtccaaagactactggattgccaagggatcagctttgctctgccagctgagcgaatga

SEQ ID NO: 7255 - DNA, 1192 bp, Homo sapiens
  SIMILAR (929)..(1150): 421254mologous to Homo sapiens Gene product with similarity to dynein beta subunit,accession number AC002394,Smith-Waterman Score=170.
tttcgtgggagccggaggagaggcagccgcggagcgccgagctggcctcgccccgaggcccggccctgggtgtggggaaccgcgctgaggagctggaaactttcccggcaggagctgactgctgggcaggaacgtctctcaggagaaagagtggaagagaaaattgtgaactaaggccccctgcccccttttcctggtgcatgtgaagttatcaaaaacagaaacaagtgttgaaaatgtttaaaggctttgctgaagaagacccgagagggatggaaaagggaggcaaggaaggaagcaggaagtgactttggtccagagacttctccagtcctggcaccttgaccacagtgctgactctcctgtgagcagtcttcccacagcagaggacacctataggatcgtccagttatcagattctcaaaatggacagcgacttaaagcaattaaagaccactgcgacaaatgctcctgcgaacaccactccgaagttaatggcgcagacgtctggactttaaaaggtggtggtaaagtgcgctcaggcatggaggcaccctcccctcacaatcggcagcataagcacagacgtaaacgcaggaaccaatgcgattttaggttgaatttaggacagcgctggaacttcactttacccctcttgcggtcacacgaggtcacagagtgcgttcgcggagtgaccactgtccgagccttgcgtgtccagccgggcgctttagatgttcgcatcaacgttttgtgggtctggaggagccagcccttaggggttctctgcgccctgcaggactgtgggtctttcctccctcactggcctctggtcccttctcagctcttccgctgggctgactggcctggggttcaacgcactgtccttagggtgctggagagggccctacctggggagtgtttgccctctcctgaggatggtgttcttgttcatgggatgttcatggatgcttctcgatgggatgataaggagatggtgatagaagatgcattgcccggacagatgaatccagtgctgcctgtggtgcattttgaaccacaacaaaactataagccaagcccaacactttaccactgcccactttataaaacaggagcccgggcaggaacactctcaaccacaggtaacctgaaaggagaaaataaagaatggaggagagagaatgtttga

SEQ ID NO: 7256 - DNA, 500 bp, Homo sapiens
  SIMILAR (468)..(196): 1001254mologous to Homo sapiens Similar to ubiquinol- cytochrome c reductase hinge protein,accession number BC001426,Smith-Waterman Score=482.
gcagatcatagaacttttatttagatggaatcattgcgaattacatagaagctaccagcctcaagccaaacccatgaggttgatgtgaacttacagttacacaaataagaaacaaatggtacatccaaaaccataaggaaatattctgatgcccagatgatgaagactggggtgcaacttaagtccacacatttatttcaagttgttaaagagtttgtgggccacgcaatggtccctcgcatgcaagaagtcaaagagctcctccgtgcaatcctcttctgtatgtgatcgagaggatacacgctcatcacagagctctagccgctcccgggcctttacacatttctccaactgctcgcattgctctctcactgttgttaggggatccactaattcctcctcttcctcttcctcctcctcaggatctccggattcggtaagcatcttttgctcgtcctccagtcccatgtctggctacggttctagattcaacacgagca

SEQ ID NO: 7257 - DNA, 674 bp, Homo sapiens
  SIMILAR (75)..(674): 991254mologous to Mus musculus Rab10,accession number AF035646,Smith-Waterman Score=1037.
ttacgagttggccgtagtgagagggaccgatcccttggggccgccggcggcgagagcccgagccgctcctcccaatggcgaagaagacgtacgacctgcttttcaagctgctcctgatcggggattccggagtggggaagacctgcgtcctttttcgtttttcggatgatgccttcaatactacctttatttccaccataggaatagacttcaagatcaaaacagttgaattacaaggaaagaagatcaagctacagatatgggatacagcaggccaggagcgatttcacaccatcacaacctcctactacagaggcgcaatgggtatcatgctagtatatgacatcaccaatggtaaaagttttgaaaacatcagcaaatggcttataaacatagatgagcatgccaatgaagatgtggaaagaatgttactaggaaacaagtgtgatatggacgacaaaagagttgtacctaaaggaaaaggagaacagattgcaagggagcatggtattaggttttttgagactagtgcaaaagcaaatataaacatcgaaaaggcgttcctcacgttagctgaagatatccttcgaaagacccctgtaaaagagcccaacagtgaaaatgtagatatcagcagtggaggaggcgtgacaggctggaagagcaaatgctgc

SEQ ID NO: 7258 - DNA, 396 bp, Homo sapiens
  SIMILAR (146)..(394): 911254mologous to Homo sapiens Human ubiquitin-conjugating enzyme HUBI-1,accession number Y01785,Smith-Waterman Score=419.
caaagggtcccggacggcagccacagcgtccgactcgactcggagggtttctgtgagagacaaattgcttgttaaaggtcaaagcctacggcgaatcttgtgaaaaattagttctcttcacggaattaataacatatagtgttctagagttttcgtgacttctgctatccatgttgaggttgcagaacttgaagctaatttaccttgtacatgtaaagtgcattttcctgatccaaacaagcttcattgttttcagctaacagtaaccccagatgagggttactaccagggtggaaaatttcagtttgaaactgaagttcccgatgcgtacaacatggtgcctcccaaagtgaaatgcctgaccaagatctggcaccccaacatcacagagacagg

SEQ ID NO: 7259 - DNA, 342 bp, Homo sapiens
  SIMILAR (340)..(293): 1001254mologous to Homo sapiens dJ794I6.1.1 (novel protein),accession number AL109976,Smith-Waterman Score=89.
cttgtgagtagtggtgatttcaacttgctgcagcagcacaggaagatgggtccgcatcacaggctcctggctaatgctgctgatggcgaaatgctggagaaaccagtccagctctgggagtttggctgagagtaactttagggaactccgtttctccccagcaggctggctcagggcactgaagagcttctgtgcactggagtgcaatctcttttgttccacagataatccatcttcctggatcacttttaaagagatccttgagttatcgtgctgtttacagagggagaagaccttcctcaggccaggactgtagattgctggaataaagatatgctcctt

SEQ ID NO: 7260 - DNA, 390 bp, Homo sapiens
  SIMILAR (145)..(387): 971254mologous to Homo sapiens Human NCE-2 protein,accession number Y25341,Smith-Waterman Score=434.
ggcacgaggctagcaagtaaactgaagcgtgacgatggtctcaaagggtcccggacggcagccacagcgtccgactcgactcggagggtttctgtgagagacaaattgcttgttaaagaggttgcagaacttgaagctaatttaccttatgagggttactaccagggtggaaaatttcagtttgaaactgaagttcccgatgcgtacaacatggtgcctcccaaagtgaaatgcctgaccaagatctggcaccccaacatcacagagacaggggaaatatgtctgagtttattgagagaacattcaattgatggcactggctgggctcccacaagaacattaaaggatgtcgtttggggattaaactctttggttactgatcttttgaag

SEQ ID NO: 7261 - DNA, 2601 bp, Homo sapiens
  SIMILAR (172)..(2601): 991254mologous to Homo sapiens dJ794I6.1.1 (novel protein),accession number AL109976,Smith-Waterman Score=4176.
ggacatctggtacgaagcactggtcccggcgggagctttgccaagcacatggtagcccagtgtgtctcaccaaagggacctcttgcttgttcgagaacatacctttttggagctactcatgttccttacttgggtggtgacagcaagctgcccaagaaaactgaacaaattaggctattgtcccagatatatgctgctgttattgaggctgttttggctggcattgcatgttatgctaaaacttccagtctaacaaaggccaaggaggtagcagagcaaactctgggatctgggttagattcctttgagttgattccgtttaaggcagccctgcgctccaagatgacttttcatatacatgctgtgaataatcagggaagaattgtaccgctggacagtgaagatagcttatcctttgtgaagacggcttgtatggccgtctatgacattcctgacttactgggaggcaatggttgtttaggatctgtggttttctctgaatcatttttgacttctcagatcttagttaaagaaaaggatggcactgttaccacagaaaccagctccgtagtcctgactgctgctgtacccagattctgctcctggctggtggaagataatgaagtaaaattgtctgagaaaacccagcaagcagtgaggggggatgagtctttcctgggcacttatctaacaggaggagaaggagcatatctttattccagcaatctacagtcctggcctgaggaagggaatgttcatttcttctctagtggccttctgttttctcactgtcgtcatggaagtatcatcatttccaaggatcacatgaattccatttccttctatgatggggattccaccagtactgttgctgctcttctcatagacttcaaaagctcattgcttcctcacctcccagttcatttccatggatcaagcaattttctgatgattgcccttttccccaaatcgaagatataccaagcattttactcagaggtcttctccctctggaaacagcaggataactcagggatctctttaaaagtgatccaggaagatggattatctgtggaacaaaagagattgcactccagtgcacagaagctcttcagtgccctgagccagcctgctggggagaaacggagttccctaaagttactctcagccaaactcccagagctggactggtttctccagcatttcgccatcagcagcattagccaggagcctgtgatgcggacccatcttcctgtgctgctgcagcaagctgaaatcaacactactcacagaatagaaagtgacaaggtaattatcagcattgtaaccggcctcccaggctgtcacgctagcgagctctgtgcttttctggtcactctgcataaggaatgtggcagatggatggtgtatcgccaaatcatggacagctctgaatgttttcatgctgcacacttccagagatacctttccagtgccctagaggcccagcagaaccgctctgcgcgccagtcagcctacatccgcaagaagaccagactgctggtggtgttacaaggctacacagatgttattgatgttgtccaggccctgcagacccacccagactcaaatgtcaaggcctccttcaccattggtgccatcacagcatgtgtggagcccatgagctgctacatggagcacagatttctctttcctaaatgtcttgaccagtgttcacaaggcctggtgagtaacgtggtattcaccagtcacaccacggagcagcggcaccctctccttgttcagctgcagagcctcatcagggctgccaatcctgctgcagccttcattcttgcagaaaatgggattgtcaccaggaatgaagacattgagctgattctctcagaaaacagtttttcaagtcctgagatgctacgatctcgatatttaatgtatcctggctggtatgaaggtaaattgaatgctggatcagtctatcccctaatggttcagatctgcgtatggtttggccgtcccttggagaagactcgctttgtggccaaatgtaaagcaattcagtcctccatcaagccaagtcccttctccggaaacatctaccacatcctgggcaaagtgaagttttcagactctgagaggaccatggaggtctgctacaacacactggccaactccttgagcatcatgccagttttggaaggacccacaccaccaccagactccaaaagcgtatctcaagacagcagcgggcagcaggagtgctaccttgtgttcatcggctgctccctgaaggaagacagcatcaaggactggctgcggcagtcagctaagcagaagcctcagaggaaagccctgaagaccagggggatgctgacgcaacaggagatcaggagcatccacgtaaaacgccacttggaacccctacctgcaggctacttttataatggcacccaatttgttaacttctttggtgacaaaactgattttcacccactcatggaccagttcatgaatgactacgtggaagaagccaaccgggaaattgagaagtataaccaggagctggaacagcaggagtatcatgacctctttgagctgaagccc

SEQ ID NO: 7262 - DNA, 1368 bp, Homo sapiens
  SIMILAR (1033)..(1362): 961254mologous to Homo sapiens Human ubiquitin-conjugating enzyme HUBI-1,accession number Y01785,Smith-Waterman Score=593.
atggacgtgtaccccccgcgccggcaggggctgccccgcgctcggtcccctggcggctccagccgcgggtcaccctccgtcagagaaacccttctgggaaccagagtggttaggaacatggacattgaagttagagctggaatcgaaactcagttcgaatgcagccacctttttgctttgctgagtgggaaatgcaagagggaggctagagaccactgtctgacagtcaagagtccagagcagataccagaagggttattgcttcaagcagatgaggatctgagaccagagcacaggcactgggccacccataaatggaatgtgccagcttctccaatctgtgcttttttctggaagcttcaggattttgagctttgtccaggaggcctttcaagtggcactggacttgtttctaaaaaggttcacttcaaaagtacaaatgtagagggatacccaggacagggaagggtgcaggtactaaccactcagcagcaggagcagtttctacctcgtgacacctatggagccctcttatctctggaaacaagggcctcaggaaaaggcagtgtgcacagaaagccaggctacttgttggagggtagaggtttccagagcttgaacctagatagtcgctggctgtggctgccacagatggattccaccagtactgttgctgctcttctcatagacttcaaaagctcattgcttcctcacctcccagttcatttccatggatcaagcaattttctgatgattgcccttttccccaaatcgaagatataccaagcattttactcagaggtcttctccctctggaaacagcaggataactcagggatctctttaaaagtgatccaggaagatggattatctgtggaacaaaagagattgctttgtgggtgtgctctctctgcaggatgcctcgcattatgtaacacaggggtcttggcttctgaaagggtcaacacagacatttcaatgctgccaacttgcaggctcaggttatcctcccgcttagcaggtgggactacagaggttgcagaacttgaagctaatttaccttgtacatgtaaagtgcattttcctgatccaaacaagcttcactgttctcagctaacagtaactccagatgagggttactaccagggtggaaaatttcagcttgaaaccgaagttcccgatgtgtacaacatggtgcctcccaaagtgaaatgcctgaccaagatctggcaccccaacatcacagagacaggggaaatatgtctgagtttactgagagaacattcaattgacggcactggctgggctcccatgagaacattaaaggatgtcgtttggggattaaactctttgtttactgatttttga

SEQ ID NO: 7263 - DNA, 1006 bp, Homo sapiens
  SIMILAR (874)..(632): 981254mologous to Homo sapiens Human ubiquitin-conjugating enzyme HUBI-1,accession number Y01785,Smith-Waterman Score=428.
gcaagctctggcctcaattttgagttcattacaacttcttaagaatttcaccaacagcctatacagtacaagttcaaaaaagtaaacatgttaaggtaagcagacaactcttcagaagcccaaacacattttcttgctgtatttatgttgaattctccatctacaatgagcagtcatgaagatggtcttcttcagggcaacatggtcacaggactggggcaatccaggggactgagagggagcatgaggacgggagagggggctacctcttgctgtttcatgttagagacaaactgtaacacagtccatgggcctgcaatcgtccccttttatcatctggcataacgtttgatgtagtccatcccacttttattccggaagtcctccttgtcccgcaaatgatgttctgcagcttcaatattcagtggatcatcaaaattcaaaagatcagtaaacaaagagtttaatccccaaacgacatcctttaatgttcttgtgggagcccagccagtgccatcaattgaatgttctctcaataaactcagacatatttcccctgtctctgtgattgttggggtgccagattccttggtccaggcatttcactttgggaggcaccatgttgtacgcattcgggaacttcagtttcaaactgaaattttccaccctggtagtaaccctcatctggggttactgttagctgaaaacaatgaagcttgtttggatcaggaaaatgcactttacatgtacaaggtaaattagcttcaagttctgcaacctctttaacaagcaatttgtctctcacagaaaccctccgagtcgagtcggacgctgtggctgccgtccgggaccctttgagaccatcgtcacgcttcgagttcgcagtctagcgttagcattactgctgcctttaccctgggctccccgagacaggcgaggcgggcccggcgcccaacaccatgcccggtcagggcggctgctgcgagacgcggcccctcacacgaaa

SEQ ID NO: 7264 - DNA, 1731 bp, Homo sapiens
  SIMILAR (532)..(1728): 881254mologous to Homo sapiens ash2l2,accession number AF056717,Smith-Waterman Score=1872.
atggcggcggcaggagcaggacctggccaggaagcgggtgccgggcctggcccaggagcggtcgcaaatgcaacaggggcagaagagggggagatgaagccggtggcagcgggagcagccgctcctcctggagaggggatctctgctgctccgacagttgagcccagttccggggaggctgaaggcggggaggcaaacttggtcgatgtaagcggtggcttggagacagaatcatctaatggaaaagatacactagaaggtgctggggatacatcagaggtgatggatactcaggcgggctccgtggatgaagagaatggccgacagttgggtgaggtagagctgcaatgtgggatttgtacaaaatggttcacggctgacacatttggcatagatacctcatcctgtctacctttcatgaccaactacagttttcattgcaacgtctgccatcacagtgggaatacctatttcctccggaagcaagcaaacttgaaggaaatgtgccttagtgctttggccaacctgacatggcagtcccgaacacaggatgaacatccgaagacaatgttctccaaagataagagtaaagaaagagatgtattcttggtaaaggaacacccagatccaggcagtaaagatccagaagaagattaccccaaatttggacttttggatcaggaccttagtaacattggtcctgcttatgacaaccaaaaacagagcagtgctgtgtctactagtgggaatttaaatgggggaattgcagcaggaagcagcggaaaaggacgaggagccaagcgcaaacagcaggatggagggaccacagggaccaccaagaaggcccggagtgaccctttgttttctgctcagcgccttccccctcatggctacccattggaacacccgtttaacaaagatggctatcggtatattctagctgagcctgatccgcacgcccctgaccccgagaagctggaacttgactgctgggcaggaaaacctattcctggagacctctacagagcctgcttgtatgaacgggttttgttagccctacatgatcgagctccccagttaaagatctcagatgaccggctgactgtggttggagagaagggctactctatggtgagggcctctcatggagtacggaagggtgcctggtattttgaaatcactgtggatgagatgccaccagataccgctgccagactgggttggtcccagcccctaggaaaccttcaagctcctttaggttatgataaatttagctattcttggcggagcaaaaagggaaccaagttccaccagtccattggcaaacactactcttctggctatggacagggagacgtcctgggattttatattaatcttcctgaagacacagagacagccaagtcattgccagacacatacaaagataaggctttgataaaattcaagagttatttgtattttgaggaaaaagactttgtggataaagcagagaagagcctgaagcagactccccatagtgagataatattttataaaaatggtgtcaatcaaggtgtggcttacaaagatatttttgagggggtttacttcccagccatctcactgtacaagagctgcacgatgagtgacatgggctggggcgccgtggtagagcacaccctggctgacgtcttgtatcacgtggagacagaagtggatgggaggcgcagtcccccatgggaaccctga

SEQ ID NO: 7265 - DNA, 702 bp, Homo sapiens
  SIMILAR (1)..(255): 981254mologous to Homo sapiens similar to Drosophila ash2,accession number AB020982,Smith-Waterman Score=422.
  misc_feature (1)...(702): n = a,t,c or g
atggcggcggcacgagcaggacctggccaggaagcgggtgccgggcctggcccaggagcggtcgcaaatgcaacaggggcagaagagggggagatgaagccggtggcagcgggagcagccgctcctcctggagaggggatctctgctgctccgacagttgagcccagttccggggaggctgaaggcggggaggcaaacttggtcgatgtaagcggtggcttggagacagaatcatctaatggaaaagatacactatcatcgctcgcgtcgccgcattcgcactgtgactgcggtcacgaccacctgaggaacacgctgcagatccacgagagaaaccgagcaagcaaagcgggcgccaccagcacagcgagcaacctgcacgaaacaaccgacagcgagcacaagcaaagaaaaatacaaagccaccaggaaacagaagagcacacacaaatccagcaatacacacacaggcgcaagcagaacagaaacaaacgcaacgtgaacggcagagacacagccccacaaccgaaagagacaatcaccagcaaacaacgaacaanaacccgcaacaagcacaagtcaaacaccgcagatctacgtaaaaacacagaacgagcaaaccaaaaatgcccgacaaaggacccaagaaaagacacgcatcacgaaaacgatgaggatagacacagaaatgacgtaccgtaa

SEQ ID NO: 7266 - DNA, 2353 bp, Homo sapiens
  SIMILAR (243)..(1880): 991254mologous to Homo sapiens ash2l1,accession number AF056718,Smith-Waterman Score=2966.
cccggctggagcaggacctggccaggaagcgggtgccgggcctggcccaggagcggtcgcatatgcaacaggggcagaagagggggagatgaagccggtggcagcgggagcagccgttcctcctggagaggggatctctgctgctccgacagttgagcccagttccggtgaggctgaaggcggggaggcaaacttggtcgatgtaagcggtggcttggagacagaatcatctaatggaataagatacactagaaggtgctggggatacatcagaggtgatggatactcaggcgggctccgtggatgaagagaatggccgacagttgggtgaggtagagctgcaatgtgggatttgtacaaaatggttcacggctgacacatttggcatagatacctcatcctgtctacctttcatgaccaactacagttttcattgcaacgtctgccatcacagtgggaatacctatttcctccggaagcaagcaaacttgaaggaaatgtgccttagtgctttggccaacctgacatggcagttccgaacacaggaagaacatccgaagacaatgttctccaaagataaggatattataccatttattgataaatactgggagtgcatgacaaccagacacagacctgggaaaacgacttggccaaataacattgttaaaacaatgagtaaagaaagagatgtattcttggtaaaggaacacccagatccaggcagtaaagatccagaagaagattaccccaaatttggacttttggatcaggaccttagtaacattggtcctgcttatgacaaccaaaaacagagcagtgctgtgtctactagtgggaatttaaatgggggaattgcagcaggaagcagcggaaaaggacgaggagccaagcgcaaacagcaggatggagggaccacagggaccaccaagaaggcccggagtgaccctttgttttctgctcagcgccttccccctcatggctacccattggaacacccgtttaacaaagatggctatcggtatattctagctgagcctgatccgcaagcccctgaccccgagaagctggaaattgactgctgggcagggaaacctatttctggagacctttacagagcctgcttgtatgaacgggttttgttagccctacatgatcgagctccccagttaaagatctcagatgaccggctgactgtggttggagagaagggctactctatggtgagggcctctcatggagtacggaagggtgcctggtattttgaaatcactgtggatgagatgccaccagataccgctgccagactgggttggtcccagcccctaggaaaccttcaagctcctttaggttatgataaatttagctattcttggcggagcaaaaagggaaccaagttccaccagtccattggcaaacactactcttctggctatggacagggagacgtcctgggattttatattaatcttcctgaagacacagagacagccaagtcattgccagacacatacaaagataaggctttgataaaattcaagagttatttgtattttgaggaaaaagactttgtggataaagcagagaagagcctgaagcagactccccatagtgagataatattttataaaaatggtgtcaatcaaggtgtggcttacaaagatatttttgagggggtttacttcccagccatctcactgtacaagagctgcacggtttccattaactttggaccatgcttcaagtatcctccgaaggatctcacttaccgccctatgagtgacatgggctggggcgccgtggtagagcacaccctggctgacgtcttgtatcacgtggagacagaagtggatgggaggcgcagtcccccatgggaaccctgaccaggtccctcttttctgtcaaggactttctgggaataatactgggggttttgtttttgtttttgaactgtctcaaatgttctcccaaagatgctaaaaacacagcctctccttttagcaagttaaaaggctgggtaggactgcgggagactgcctgcctttcaccattttctccccacttccagtgactgctcttattttgtgtaccataagccaacaaccgctgactccaggattgcataagccccctgtgaaatcggtgctgtactgcataccctgccagctgtgacttgttatcctactatattttctaaggagtgaataatattgtccgagtaactaacttatttaaaagacatttccttctgtgggcattgactgtatcccacctgttttccaaggaaatggtaacctgtttctgagaacacctgaaatcaatggctatacattccaaaccaatctaaacgcta

SEQ ID NO: 7267 - DNA, 270 bp, Homo sapiens
  SIMILAR (112)..(267): 961254mologous to Homo sapiens lysophospholipase,accession number AF081281,Smith-Waterman Score=247.
atgtcagccccgctgccagccatcgtgcccgccacctggaaggccaccgcggcggtgattttccttcatggattgggagatactgggcaccgatggatagaagcctttgcagattcacaggaggacgaacctgggattaaacaggcagcagaaaatataaaagctttgatcgatcaagaagtgaagaatggcattccttctaaccgaattattgtaggaggattttctcagggaggagctttatctttatatactgcccttaccacgtag

SEQ ID NO: 7268 - DNA, 1538 bp, Homo sapiens
cggcgggcgaggggcagggcagggcggaccctggacgcgcgggcgcgcgcggaaggtagcgcggggccgcgttggcgcgcacgcgcctgagcgtgcgcccggtggggccggccgggactcgccgctcgcacgcccttgggccgcggccgggcgcccgctcttccttccgcttgcgctgtgagctgaggcggtgtatgtgcggcaataacatgtcaaccccgctgcccgccatcgtgcccgccgcccggaaggccaccgctgcggtgattttcctgcatggattgggagatactgggcacggatgggcagaagcctttgcaggtatcagaagttcacatatcaaatatatctgcccgcatgcgcctgttaggcctgttacattaaatatgaacgtggctatgccttcatggttttgatattattgggctttcaccagattcacaggaggatgaatctgggattaaacaggcagcagaaaatataaaagctttgattgatcaagaagtgaagaatggcattccttctaacagaattattttggggagggttttctcagggaggagctttatctttatatactgcccttaccacacagcagaaactggcaggtgtcactgcactcagttgctggcttccacttcgggcttcctttccacagggtcctatcggtggtgctaatagagatatttctattctccagtgccacggggattgtgaccctttggttcccctgatgtttggttctcttacggtggaaaaactaaaaacattggtgaatccagccaatgtgacctttaaaacctatgaaggtatgatgcacagttcgtgtcaacaggaaatgatggatgtcaagcaattcattgataaactcctacctccaattgattgacgtcactaagaggccttgtgtagaagtacaccagcatcattgtagtagagtgtaaaccttttcccatgcccagtcttcaaatttctaatgttttgcagtgttaaaatgttttgcaaatacatgccaataacacagatcaaataatatctcctcatgagaaatttatgatcttttaagtttctatacatgtattcttataagacgacccaggatctactatattagaatagatgaagcaggtagcttcttttttctcaaatgtaattcagcaaaataatacagtactgccaccagattttttattacatcatttgaaaattagcagtatgcttaatgaaaatttgttcaggtataaatgagcagttaagatataaacaatttatgcatgctgtgacttagtctatggatttattccaaaattgcttagtcaccatgcagtgtctgtatttttatatatgtgttcatatatacataatgattataatacataataagaatgaggtggtattacattattcctaataatagggataatgctgtttattgtcaagaaaaagtaaaatcgttctcttcaattaatggcccttttattttgggaccaggcttttattttccctgatattatttctatttaatactcttttctctc

SEQ ID NO: 7269 - DNA, 1185 bp, Homo sapiens
  SIMILAR (382)..(777): 901254mologous to unidentified cloning vector 29kD protein essential for the replication of mini F plasmid,accession number AB015619,Smith-Waterman Score=603.
atgggggaataccttcaggccagagctcaaaatctcatagttcaccagggcatccacactggagagaaatcttttgaatgtggtaagtgtgggaaagccttcagccggagtcagggcctcactgtccctcagaggatccacacgggggagaagccatttgagtgtaatgaatgcggcaaagctttcagttgtagttcataccttattgtgcatcagagaattcacacaggggagaaaccctatcagtgtaatgagtgtgaaagagcctttggccagagctcccatcttattctccatcagacaactcatgcccagaagaaacctcagctggctacttggtgtgacaatctaaaaacttgtcacacttcacatggatctgtcatggcggaaacagcggttatcaatcacaagaaacgtaaaaatagcccgcgaatcgtccagtcaaacgacctcactgaggcggcatatagtctctcccgggatcaaaaacgtatgctgtatctgttcgttgaccagatcagaaaatctgatggcaccctacaggaacatgacggtatctgcgagatccatgttgctaaatatgctgaaatattcggattgacctctgcggaagccagtaaggatatacggcaggcattgaagagtttcgcggggaaggaagtggttttttatcgccctgaagaggatgccggcgatgaaaaaggctatgaatcttttccttggtttatcaaacctgaagttaggcgatgccgtatctactacctagagttagcaccagatcccccaggtccgtcagaatctgatcagaagtctgatgagagtactcactgtaggcagtcttatacacaaggtggaactagtcttaaggaccttcataccagattgaattcggatagtgatggaaagaatagtcctccagaattaaggtttgtcacaggaatgaaagtattgcattacttaataaattcagtgtatacagtaagtggccagagtgaagctgcagaccttcgcggtgttacagctcataaaggcagtgtggacccaaagagtgagcagtggcaagatttactgcaaagagcaaaagaacaaagcttccacactgcggaaggggaccggagcgggttgtcactgctgctcgggcagcctgctgttattctcttatctggccccaccacatcctgctga

SEQ ID NO: 7270 - DNA, 2472 bp, Homo sapiens
  SIMILAR (550)..(1989): 951254mologous to Homo sapiens zinc finger protein,accession number AF154846,Smith-Waterman Score=2546.
atggtagatcgggccaggcccacagtgttggtcacagaagtgcctctgaagtctaaacacactgctcagatgggcctggtccttacagccaatgaaagccaaccacttgtgcatgaaacagctctgaagaataaaaaacctcaatcttggtttccaaatccttgtgtctcctataataggaagccaggactgcaggacaacacgtggtcaaggagacctgaaaatcagagtttgggcgccaccggtaatagggaaccctcagaatgttctgtgggattagcctcagacaagactgaggaagagcagaaaggcctgagctgggggagcaggctactgaggcagctcttctcaaagcgccagcagagtccgttagacaggagcaccggtccacaaacacacacagactcggagctgctgtcctcagtacttccctcgggccggctgcctgcccagccgaggccacgacgtcgaaccccaacacgaagctggcgacggaccatgccgggggataagaaatgggtaaaagttgttgtcttctttctttgggcagcaggtgagaacatgatgaagggttcagagttgactccaaagcaggaattttttaaaggatcagagtcatctaacaggacatcagggggactctttggggtggttcctggggcagcagagactggagatgtttgtgtttatactttcaaggagttagaaggacaaacctcagatgaagaagggagcagactagaaaatgatttcttggaaataacagatgaagataagaaaaaatccacaaaagacagatatgacaaatataaggaagttggggaacatccacctctgtcttccagtcctgttgaacatgaaggagttttaaagggacagaaatcctatcgatgtgatgaatgtggcaaagctttcaatcggagttctcaccttattggccatcagagaatccacactggagagaaaccctatgagtgtaatgagtgtgggaagaccttcaggcaaacctcccagctcattgttcatctcagaacccacacaggggaaaaaccctatgaatgcagtgagtgtggaaaggcctataggcacagctcccatctcattcaacaccagagactccataatggggagaaaccctataaatgtaatgaatgtgcaaaagcctttactcagagttcccgactcactgaccaccagagaacccatactggggagaaaccttatgaatgcaatgagtgtggagaggcattcattcgaagcaaaagtcttgctcgacatcaggtcctgcacactggtaagaaaccttacaaatgcaatgagtgtgggagagcattctgttccaatagaaatctcattgaccatcagagaatccacactggggagaagccttatgagtgtagtgaatgtgggaaagcctttagtcggagttcgggccttatatcacatcacagagttcacaccggagagaagccctattcttgtattgagtgtgggaaagccttcaatcagaactctcaactcattgagcatcagcgaatgcacagaggaaaaaaagtttacaaatgtaaggagtgtggtaaggcatttggtctgagtaaatgtcttattcggcaccagagacttcacacgggtgaaaagccctataaatgcaatgagtgtggaaaatccttcaatcaaaactcacaccttattatacaccagagaattcacactggtgagaaaccctatgaatgtaatgagtgtgggaaggtattcagttatagctccagccttatggtacatcagagaacccatactggggaaaaaccctataaatgcaatgattgtgggaaagcttttagtgacagctcacagcttattgtacaccagagagtccacaccggagagaaaccttatgaatgtagtgaatgtgggaaagcctttagtcagcgttccacttttaatcaccaccagcgaactcacactggagagaagtcctcaggtctggcttgccaagaaggaaataaagaaatctccaaaggaccacaaaaacccccaggctatcggttatgtccccttcaagctgtagggggaggggaatttggcccaaccagggtacacatctccttctctctctctgatttaaagcagatcaaggttttttttcccggggggcctttaatgttggaaaaacaaaaaaagaaatcccccaatccgtatgccatgcgtttatcgaaatccctgtgtcagtatcgtaagccggatggctcaggcatcgtctctctgaaaatcgactggatcatagagcgttaccagctgcctcaaagttaccagcgtatgcctgacttccgccgccgcttcctgcaggtctgtgttaatgagatcaacagcagaactccaatgcgcctctcatacattgagaaaaagaaaggccgccagacgactcatatcgtattttccttccgcgatatcacttccatgacgacaggatag

SEQ ID NO: 7271 - DNA, 1599 bp, Homo sapiens
  SIMILAR (331)..(1530): 901254mologous to Homo sapiens zinc finger protein,accession number AF154846,Smith-Waterman Score=1986.
atggcacgccgtgtacggcccggggcaggggggccctcgccccggggcccgcttcggaacgtcggtgccgcggaccgttccgtggaggcgacgggattggcagagacgaagcagggggaaacggagaggatccatactggtgagaaaccctatgaatgccaggaatgtgggaataccttcagccagagctcaaatctcatagttcatcagggcatccacactggagagaaatcttttgaatgtggtaagtgtgggaaagccttcagccggagttcaggcctcactgtccctcagaggatccacacgggggagaagccatttgagtgtaatgaatgcggcaaagctttcagttgtagttcataccttattgtgcatcagagaattcacacaggggagaaaccctatcagtgtaatgagtgtgaaagagcctttggccagagctcccatcttattctccatcagacaactcatgcccagaagaaacctcagctggctacttggagaatccacactggagagaaaccctatgagtgtaatgagtgtgggaagaccttcaggcaaacctcccagctcattgttcatctcagaacccacacaggggaaaaaccctatgaatgcagtgagtgtggaaaggcctataggcacagctcccatctcattcaacaccagagactccataatggggagaaaccctataaatgtaatgaatgtgcaaaagcctttactcagagttcccgactcactgaccaccagagaacccatactggggagaaaccttatgaatgcaatgagtgtggagaggcattcattcgaagcaaaagtaaagctcgacatcaggtcctgcacactggtaagaaaccttacaaatgcaatgagtgtgggagagcattctgttccaatagaaatctcattgaccatcagagaatccacactggggagaagccttatgagtgtagtgaatgtggcaaagccttcagtcggagtaaatgtcttattcgacatcagagcctccatactggggaaaagccatacaaatgtagtgaatgtgggaaagccttcaatcagaactctcaactcattgagcatgagcgaattcatactggagaaaaaccttttgaatgtagcgagtgtggtaaggcatttggtctgagtaaatgtcttattcggcaccagagacttcacacgggtgaaaagccctataaatgcaatgagtgtggaaaatccttcaatcaaaactcacaccttattatacaccagagaattcacactggtgagaaaccctatgaatgtaatgagtgtgggaaggtattcagttatagctccagccttatggtacatcagagaacccatactggggaaaaaccctataaatgcaatgattgtgggaaagcttttagtgacagctcacagcttattgtacaccagagagtccacaccggagagaaaccttatgaatgtagtgaatgtgggaaagcctttagtcagcgttccacttttaatcaccaccagcgaactcacactggagagaaggtcctcagtgctgcgttggtcagtttcttaaggtatggttctctagagacagagagcaaggacctttga

SEQ ID NO: 7272 - DNA, 3394 bp, Homo sapiens
  SIMILAR (1737)..(1946): 281254mologous to Mus musculus mSin3A,accession number U22394,Smith-Waterman Score=51.
catggcgcacgctggcggtggcagcggtggcagcggtgccggcggccccgcgggccgggggctgagcggcgcccgctggggtcgctcgggctccgcaggccacgagaagctgccggtgcacgtagaagacgccctcacctatctggaccaggtgaagatccgctttggcagcgaccctgccacctacaacggcttcctggagatcatgaaggagttcaaaagccagagcatcgatactcctggagtcatcagacgtgtctcgcagctcttccacgagcaccctgacctcattgttggattcaacgcttttcttcccctcggatatagaatagacattcccaagaatggcaagttaaacatacagtcgcctctgacaagccaggagaattcgcacaaccacggggacggtgcagaggacttcaagcagcaggtgccgtataaagaggacaaaccccaggtgcccctggagtccgattccgtggaattcaacaacgccatcagctatgtgaataagattaaaacccgcttcctagaccacccagaaatctacaggtcattcctggagatcctgcacacgtaccagaaggagcagctgaacacgaggggccggccattccgaggcatgtctgaagaggaggtgttcaccgaggtggccaacctcttccggggccaggaggacctgctctcagagtttggacagttcctgcccgaagccaagcggtctctgttcacaggaaacgggccgtgcgagatgcacagcgtgcagaagaacgagcacgacaagaccccggagcacagcaggaagcgctcccggccctcgctcctccgccccgtgtctgcacccgccaagaaaaaaatgaaacttcgtggtaccaaagacctgtccatcgctgcagtggggaagtacgggactctgcaggaattttctttctttgacaaggtccgccgggtgctgaagagccaggaggtgtatgaaaacttcctccgctgcatcgcactcttcaaccaggagctggtgtctggctctgagctcctgcagctcgtcagcccatttctggggaaatttccagaactctttgcacagttcaagtccttcctgggggtaaaagagctgtccttcgcgccacccatgagcgacagatccggggacgggataagccgggaaattgattatgcatcctgcaagcgcataggatccagctaccgggcactccccaaaacctaccagcagcccaagtgcagtgggaggacagccatctgcaaggaggtactgaacgacacctgggtctccttcccttcctggtctgaggactccacgttcgtcagctccaagaagacaccgtacgaggagcagcttcaccgctgtgaggacgagcgcttcgagttagacgttgtcctggagacgaacctggccacaatccgtgtgttggaaagtgtgcagaagaagctgtctcggatggcgccggaagaccaggagaagttccggctggacgactccctgggaggcacgtcggaggtgatccagcgccgtgccatttatcgcatctatggcgacaaggccccggagatcatcgagagcctcaagaagaaccctgtcaccgctgtccccgttgtcctgaaaagactgaaggccaaggaagaggagtggcgggaggcccagcagggcttcaacaagatctggcgggagcagtatgagaaggcgtacctcaagtcccttgaccaccaggctgtgaacttcaagcagaacgacaccaaggccctgcgctccaagagcttgctcaacgagatcgagagcgtctacgacgagcaccaagaacaggcactccgaagggccggaagtgccccccctagcgaggcgcacctcatctttgtgtacgaggaccggcagatcctggaggacgcagcagcgctcatcagctactacgtgaagcggcagccggccatccagaaggaggaccagggcaccatccaccagctgctgcaccagttcgtgcccagcctcttcttctctcagcagctggacctgggcgcctccgaggagtcagctgatgaggaccgggacagcccccaggggcagaccacagaccccagtgagcggaagaagccggcgccaggaccccacagtagccccccagaggagaagggggccttcggggatgccccggccactgagcagccacccctgccgcccccagccccgcacaagcccctggacgatgtctacagcctattttttgccaacaacaactggtacttcttcctgcgcctgcaccagaccctgtgctccaggctgctgaagatctaccgccaggcgcagaagcagcttctggagtatcggaccgagaaggagcgggagaagctgctgtgtgagggccgcagggagaagggcagcgaccccgccatggagctgcggctgaagcagcccagtgaagtggagctggaggagtactacccggccttcctggacatggtgcggagcctgctggagggcagcatcgaccccacgcagtacgaggacaccctacgcgagatgttcaccatccatgcctacgtgggcttcaccatggacaagctggtgcagaacattgcgcggcagctgcaccacctcgtgagcgatgacgtctgcctgaaggtggtggagctctacctgaacgagaagaagcggggtgccgctggtgggaacctgtcctcccgctgcgtccgcgctgctagggagaccagctaccagtggaaggctgagcgctgcatggccgacgagaactgcttcaaggtgatgttcctgcagcgcaaagggcaggtgatcatgaccatcgagctcctggacaccgaggaggcccagacggaggaccctgtggaggtccagcacctggctcggtacgtggagcagtatgtggggaccgagggcgcgtccagctcgcccactgagggcttcctcctgaaacctgtgttcctgcagaggaacctcaagaagttccgccgccggtggcagagcgagcaggcgcgggccctgcgcggtgaggccaggagctcctggaagcggctggtgggcgtggagagcgcctgcgacgtggactgccgcttcaagctcagcactcacaagatggtgttcatcgtgaactccgaggactacatgtaccgtcgcgggaccctctgccgggccaagcaggtgcagcccctggtcctgctccgccaccaccagcactttgaggagtggcacagccgctggctggaggacaatgtgacggtggaggcggctagcctggtgcaggactggctgatgggtgaggaggacgaggacatggtaccctgcaagacgctgtgtgagacagtgcacgtgcacggcctgcccgtgacccgctaccgcgtgcagtacagccgccgcccggcctcgccc

SEQ ID NO: 7273 - DNA, 741 bp, Homo sapiens
  SIMILAR (439)..(678): 761254mologous to Xenopus laevis transcription co-repressor Sin3,accession number AF154112,Smith-Waterman Score=306.
atggcgacgattggtgggtggctgcatgcagggtcttccaatatggctgtcctggaggtgcccctgctgtcaggcttccgggcagacatcgagagcctggagcaggtgaggcagcgccgacacggtctctcggaggcggagctgaaggatgttttgtccctggacgacgaggtcctgcaggatgtgtaccgagattggaccccgcccagcaaggagctgctgcgcttcccgcccctgctgtgggtgcggcttcgtcgggatctgggatactacttggcccggcggcccgtggatggcttcaccctcctggccattgcccacagccgtaaattctatacaaaattaccgccgctccagaatctcaaagcaatagctgtgagagttctgcgcatcagcatcgtggaattcgctgaataccgattcccagtcatccggctcttagacgttgtcctggagacgaacctggccacaatccgtgtgttggaaagtgtgcagaagaagctatctcggatggcgccggaagaccaggagaagttccggctggacgactccctgggaggcacgtcggaggtgatccagcgccgtgccatttatcgcatctatggcgacaaggccccggagatcatcgagagcctcaagaagaaccctgtcaccgctgtccccgttgtcctgaaaagggagcccttggagagctcattagtgctgtttgtcaacaggtgtcgtctccaggggggtcgttaa

SEQ ID NO: 7274 - DNA, 402 bp, Homo sapiens
  SIMILAR (73)..(291): 931254mologous to Homo sapiens Human calcium channel SOC- 2/CRAC-1,accession number Y95435,Smith-Waterman Score=370.
atggagcacagtggtgtgaccaaggctaactgcagccctgacgggctcaaccaagcctcccaccttagtctcctgtgtagctgggactacaggtgtttttgtggtcgcttggtcaagcaacatgcttgttttactgcaagtcttgccatgaaatactcagatgtgaaattgggtgaccattttaatcaggcaatagaagaatggtctgtggaaaagcatacagaacagagcccaacggatgcttatggagtcataaattttcaagggggttctcattcctacagagctaaggtaaggaagcaaaaagaggctctgaaacttgcacaaggttgcacacatagtaaacagcagagctgggatcctaactcagaccagtctgattccagaatctgtactatttaa

SEQ ID NO: 7275 - DNA, 224 bp, Homo sapiens
  SIMILAR (45)..(221): 881254mologous to Canis familiaris Band4.1-like5 protein,accession number AJ401272,Smith-Waterman Score=304.
tgttcacaataatgtttcgacccaaagtaatggctcccaacaggctctctgctgccagcgactgctgtcaacgtggtggaaaccagtggaacacaagggccttgcccccaccccagaccgcacatagaaactacactgactttgttcatgagcacaatgtgaagaatgcaggaatccgtcatgatgttcattttcctggccatacagccatgactgagatatga

SEQ ID NO: 7276 - DNA, 1262 bp, Homo sapiens
  SIMILAR (989)..(1135): 811254mologous to Canis familiaris Band4.1-like5 protein,accession number AJ401272,Smith-Waterman Score=228.
aataaccttcgtgaggagctaacccggtatttatttgttcttcagttaaaacaagatattctcagtggaaaattagactgtccctttgatacagcagtgcaattggcagcttataatctgcaagctgaacttggtgactatgatcttgctgagcatagtcctgaacttgtctcagagttcagattcgtgcctattcagactgaagagatggaactggctatttttgagaaatggaaggaatacagaggtcaaacaccagcacaggctgaaaccaattatctgaataaagccaaatggctagaaatgtatggggttgatatgcatgtggtcaaggctagagatgggaatgactatagtttgggactaacaccaacaggagtccttgtttttgaaggagataccaaaattggcttatttttttggccgaagataaccagattggattttaagaagaatgaattaaccttggtggttgtagaagatgatgatcagggcaaagaacaggaacatacatttgtctttagactggatcatccaaaagcatgcaaacatttatggaaatgtgctgtggagcatcatgctttcttccgccttcgaggccccgtccaaaagagttctcatcgatcaggatttattcgactaggatcacgatttagatatagtgggaaaacagagtatcagcccacaaaaaccaataaagcaagaagatcaacatcctttgaaagaaggcccagcaaacgatattctagacgaactctacaaatgaaagcatgtgctacaaaacctgaagaacttagtgttcacaataatgtttcgacccaaagtaatggctcccaacaggcttgggggatgagatctgctctgcctgtgagtccttccatttcctctgctcctgtgccagtggagatagagaatcttccacagagtcctggaacagaccagcatgacaggaaatggctctctgctgccagcgactgctgtcaacgtggggggaaaccagaggaacacaagggccttgcccccaccccagaccgcacatagaaactacactgactttggtcatgagcacaatgtgaagaatgcaggaatccgtcatgaagttcattttcctggccatacagccatgactgagatatgagtgctgagcctcttaggctttgggactctttgtcatgcaagctgatggtatacattatctggcgtttataaaggattaatcacattacgagtatttgggagaatttacagggagtcactagttg

SEQ ID NO: 7277 - DNA, 465 bp, Homo sapiens
  SIMILAR (28)..(198): 921254mologous to Mus musculus mSin3B gene product,accession number L38622,Smith-Waterman Score=282.
atgaggcggtgtgtctccgcaggtggagtggagctggaggagtactacccggccttcctggacatggtgcggagcatgctggagggcagcatcgaccccacgcagtacgaggacaccctacgcgagatgttcaccatccatgcctacgtgggcttcaccatggacaagctggtgcagaacattgcgcggcagatcaatgcttggaatctggaaactgcagagccggtattccatatcctgggagatgcctctgatccttggatgtgcatggccgtgctggcctcccaggccacactgctgacagtgtccagggatggtgtggtcagtctgtggagctcagctacgggaaaacttcaggggaagcaacatatgtccagcatcaaagaagaaacacctacctgtgccgtctcagtccagaagcaaggaaagcttgttaccgggtttagcaatggctccatctctttg

SEQ ID NO: 7278 - DNA, 288 bp, Homo sapiens
  SIMILAR (4)..(159): 841254mologous to Homo sapiens KIAA0700 protein,accession number AB014600,Smith-Waterman Score=229.
cgggagtgctacgaggccttcctggacatagtgcgaagcctgctgaagggcagcatcgaccccacacagtacaaggacaccatacgcgagatgttcaccatccatgcctacgtgggcttcaccatggacaagctggtgcagagcattgcgcggcaggtgagccgggccggggtggggccggccctgaggacggcggaaatggctctaccatcatttcactccccgctcgggagggggcccgtggtcagcacagcaaacctatcctgttttttcttaattgagacaaaa

SEQ ID NO: 7279 - DNA, 4773 bp, Homo sapiens
  SIMILAR (115)..(4770): 1001254mologous to Homo sapiens C-terminal variant of hINADL including 2 amino acid exchanges and an insertion of 28 amino acids in frame,accession number AJ224747,Smith-Waterman Score=7969.
ctcacttccgcccaggtgaggcagggccgacaccgagcccgcccgacccgggctcccacctgctcctccagcgcaccaggtgtctttaagagtgattgaagagaataattcaaaatgcctgaaaatcctgctacagataaactgcaggtgctgcaggtacttgatcgcctgaaaatgaaattgcaggagaagggtgacacgtcgcagaatgagaagttatctatgttttatgagacactaaagagtcctctcttcaaccagatactcacacttcagcagtccatcaagcaactgaagggtcaactcaaccatataccctcagattgttcagccaactttgatttttctaggaaaggtttgttagtgttcacagatggttccattactaatggaaatgtccacaggccctctaataactcgactgtatctgggttatttccgtggaccccgaagttgggaaatgaagactttaactcagtcattcaacagatggctcagggccggcaaattgaatatatagatatagaacggccttcaactggaggccttggattcagtgtggtggccctcagaagtcaaaatctcggaaaagttgatatcttcgtgaaggatgtccagccagggagtgtagcagacagggatcaaagattaaaggaaaatgatcaaatattggccattaatcacacgccattggatcagaacatttcccatcagcaagcaattgcattattacaacaaaccactggatctttgagactgattgtggccagggaaccagtccacacaaaaagcagtacttctagcagcctaaatgatacaactctgcctgaaacagtttgttggggccatgttgaagaggttgagctcattaatgatggctctggactaggttttggaatagttggaggaaaaacaagtggcgtggttgtgaggactatagttcctggaggattagcagatcgagatggaagactccagacaggggaccacatcttgaagattggtggcacaaacgtgcagggaatgaccagtgagcaagttgcacaagttctaaggaactgtgggaattcagtcaggatgctcgttgctagagatccagctggtgacatttcagtcaccccccctgcccctgcagccttacctgttgccctgcctactgtagccagcaagggccctggttctgacagttctctttttgaaacttataatgttgagcttgtgagaaaagatgggcagagtcttggaattagaattgttggctatgttggaacatctcatacaggggaagcttcagggatttatgtgaaaagtataatacctggcagtgctgcgtaccacaatggccacattcaagtgaatgacaaaatagttgctgtcgatggcgtgaacattcagggttttgccaaccatgatgttgttgaagtattacgaaatgcagggcaggtggtacacctaaccctagttcgaaggaagacatcctcatctacttctccacttgaaccaccttcagacagaggaactgttgtagaaccactgaaaccaccagctctctttctaactggagcagtggaaactgaaactaatgtggatggtgaagatgaggaaattaaagaaagaattgatactttaaaaaatgacaacatacaagccttagaaaaattggaaaaagtcccagactctccagaaaatgagctgaaatccagatgggaaaacctgttgggtcctgattatgaagtaatggttgctactttggacacacagattgcagatgatgctgagttacagaaatattcaaagctgctgcctattcacactctgaggcttggtgtggaagtggattcctttgatgggcaccattatatttcttcaattgtttctggtggtcctgttgatacattgggtctcctacagccagaagatgagctgcttgaggtcaatggcatgcagctttatggaaaatctcgccgagaagcagtctcctttcttaaagaagtgccacccccttttactttggtttgctgtcggaggttgtttgatgatgaagcttctgtagatgaaccaaggcgcactgaaacctctcttcctgagacagaggttgaccacaatatggatgtcaatactgaagaagatgatgatggggaattagcactgtggtcccctgaagtcaagattgttgaactagtaaaagattgtaaaggtttgggattcagcattttggattaccaggaccctttagatcctacaagatcagtgattgtgatccgctccctggtagcagatggtgtagcagaaagaagtgggggactattacctggagaccgcctggtctcagtcaatgaataccgtttggacaacacctcacttgctgaagctgtggaaatattgaaagctgtgccaccaggcctagtacaccttggcatctgtaagcctttggtggaagataatgaagaagaaagttgttatattttacattcaagcagtaatgaagacaagactgaattttcaggaacaattcatgatataaattcatctttaatactcgaagcacccaagggatttagagatgaaccatattttaaagaagaacttgtggatgaaccatttctagatctgggaaagtctttccattcccaacaaaaagagatagagcaaagcaaggaggcctgggagatgcatgaatttctgactcctagattgcaggaaatggatgaagaaagagaaatgcttgttgatgaagaatatgagttatatcaagatccctcaccatccatggagttgtatcccttgtcgcacattcaagaggccactcctgtgccctctgtgaatgaacttcactttggtacacagtggttgcatgataatgaaccatccgagtctcaagaggcaagaaccgggaggactgtctattcccaggaggcacagccgtatggctattgccctgaaaatgtgatgaaagaaaattttgtcatggagtccctaccatctgtaccatcaactgaaggaaacagtcaacaaggcagatttgacgacctggaaaatcttaattcattagcaaaaactagtctggatttaggcatgatcccgaatgatgtccaaggtcctagcttgctcattgaccttcctgttgtggctcaaaggagggagcaagaagatttgcctttatatcaacaccaagcgacacgagttatttccaaggcctcagcatacacaggaatgttgtcttctagatatgccactgatacatgtgagttacctgagagagaagaaggcgaaggagaagaaactccaaattttagccactggggtccaccgagaattgttgagatttttagagaacccaatgtgtctcttgggatcagtattgttggtggacaaactgttataaaacgtctaaagaatggagaggagcttaaaggtatattcatcaaacaagttttagaagacagtccagcagggaagacgaacgcacttaaaactggagataaaatacttgaggtgtctggagtagatttgcagaatgcctcacacagcgaagcagttgaggccattaagaatgcaggaaaccctgtggtgttcattgttcagagtttgtcatccactccacgagtcattcctaacgtacataacaaggccaacaaaatcaccggtaaccagaaccaggacacccaagaaaagaaagaaaagaggcaaggaactgctccaccgccaatgaaacttcctcctccttataaagctctgactgatgacagtgatgaaaatgaagaagaagatgcctttaccgaccaaaaaatcagacaaagatatgcagatctgcctggagaactgcacattattgaacttgaaaaagataagaatggacttggactcagccttgctggtaataaagaccgatcacgcatgagcatatttgtggtgggaattaacccggaaggacctgctgccgcagatggacgaatgcgtattggagatgaactcttagagataaacaatcagattctgtatggaagaagtcaccaaaatgcatctgccattattaagactgccccatcaaaggtcaagctggttttcatcagaaacgaggatgcagtcaatcagatggccgttactccctttccagtgccatcaagttctccatcttctattgaggatcagagcggcaccgaacctattagtagtgaggaagatggcagcctcgaagttggtattaaacaattgcctgaaagtgaaagcttcaaactggctgtcagccagatgaaacagcaaaaatatccaacaaaagtctccttcagttcacaagagataccattagcaccagcttcatcataccattcaacagatgcagacttcacaggctatggtggtttccaggctcctctgtcagtggaccccgcaacgtgtcccattgtccctggacaggaaatgattatagaaatatccaagggacgttcagggcttggtctcagcattgtgggaggaaaagacacacccttgaatgctatagttatccatgaagtctatgaagaaggggcagcagccagagatggaagactttgggctggtgaccagatattagaggttaatggggttgacctgaggaactccagccacgaagaagccatcacagccctgaggcagaccccccagaaggtgcggctggtggtgtatagagatgaggcacactaccgggatgaggagaacttggagattttccctgtggatctgcagaagaaagctggccggggcctgggcctgagcatcgttgggaaacggtaa

SEQ ID NO: 7280 - DNA, 5350 bp, Homo sapiens; identical to SEQ ID NO: 6107
  SIMILAR (115)..(4686): 1001254mologous to Homo sapiens PDZ domain protein,accession number AJ001306,Smith-Waterman Score=7826.

SEQ ID NO: 7281 - DNA, 4863 bp, Homo sapiens
  SIMILAR (115)..(4860): 1001254mologous to Homo sapiens C-terminal variant of hINADL including 2 amino acid exchanges and an insertion of 58 amino acids in frame,accession number AJ224748,Smith-Waterman Score=8138.
ctcacttccgcccaggtgaggcagggccgacaccgagcccgcccgacccgggctcccacctgctcctccagcgcaccaggtgtctttaagagtgattgaagagaataattcaaaatgcctgaaaatcctgctacagataaactgcaggtgctgcaggtacttgatcgcctgaaaatgaaattgcaggagaagggtgacacgtcgcagaatgagaagttatctatgttttatgagacactaaagagtcctctcttcaaccagatactcacacttcagcagtccatcaagcaactgaagggtcaactcaaccatataccctcagattgttcagccaactttgatttttctaggaaaggtttgttagtgttcacagatggttccattactaatggaaatgtccacaggccctctaataactcgactgtatctgggttatttccgtggaccccgaagttgggaaatgaagactttaactcagtcattcaacagatggctcagggccggcaaattgaatatatagatatagaacggccttcaactggaggccttggattcagtgtggtggccctcagaagtcaaaatctcggaaaagttgatatcttcgtgaaggatgtccagccagggagtgtagcagacagggatcaaagattaaaggaaaatgatcaaatattggccattaatcacacgccattggatcagaacatttcccatcagcaagcaattgcattattacaacaaaccactggatctttgagactgattgtggccagggaaccagtccacacaaaaagcagtacttctagcagcctaaatgatacaactctgcctgaaacagtttgttggggccatgttgaagaggttgagctcattaatgatggctctggactaggttttggaatagttggaggaaaaacaagtggcgtggttgtgaggactatagttcctggaggattagcagatcgagatggaagactccagacaggggaccacatcttgaagattggtggcacaaacgtgcagggaatgaccagtgagcaagttgcacaagttctaaggaactgtgggaattcagtcaggatgctcgttgctagagatccagctggtgacatttcagtcaccccccctgcccctgcagccttacctgttgccctgcctactgtagccagcaagggccctggttctgacagttctctttttgaaacttataatgttgagcttgtgagaaaagatgggcagagtcttggaattagaattgttggctatgttggaacatctcatacaggggaagcttcagggatttatgtgaaaagtataatacctggcagtgctgcgtaccacaatggccacattcaagtgaatgacaaaatagttgctgtcgatggcgtgaacattcagggttttgccaaccatgatgttgttgaagtattacgaaatgcagggcaggtggtacacctaaccctagttcgaaggaagacatcctcatctacttctccacttgaaccaccttcagacagaggaactgttgtagaaccactgaaaccaccagctctctttctaactggagcagtggaaactgaaactaatgtggatggtgaagatgaggaaattaaagaaagaattgatactttaaaaaatgacaacatacaagccttagaaaaattggaaaaagtcccagactctccagaaaatgagctgaaatccagatgggaaaacctgttgggtcctgattatgaagtaatggttgctactttggacacacagattgcagatgatgctgagttacagaaatattcaaagctgctgcctattcacactctgaggcttggtgtggaagtggattcctttgatgggcaccattatatttcttcaattgtttctggtggtcctgttgatacattgggtctcctacagccagaagatgagctgcttgaggtcaatggcatgcagctttatggaaaatctcgccgagaagcagtctcctttcttaaagaagtgccacccccttttactttggtttgctgtcggaggttgtttgatgatgaagcttctgtagatgaaccaaggcgcactgaaacctctcttcctgagacagaggttgaccacaatatggatgtcaatactgaagaagatgatgatggggaattagcactgtggtcccctgaagtcaagattgttgaactagtaaaagattgtaaaggtttgggattcagcattttggattaccaggaccctttagatcctacaagatcagtgattgtgatccgctccctggtagcagatggtgtagcagaaagaagtgggggactattacctggagaccgcctggtctcagtcaatgaataccgtttggacaacacctcacttgctgaagctgtggaaatattgaaagctgtgccaccaggcctagtacaccttggcatctgtaagcctttggtggaagataatgaagaagaaagttgttatattttacattcaagcagtaatgaagacaagactgaattttcaggaacaattcatgatataaattcatctttaatactcgaagcacccaagggatttagagatgaaccatattttaaagaagaacttgtggatgaaccatttctagatctgggaaagtctttccattcccaacaaaaagagatagagcaaagcaaggaggcctgggagatgcatgaatttctgactcctagattgcaggaaatggatgaagaaagagaaatgcttgttgatgaagaatatgagttatatcaagatccctcaccatccatggagttgtatcccttgtcgcacattcaagaggccactcctgtgccctctgtgaatgaacttcactttggtacacagtggttgcatgataatgaaccatccgagtctcaagaggcaagaaccgggaggactgtctattcccaggaggcacagccgtatggctattgccctgaaaatgtgatgaaagaaaattttgtcatggagtccctaccatctgtaccatcaactgaaggaaacagtcaacaaggcagatttgacgacctggaaaatcttaattcattagcaaaaactagtctggatttaggcatgatcccgaatgatgtccaaggtcctagcttgctcattgaccttcctgttgtggctcaaaggagggagcaagaagatttgcctttatatcaacaccaagcgacacgagttatttccaaggcctcagcatacacaggaatgttgtcttctagatatgccactgatacatgtgagttacctgagagagaagaaggcgaaggagaagaaactccaaattttagccactggggtccaccgagaattgttgagatttttagagaacccaatgtgtctcttgggatcagtattgttggtggacaaactgttataaaacgtctaaagaatggagaggagcttaaaggtatattcatcaaacaagttttagaagacagtccagcagggaagacgaacgcacttaaaactggagataaaatacttgaggtgtctggagtagatttgcagaatgcctcacacagcgaagcagttgaggccattaagaatgcaggaaaccctgtggtgttcattgttcagagtttgtcatccactccacgagtcattcctaacgtacataacaaggccaacaaaatcaccggtaaccagaaccaggacacccaagaaaagaaagaaaagaggcaaggaactgctccaccgccaatgaaacttcctcctccttataaagctctgactgatgacagtgatgaaaatgaagaagaagatgcctttaccgaccaaaaaatcagacaaagatatgcagatctgcctggagaactgcacattattgaacttgaaaaagataagaatggacttggactcagccttgctggtaataaagaccgatcacgcatgagcatatttgtggtgggaattaacccggaaggacctgctgccgcagatggacgaatgcgtattggagatgaactcttagagataaacaatcagattctgtatggaagaagtcaccaaaatgcatctgccattattaagactgccccatcaaaggtcaagctggttttcatcagaaacgaggatgcagtcaatcagatggccgttactccctttccagtgccatcaagttctccatcttctattgaggatcagagcggcaccgaacctattagtagtgaggaagatggcagcctcgaagttggtattaaacaattgcctgaaagtgaaagcttcaaactggctgtcagccagatgaaacagcaaaaatatccaacaaaagtctccttcagttcacaagagataccattagcaccagcttcatcataccattcaacagatgcagacttcacaggctatggtggtttccaggctcctctgtcagtggaccccgcaacgtgtcccattgtccctggacaggaaatgattatagaaatatccaagggacgttcagggcttggtctcagcattgtgggaggaaaagacacacccttgttctggaggctgggaagtccaagagcatggagccagcatctggtgagggccttcatgctgcatcatcctgtgacagaagttgaagggcaaaatgctatagttatccatgaagtctatgaagaaggggcagcagccagagatggaagactttgggctggtgaccagatattagaggttaatggggttgacctgaggaactccagccacgaagaagccatcacagccctgaggcagaccccccagaaggtgcggctggtggtgtatagagatgaggcacactaccgggatgaggagaacttggagattttccctgtggatctgcagaagaaagctggccggggcctgggcctgagcatcgttgggaaacggtaa

SEQ ID NO: 7282 - DNA, 339 bp, Homo sapiens
  SIMILAR (61)..(309): 451254mologous to Homo sapiens PDZ domain protein 3' variant 4,accession number AB044807,Smith-Waterman Score=159.
atgcccattgaagcattttggatttcagatttttcattttggttttgggatgctcagctggatcagagcggcaccgaacctattagtagtgaggaagatggcagcgtcgaagttggtattaaacaattgcctgaaagtgaaagcttcaaactggttttggaaaatatatcttgcgactgccacagattgcatatcctagaaagtgagcttattctggctgaagggaaagaatgtttcagcaagagtggaaattgtaatgggccactcatgaataaaccctacatgggacctgagacccctggcatgaagagtactagcagtttatttaccagagattga

SEQ ID NO: 7283 - DNA, 444 bp, Homo sapiens
  SIMILAR (214)..(276): 951254mologous to Homo sapiens Human secreted protein, SEQ ID NO: 5963,accession number G01882,Smith-Waterman Score=106.
atgtgcagggaagaaccagcagatcggtctggctggagcatatcatacgaggggagcgtaatgggcaaggaagccaaagaggaggtaggagctagatcgttcatcacgcagggcctcgaaggcaagggcaggataaaaccaaaggataacaggggtagatttgttgttgttgagaaactactttttacatttgctctgccgccatgtgatccatcggaatattttcgacttgctctttcaaaactgcagagttgtgatctctttgatgagtttgacaaaagaggggagcagagtccgagcttatctaaatatgaatgtggccacaaagctgtggaaggtgacaaagcaaaacaccttgccctggctctgcattgtcacctagagagcaagaggtctatagaaacatcatgtcacatgaaacgattctctgctttttggttctga

SEQ ID NO: 7284 - DNA, 940 bp, Homo sapiens
  SIMILAR (30)..(119): 401254mologous to Danio rerio Zg11,accession number U49415,Smith-Waterman Score=66.
gcagcgcggaggaattccaattatagaaatacatcggagacacaacaaatgtggccattacaggtttcataatattacactgacttggctgttacttgatcttaggaaacagcacagtttaagatattgtgaattctgacttatactttattaaatgctataaatctaaatagatcctgttggatgtgatgggtctagtccagtttatttaagttcatgtttcactgtttgcactttgcattgaacaatgggtttattcgctgatgtaaacggttcgagtgaagaattaatgcagtaagtatgactaccacatacacacttgcctctccccatctccagaagaggggagcagagtccgagcttatctaaatatgaatgtggccacaaagctgtggaaggtgaccaaggcttaaccacctttgccctgggctcttgcattgtcacctaagagagcaagagggtctatagaaacatcatgtcacatgaaacgattctctgctttttggttctgaacttgaagtccctaaactgcaaaatctaagagttgggtggttattaaaatgcttttaaaaagttaactgtggcaccaattctaatgtaatccaacttgtgactgtttttttttgttttgttttgtttttgtgtgtgtgtgtgtgtggccctcggcaaaagttggaaacaaacatggtattgaaatacatattggaaataaaaatggtttgagccgccagtaatattctcccagaatgtacttatcttacctcggcatgtactgtagtcactcagtatttgtatatgttgctagaatttagattgtaaaatagtgaaattttaatgtgttcatttgtttttaatgtatatatgtcttgctcagattatttggtttaaatacacccccccttgaggtttgtagcttttccttatactaaaaaaaaaaaaa

SEQ ID NO: 7285 - DNA, 461 bp, Homo sapiens; identical to SEQ ID NO: 5300
  SIMILAR (74)..(298): 601254mologous to Human endogenous retrovirus K pol protein,accession number Y17832,Smith-Waterman Score=234.
  misc_feature (1)...(461): n = a,t,c or g

SEQ ID NO: 7286 - DNA, 717 bp, Homo sapiens; identical to SEQ ID NO: 5297
  SIMILAR (1)..(192): 841254mologous to Homo sapiens reverse transcriptase,accession number AF015998,Smith-Waterman Score=292.

SEQ ID NO: 7287 - DNA, 1413 bp, Homo sapiens
  SIMILAR (256)..(789): 591254mologous to Homo sapiens Gag-Pro-Pol protein,accession number AF164614,Smith-Waterman Score=570.
atgcaggatgatgccatagagcagcttagaggagtatgcattagagcttgggaaaaaatcacttcaggtggagaacaatacctttcctttagtgctataaaacagggaccaagagaaccatacattaattttatagctcggtttcaggagtctcttcgaaagatgatcgcagatttggctgctcaggatatagtgctgcagttattagctttcgacaatgctaatcccaattgccaggctgctctgcgacctatcagagggaaagcacatttagttgattatatcaaggcctgtgatggcatcagagccagtagtgccacagtagatttatgctgcacaaaagctgtgagccttctacctggggaacccctgcaaaaggtcccaacaggagtctgtggacccttgccagcagggacaataggattacttttaggaaggtctagtttaggtttaaaagggatacaaatacatacaggagtcattgattcaaattacaatggggaaattcaaattgttatatctacttctgtttcctggaaagcagagccgggagagcgcatagcacagctcctgatcgtgccatatgtgggaatgggaaaaagtgaaattaaacgaacaggaggatttggaagcacaaataaacaaggcaaagcagcttattgggtaaatcaaattactgataaacatcctacctgtgaaacaaccattcagggaaagaaatttaaaggtttggtagatacaggagtggacatttcgatcatttctctgcagcactggctgtccacgtggcgaattcaacccactcaatttaacataggacctttgactgaagggaatcaaatggctgatcacctagttgctaatgcaatatctaatgctagacactttcacaatttaacccatgttaatgcctctggtctcaaacacagatacagcattacctggaaagaagctaaaaatattatccagcgatgcccaacttgccaaatggtacattcctcatcttttagaggaggagttaatcctcgaggactggaacctaattcactttggcaaatggatgtcacacatattcccttgtttgggagactagcttatgtacataaaagaagaagaataagaggaggaggaggaggagaaggagaaggagaaggagaaggagaaggagaagaagaagaagaagaagaagaagaagaagaagaagaagaagaagaagaagaagaagaagaagaagaacaagaacaagaacaagaagaacaagaacaagaagaacaagaacaagaagaacaagaacaagaagaaagaagaagaaaagacactgaagagctttcatactctctccccctcaacagaacccaaccatgctggcaccctgattttggacttccagccaccagaactgtgagaagataa

SEQ ID NO: 7288 - DNA, 1743 bp, Homo sapiens
  SIMILAR (94)..(384): 631254mologous to Homo sapiens Gag-Pro-Pol-Env protein,accession number AF164611,Smith-Waterman Score=332.
atgggacaagtgtgggctctggttcattccaccttggaaacttttcacactgatgaggaggaaggagagtataatgaagtaacagagcaggtttgtttgccagctaaagccggtagtgctgcagtagatttatgctgcacaaaagctgtgagccttctgcctggggaatccccgcaaaaggtcccaacaggagccggtggacccttgccagcggggatgacaggattacttctaggcaggtctagtttaaatataaaagcggtacaagtacaaacaggagtcactgattctgattacaatggggaaattcaaattgttacatctacttctgttccctggaaagcaaagcctggagaccatatagcacagctcctaattgtgccgaaaaaatttgcaaggtttgaaggaaccgcttcaagtggaaagacaaagttcctgccaaggtttaggatatcatttttgatggcggccattgttaagcctccagaacctatacctttaaaatggttaacagataagccaatttggacagaacaatggccgctgagtaaagagaaactggaggctttagaagacttaattactcaacaattaaaaaagggacacatagctccaacattttccccttggaattctccagttttcataattaagaaaaaatcagctgagcaggactgtgaatggtttgtatttacaattcttgcagtaaacaatctgcagcttaagcctgctaaacgttttcactggaaagtgttgccacaaggaccaaatcaacagccaatttggataccatcaagatacctgaaaccttatcataagccagatgccaaggaagagattccggaaggatcccaaggattcccagttgcagccatgtcaagactgacgctgaggaggaccccaactgtcacgagcaacacccatcgaacacagccacccacctggggacagatcgagaagctgccacagatggcggaagaaaacctgaggaaagctggacaaccagtcacaataagtaattggattctccctagaataactaaatttaaaccaattgaaggtgctgagaatgtttttacagatgggtctagcaacggtaaagcttcttattctggctcaaaaggacctttgactgaagggaatcaaatggctgatcgccttgttgctaaagtaatatctaatgctagacactttcacaatttaacccatgttaatgcctctggtctcaaacgcagatacagcattacctggaaagaagctaaagctattatccagcgatgcccaacttgccaagtgatgctatcagcagctgaacagcatctacagaaatcagctgcaaagacagaagcagaaaaactggtttggtggagagacccaataacaaaaagtcgggaaataggtaaaataataacttggggtagaggttatgcttgtgtttctccaggaccaaatcaacagccgatttggataccatcaaaacacctgaaaccttatcataagccagatgctggggaaaagattccaggagaatcccgaggacccccggttgcagccatgtcaagactgacgctgaggaggatgccaactgtcatgagcaacacccatcgaacacagccacccacctggggacagatcaagaagctgtcacagatggcggaagaaaacctgaggaaagcgggacaaccagtcacaatgaataatttaatgatagcggtgatcaccactgccttcaacaagggctga

SEQ ID NO: 7289 - DNA, 1242 bp, Homo sapiens
  SIMILAR (238)..(780): 581254mologous to Human endogenous retrovirus K pol protein,accession number Y17833,Smith-Waterman Score=544.
atgggacaagtgtgggttctggttcattccaccttggaaccttttcacactaataatgaggaggaagcaaagtataacgaagtaacagaagaggtgacagagcaggtttgtttgccagctaaagctaacgcagcaaaggagaaagaggttcatccctacccttctgcacctcttaattattttgaagaaaaggagtggcctgaccctccagatctttcttttctggaggacactggaggagatcctagtctcactagccattggcaattaacaaaggaggctgaggcagagttacagctgattgaaaagcaagtccataaagctcaaataaatagaatagatccagagaagattccagatttgctaattttttcaactcagcattctactggtgttattgttcaagagcaaggtcttgtagagtggctttttcttccacatactaattcacggactctaactccttatgtggatcaaatcgctactatgataggaaatgggagaactcagattgttaaattacatggatattatcctggaaaaattattgtccctctcatgaaggcacaaatacagcaagcttttataaatagtcttacttggcaaacccatttagctgactttgtggttattctcgataatcattttcctaaaatgaaactgtttcaatttttgaaattaactaattggattctccctaaaataactaaatttaaaccaattaaaggtgctgaaaatgtcttcacagatgggtctagtaatggtaaagcttcttattctgaattgaaaggacttttaactgaagggaatcaagtggctgaacacctagttgctactgcaatatctaatgctagacactttcacaatttaacccatgttaatgccgctggtctcaaacgcagatacagcattacctggaaagaagctaaagctattatccagcaatgtccaacttgccaaatgttgtattcctcatcttttacaggaccaaatcaacagccaatttgggtgccatcaagacatctaaagccttatcatgagccagatgccaaagaagagactctgggaggaacccgagaaccccccagttgcagccatgtcaagactgatgctgaggaggaccccaactgtcacaagcaacacctattgaacacagccaactacctgcggacagatcaagaagctgtcacagatagcagaagaaaacctgaggaaagcaggacaaccagtcaccatgagtaa

SEQ ID NO: 7290 - DNA, 780 bp, Homo sapiens
  SIMILAR (416)..(469): 551254mologous to Homo sapiens Gag-Pro-Pol protein,accession number AF164613,Smith-Waterman Score=53.
atgccacagaacagcttagaggagtgtgcattagagcttgggaaaaaatcacttcaggaaaatgtcaataattttcctaaaacaaagctgtttcagtttttgaaattaactaattggattctccctaaaataactaaatttaaaccaattgaaggtgctgagaatgttttcacagatgggtctagtaacggtaaagcttcttattttggattaaaaggtaaagttttccagacgccctatactgcagctcaaaaagtggagctggtagcggtaattgaggtattgactgcttttgatatgcctgttagtatgatttctgattctacatacgtggttcattccacacagttaactgaaaatgctcagttacgacttcatacagatgaacaactgatgactttattttctcaactgcaaacagcagttagaatgttttgcggtgatgggcattccagcttctactacaacaataatgccccaggttatactagccaagctctagctacatttttctctatgtggaatattaaacgcattactggtatcccatacaattctcaaggacaagccatagtggaaagaatgaatctctccctaaaacagcagttgcaaaagcagactgagggagacagagaatatggaaccccacagatgcaactgaatctagcattattaactttaaattttttgagcctgcccaaaggccagatgttatcagcagctgaacagcatctacagaaaccagctgtaaagacagaagcagaacaactgatttggtga

SEQ ID NO: 7291 - DNA, 1307 bp, Homo sapiens
  SIMILAR (697)..(1236): 561254mologous to Homo sapiens Gag-Pro-Pol protein,accession number AF164614,Smith-Waterman Score=539.
atgggtatttcctgcccagggtcctcaaaaatgcttaatagtcgagcgctccctgtgctgaaactgacccaaggagctctgcgggattgtaaagaacgagcaaactacacaaacttcaacatttacaaggctgtagagagccagggaaagtttgtatgtgttctctataatggacagcaaagccctgaatatgtcatgataccatgtacatctgtgtctccaacaggccaggaagtccctgaggacagaggaatgagaatggtgatgaagaataaacccaataagcctagcaaaatgcagagtctgaaatccagtaagcatctcacaaattctgtcattgttattgctgtaggaattttcttctcggtcactttgcaagccagggacccccagctggatgatgccatagaacagcttagaggagtgtgcattagagcttgggaaaaaatcacttcaggtggagaacaatacccttcctttagtgctataaaacagggaccaaaagaaccatacattgattttatagctcggttacaggagtctcttaaaaagatgattgcagattcggctgctcaggatatagtgttgcagttattagctttcgacaatgctaatcccgattgccaggctgctctgcgacctatcagagggaaagcacatttagttgattgtatcaaggcctgtgatgatattggagatgggtctagtaatggtaaagcttcttattttggctcaaaaagtaaagttttccagacatcctatacttcagctcaaaaagcagagcttgtagcggtaattgaggtattgactgcttttgatatgcctattaatgtgatttctgattcttcatacatggtttattccacacagttaattgaaaatgctcagttacgatttcatacagatgaacaactgatgactttatttacccaattgcaaacagcatttaggagtacaatgcatcctttttacatcactcacattagggctcatacacctcttccaggacctttgactgaagggaatcaaatggccgatcgcctagttgctaatgcaatatctaatgctagacactttcacaatttaacccatgttaatgcctctggtctcaaacgcagatacaacattacctggaaagaagctaaagctattatccagcgatgcccaacttgccaaatggtacattcctcatcttttacaggaggagttaatcctcgaggattggaacctaattctcaagctctagctaaatttttctctatacggaatattaaacacattactgatatcccatataattctgaagg

SEQ ID NO: 7292 - DNA, 2043 bp, Homo sapiens
  SIMILAR (325)..(900): 831254mologous to Homo sapiens putative p150,accession number U93572,Smith-Waterman Score=792.
atggaggaacagcaagtgattggggaaggaaatccacttaggagagggtgtgctatagaagctggaggagaaattggtgttacaaaagttcaagtaaccggggaagagagaattttcctgagaaaggaaaaaggtggcaaagataggtctagtaatggtaaagcatcttattctggctggaaaagtaaggtttttcagatgccctatacttcagctcaaaaagcggagcttgtagctgtaattgaggtattgactgcttttaatatgcctattaatgtgatttctgattcttcatacgtggttcatttcacacagttaattgaaaatgctcagttacgatttcatacagatgaacaacttatgactttatttacccaattgcaaacagcagttagaaaactagaaaagcaagagcaaacacattcaaaagctagcagaagacaagaaataactaaaatcagagcagaactgaaggaaatagagacacaaaaaacccttcaaaaaattaatgaatccaggagctggttttttgaaaggatcaacaaaatagatagactgctagcaagactaataaagaaaaagagagagaagaatctcatagatgcaataaaaaatgataaaggggatatcaccactgatcccacagaaatacaaactaccatcagagaatactacaaacacctctacacaaataaactagaaaatctagaagaaatggataaattcctcgacacctacactctcccaagactaaaccaagaagaagttgaatttctgaataaaccaataacaggatctgaaattgtggcaataatcaatagtttaccaaccaaaaagagtccaggaccagatggattcacagccaaattctaccagagaaaaggcagaagagcaatacccaagaggtatctgtgggatagtggtgagaggccagaggctaagaggtggtattatagcttccagtttaaagaattagtccaggaagatgtgaagcgctttacactgcaggattgcttggtagccaccaaggggtacaatgataaacaacgtaagaaagcccagttaagcacagccataaagttcaattctttgcaattagttctctttgaaaaaaattttcatgcaaagagaattgtgctggaaaaaagctggtctcggcaagtggcgtccatcttgggggctcagatccaggtcgaagggtcaccggagcagcggttggagaacgtggaactagctggaggacacctgaatactcttaaagcaatccccatgcactggccgtccatgtggccaattcaacccactcaatttaacatagttgaagttggtaaagcccctgaagtatatcaaagtagttatattttgcattgtaaaggacccgatggacaacctgcgactattcaaccaattataacttctgtacctataaatttatgtgggagagatttattacaacaatggggagcacaagttctaattgcagaacaattatatagccctcaaagtcgacatatgatgcatgaaatggggcatgtccctgataggtctagtaatggtaaagcatcttattctggctggaaaagtaaggtttttcagatgccctatacttcagctcaaaaagcggagcttgtagctgtaattgaggtattgactgcttttaatatgcctattaatgtgatttctgattcttcatacgtggttcatttcacacagttaattgaaaatgctcagttacgatttcatacagatgaacaacttatgactttatttacccaattgcaaacagcagttagaagccaaaatcaagagtcgatttggataccatcaagacttctgaaaccttatcataagccagatgccaaggaagaggctctgggagtatcccaaggatcccccagttgcagccatgttgagattgacaaccccaactgtcatgagcaacacccatcgaacacagccacccacctagggacggatcaagaagctgtcacagatggcggaagaaaacctgaggaaagcaggacaaccactcactatgagtaa

SEQ ID NO: 7293 - DNA, 1900 bp, Homo sapiens
  SIMILAR (920)..(1444): 611254mologous to Homo sapiens Gag-Pro-Pol protein,accession number AF164614,Smith-Waterman Score=575.
atggcaggcgcccctcccccagcctggctgccacattgcagttcgatctcagactgctgtgctcgcaatgagcgaggctctgtgggtgtggcaccctctaagccagccaggagtgctgcagtagatttatgctgcacaaaagctgtgagccttctgcctggggaacccccacaaaaggtcccagcaagagtctgtggacccttgccagcagggacagtaggattacttttaggaaggtctagtttaagtttaaaagaggtacagatacatacaggagtcattgattcagattataaagtggaaattcagattgttgtatctacttctgttccctggaaagcagagccaggagagcgcatagcacagctcctggttgtgccctatgtgggaacgggaaaaagtgaaattaaacaaacagaaggatttggaagcacaaataaacaaggcaaagcagcttactgggtaaatcaaattactgataaacatcttacctgtgaaataactattcagggaaagaaatttaaaggtttggtagatacaggagcagacgtttcaatcatttctctgcagcactggccatccatgtggccaattcaatccactcaatttaacatagttggagttgatgggtctagtaatggtaaagcttcttattttggatcaaaatgtaaagtttttcagatgccctatacttcagctcaaaaagtggagcttgtagctataattgaggtattgactacttttgatatgcctattaatgtgatttctgattcttcatatgtggttcattccacacagttaattgaaaatgctcagttacaatttcatacagatgaacaactgatgactttatttacccaattgcaaacagcagttaggagtagaatgcatcctttttacatcactcacattagggctcgctcatacacctcttccaggacctttgactgaagggaatcaaatggccgattgcctagttgctactgcagtatctaatgctagacactttcacaatttaacccatgttaatgcctctggtctcaaatgcagatacagcaatacctggaaagcagctaaagctattatccagcgacgcccaacttgccaaatggtgcattcctcatcttttacaggaggagttaatcctcaaggattggaacctaattctctttggcaaatggatgtcacacatgttccctcgtttgggagactagcttatgtacatgtatgtgtggacaccttttctcactttgtctgggctacatgccaatcaggagagtcttctgcctgtgttaaacatcatcttttgcagggttttgtggtgatgggcattccagcttctattaaaacagataatgtcccaggctatactagccaagctctggctacatttttctctatgttgaatattaaacgcattactgatatcccatacaattctcaagatgtggaggctgatgcaaatgcagatgtaggggtagatgtggatgcagatgcagatgtagatgcagaagaagaggtattcactgatgcagatgcggatgcagaggtagatgtagatgaggatgcagatgcagagagactcagatgcaatgcagatgaagattcagatttagatttagatgttgatgctgaaatggatgcagatgtagatacaaatttagatgtagatgcagctgtagatgtggatgtggatgcagatgcagacgtagatgcagatacagatgtagatgtagacacaggtctaaatttagaggcagatttagatttagatgtggatgcggatgtggacacggatgcagatgtagacagggatgcggatgtggaagtggctgtggatgcagatgccactgtgaatgcagatgtagattatgtagatgtagatacagattcagactga

SEQ ID NO: 7294 - DNA, 565 bp, Homo sapiens
  SIMILAR (23)..(565): 1001254mologous to Homo sapiens vault protein; VPARP,accession number AF158255,Smith-Waterman Score=964.
gtccagggcggaggaattcgcccgcgctcacagtcctgcttccttgtcttttgcctcatatcgtcaggtagctagtttcggttcagctgctcctcccagacagtttgatgcatctcaattcagccaaggccctgtgcctggcacttgtgctgactggatcccacagtcggcgtcttgtcccacaggacctccccagaacccaccttctgcaccctattgtggcattgttttttcagggagctcattaagctctgcacagtctgctccactgcaacatcctggaggctttactaccaggccttctgctggcaccttccctgagctggattctccccagcttcatttctctcttcctacagaccctgatcccatcagaggttttgggtcttatcatccctctgcttactctccttttcattttcaaccttccgcagcctctttgactgccaaccttaggctgccaatggcctctgctttacctgaggctctttgcagtcagtcccggactaccccagtagatctctgtcttctagaagaatcagtaggcagtctcgaaggaagtcga

SEQ ID NO: 7295 - DNA, 999 bp, Homo sapiens
  SIMILAR (481)..(825): 611254mologous to Homo sapiens vault protein; VPARP,accession number AF158255,Smith-Waterman Score=311.
atgaagtgttatacacggatagaaaaatacagatatgagatcatcaggcgagacttacttttaaatcaatgtatagaaaggcgaattaaaattaaaatgatgatatcaataaaacagaactgcaggaagcggcggcggaatatcagacaaacgcagacaacagcaaattccataccttcagagttacaccagctcatctgcagtaggagtagaaatatcaaagctctcagtctaccaccttgtgctccagagatgtggcccaagcacatctttggacatgaactggggcaacccaaagcagagctggatttctgggagtttctccctggctttttctttgacagtgaccttggacagtctggtgcagaacttctttctattgatgtctaccagaaatcagtgaaatgtagaactaaactcagaacgctaaaaatactaggctgtctgtgtggacaccagcatcctgaccccatggcacctatagcatccagcactgacaccatctcaggacctccccagaacccctcttctgcaccctactgtggcattgctctttcagggagctcattgagctccacacagtctgctccactgcaacctgttggaggccgtacgaccaggccttctactggcacctaccctgagctggattctccccagcttcatttctctcttcctacagaccctgatcccatcagagtgggaatgcgtgggaaacacacatcgggaacactaaataaagcggaaacatcggaagactttcagcaaagtactcctacacaagacaacttaaggactctgacacgtagctcccacccagaagcaaggatagacaataatatggggcaagcctttcagcatgagagggtacagagagctatgacgatgggatgggcatctgtacgcatacagtcacttgcagcagcgagaggagtggaatgttacgcagacacacaagatacaaagcgggaaatgtcccacctcgaaaggaggaattga

SEQ ID NO: 7296 - DNA, 372 bp, Homo sapiens
  SIMILAR (188)..(42): 391254mologous to Allochromatium vinosum sulfur globule protein Cv3 precursor,accession number AF017118,Smith-Waterman Score=76.
gtaaatgcttttactaaaagctgccaacatttctatcagtagtaaccgtaaggaggccgctggttgtaaccataatgtccatattgctggggatagtaaggttcttgtctgtgttgcgggtagttgttaccccaggatcgtccatgccactgattggatcgattgtcacttggccacccccatctgttgtccctgcctctgaactgtctgttgtcttgcaaccccaaaggtttgaggcagctgtactgcttaatgtttaggttgtttaaatccgccaagggctatgtctatccagctcaggccgaaccccgccggcgagacactgagaagcccaggagaggtggcctctggtccactacaccgtggaactcc

SEQ ID NO: 7297 - DNA, 597 bp, Homo sapiens
  SIMILAR (277)..(429): 881254mologous to Homo sapiens Human secreted protein, SEQ ID NO: 5731,accession number G01650,Smith-Waterman Score=244.
atggggttttaccatgttgggcaggttggtctcgaacgcctgacctcagaaggctctgtaggcagtgatcgtggcagtattgtggacactgaggaagagaaagaagaggagtcgtcttcaccacggggtgaagtacggacgcggtacttcacccgtggtgaagacttcgacgtaggcgctgtgggcaaggaaaaggcctggcctgctgcctcttctcttgcagcaaaatccgctgctgtgaaggagctgctgcctcaaatctttgggaatttcagaatgactgacactgccaaagctgttccaaattttgaagagatgtttgctagtagattcacagaagatgacgaggagtatcaggaatacttgaaacgccctcctgagtcctctccaattgttgaggaatggaatagcagagctggtgggaaccaaagaaacagagacaatcggttgcaagatagcagacagttcagaggcagggacggcagatgggggtggccaagtgacaatcgatccaatcagtggcgtggacaatcctgcggtaacaattacccgcaacacagacaagaaccttactatcccgaccaatatggacattaa

SEQ ID NO: 7298 - DNA, 895 bp, Homo sapiens
  SIMILAR (680)..(489): 751254mologous to Homo sapiens Human secreted protein, SEQ ID NO: 5731,accession number G01650,Smith-Waterman Score=214.
ctgtgtaaaacaaagaattcctagaggtcaaataatataccaaacttaaagcactattaagtcatgaaacaaagaagattctgaggtagaagtcaagcaataataatcccacagtttcaggtatcccccagcaacccatcgcatttccgcaaggtaaggacctattttttttaaagtctcaacttcccaaaaaatcaataatccattctgtaaaattcagatgtaaaacctatgacccaacagaagacaccccaaacttttcctcatggtaacagagtaaatgcttttactaaaagctgcccaacatttctatcagtagtaaccgtaaggaggccgctggttgtaacccataaatgtccaaaattgctggggatagtaaggttcttgtctgtgttgcggggtagttgttaccccagggatcgtccatgccactggattgggatcgattgtcaacttggccacccccatcctgttgtccctgcctctgaactgtctgttgtcttgcaaccgattgcctctgtttctttggttcccacccagctctgctattccattcctcaacaattggaggagactcaggaggggcgtttcaggtattcctgatactccttgtcattttctgtgaatctactagcaaacatctcttcaaactttggagcagcttcggcagtgtcagtcattctgaaaatcccaaaggtttgaggcagctgtactgcttaatgtttaggttgtttaaatccgccaagggctatgtcaatccagctcaggccgaaccccgccggcgagacactgagaagcccaggagaggtggcctctggtccactaaaacgtgaaactccagaccactccagttctccaatgtaaccgagcgcctgtcctctaaaatccaaatggc

SEQ ID NO: 7299 - DNA, 1239 bp, Homo sapiens
  SIMILAR (134)..(259): 801254mologous to Homo sapiens Human secreted protein HCHPF68, SEQ ID NO:163,accession number Y86248,Smith-Waterman Score =182.
atgaatcagtgtgtgactgcaatgagccacctgatttcttcaaatggaagatacttatattgttaccaagctattgcttttgctaagattcgcatggctctacctggacctcgtgtttgtcctgatatagtacagaaaaaaaagaagaaagaagaagaggaagaagaaggagaaggagaaggagaaggagaagaagaagaagaagaagaagaagaagaagaagaagaagaagaagaagaagaagaagaagaagaagaaaagaaaaaaagaaatggccctgcaaagctgttctttatggtacttgtatgcctgagagaccaaaatgctgattccgtttaccttcctggaaactgtaaaactaaccaatcagaggatcaggtcattgagaagaagaaacttgcccaacctaagatatcttttaatccaggggtccccaatccccaggccagagactgctaccgggatctgtggcctgcgaggaaccaagcagcacagcaggaggtgagcggagggcaaatgagactgtctagttgcaagaaaacaagctcatggctcccactgattctacattatgccgctctcctcttccgggcgcgctgcttgcctgcgtgcgccgggacgcgcggggccgagcgtctgaagccgcccgtacgcgacgcgctttctaggagccccgccctcaggtgcgctctgcaggaggcgggtcgcgacttcggcgctgccagctctgcctgcgccaactcagatatcagtgatcttattagctttttcacaagccagaacataatggtgacgatgattaatgacagtgactatgtatccgtggctccccatagtgcggctttaaatgtgatgcattcagaaaagatcaaagcttatactcaacttaaactttcaggtcttttgccatctgcatattggattggacaagctgttgttgatatccccttattttttatcattcttattttgatgctaggaagcttattggcatttcattatggattatatttttatactgtaaagttccttgctgtgctgctgaacatattgttggtgctatgggaaaatgaattgcagattgactttcaagctacaatccatttgccagctgtggactccgcacgcctatgcagagaaatgaattgtgctaagcatctctggcttccttgtgaaaaaggtgatgccgttctccatcagggtgctgtgtacccactatgtgtgagcggtacagaatga

SEQ ID NO: 7300 - DNA, 2951 bp, Homo sapiens
  SIMILAR (343)..(1371): 881254mologous to Homo sapiens 19-SEP-1995 Human mitogen- activated protein kinase kinase 6 cDNA,accession number T43204_cd1,Smith-Waterman Score=1471.
  misc_feature (1)...(2951): n = a,t,c or g
ggcttctggttcggcccacctctgaaggttccagaatcgatagtgaattcgtggttccaagtttggagcttttagctgccagccctggcccatcatcgtagctgcagcacagccttccctaacgttgcaactgggggaaaaatcactttccagtctgttttgcaaggtgtgcatttccatcttgattccctgaaagtccatctgctgcatcggtcaagagaaactccacttgcatgaagattgcacgcctgcagcttgcatctttgttgcaaaactagctacagaagagaagcaaggcaaagtcttttgtgctcccctccccccatcaaaggaaaggggaaaatgtctcagtcgaaaggcaagaagcgagaccctgggccttaaaattccaaaagcaaggcatttgaacaaccttcaggaccagtttccacaccacctcgaggatttaggactccaagggttggcatttctattgggaaattcaggaacttttgagggttgaagggcagattgaccggggagcctattaatgggaactggggacggaggtgcgtacggggtgggtnggagaagatgcggcacgtgcccagcgggcagatcatggcagtgaagcggatccgagccacagtaaatagccaggaacagaaacggctactgatggatttggatatttccatgaggacggtggactgtccattcactgtcaccttttatggcgcactgtttcgggagggtgatgtgtggatctgcatggagctcatggatacatcactagataaattctacaaacaagttattgataaaggccagacaattccagaggacatcttagggaaaatagcagtttctattgtaaaagcattagaacatttacatagtaagctgtctgtcattcacagagacgtcaagccttctaatgtactcatcaatgctctcggtcaagtgaagatgtgcgattttggaatcagtggctacttggtggactctgttgctaaaacaattgatgcaggttgcaaaccatacatggcccctgaaagaataaacccagagctcaaccagaagggatacagtgtgaagtctgacatttggagtctgggcatcacgatgattgagttggccatccttcgatttccctatgattcatggggaactccatttcagcagctcaaacaggtggtagaggagccatcgccacaactcccagcagacaagttctctgcagagtttgttgactttacctcacagtgcttaaagaagaattccaaagaacggcctacatacccagagctaatgcaacatccatttttcaccctacatgaatccaaaggaacagatgtggcatcttttgtaaaactgattcttggagactaaaaagcagtggacttaatcggttgaccctacttgtggattggtgggtttcggggtgaagcaagttcactacagcatcaatagaaagtcatctttgagataatttaaccctgcctctcagagggttttctctcccaattttctttttactccccctcttaagggggccttggaatctatagtatagaatgaactgtctagatggatgaattatgataaaggcttaggacttccaaaggtgattaaatatttaatgatgtgtcatatgagtcctcaagcttctcagacttctcttattctttacaaaatgaatgcattggccctgacaaaaaggtgctacggtagtgatgaaattataagtagatttgtagtttgtcccatttattattttaatatttatgtttaagtgcttggttgaaaagattccattttatacaagaagggagattcaaaaaaaaaatataaggttgggttagcaatatttatagggcttttattttttaagttcaattgtgtctgtggtccagaagaaattatttaatatgcatctttgagaatattataaaaatatcaaaaaggagctcttcttgtgaaatgtctgttccagctgttgtgactgctgccatttttggaaacatctgcccaatcctgggtgatcaccacatcttttaggggaagtgacaagatgctctggtcatactctttttcccaactttggaaaacataaaaatcactcatataacagctcaaagagtaaaacatttggttcttctgacacttgtggtatagtattagtggaaagtgatttgtaatatgattttatatccacctacctattcatctacctgtgtgtatgtgtgtgtttgtgtgtctatttggcaattcacaagtcctgccaagtggtttctatgagcatctctgtttggtaaggaggacaattgtcagttttgagggggacatgtgttaaatcacagaaaaaaatggtgccttcttctgcgtttgtccctcctgccatgtgtaagttgtaaggattgcctttgtagttaatgtactctttggctttgtttgtttgttttcttcttcagtgaagcagccttactattcatagaagggctagaataggagaaaatgaaaggtagtgagtaattctttgataagatgaggaaataatgggaaaggttgaattaattcctgggcatggactaccagatgaccacaagttgcgttgaggccgcatctttcttcagcagcgtgcaatagctggctcctctataggagatgagcttcattgggagttcctagcaagttgactaaacagcaaaagttctttctcgtgggtaaatatacccacaggttctatgatttgtagctctaggtttcttgatgatcaaggagtgaagtaattgacagggaaaatatagacctatgataaataaccaggaagcattgcttttggacaaggaagaacagagggttttgattttaaaaagaagaaaaaaaaaccttattttttctttcttggcctcaagttcaatatggagaggattgcttccctgaatcctctcttccttccccttttagag

SEQ ID NO: 7301 - DNA, 1803 bp, Homo sapiens
  SIMILAR (394)..(912): 241254mologous to Chironomus thummi histone H1-II-1,accession number L28732,Smith-Waterman Score=89.
atgattaatgacagtgactatgtatccgtggctccccatagtgcggctttaaatgtggtgcattcagaaaaggaaattactgatatagtttttaaaattgagctgtattttcaagcagctttgcttggaatcattgttactgcaatgccaccttactttgccatggaaaatgcagagaatcataagatcaaagcttatactcaacttaaactttcaggtcttttgccatctgcatattggattggacaagctgttgttgatatccccttattttttatcattcttattttgatgctaggaagcttattggcatttcattatggattatatttttatactgtaaagttccttgctgtggaaacttccagaaaagataaatgtagggacagaatgccaactggtgattgtcagaggccagggagagtaaagaatgaggagaaactgcttacaagcctcctcattcgccctcacaccccgacctgggaggtcctcccactgagggtgcttgtagttcgcggagtgtcctcatcaaagactgggaatgcggcagatgctgaattttccaaacggcctgagacacatgacatcttaaagaaaatggactttacgttggtaaagatggtacttgtatgcctgagagaccaaaatgctgattccgtttaccttcctggaaactgtaaaactaaccaatcagaggatcaggtcattgagaagaagaaacttgcccaacctaagatgtcagcaggggcagcagtgtcaaatacatctcccattaccgtgaaggagtcagccaatcctgaccagttggctgcagaaattggaagaaataaatctccgctgaaggagaaaaggatgaagacagggccagtcactgccctcattctttccattgcatcgggaccacgtgctgctggctatgttcacagggcaggctgctggtctgcaagtccagggaccatacttggagtagcaagcccccagggaaggacagactttaataagaagaggatcccctatgaaaattccaacttgagctcctatgttcattcagacattcatacaaataccaactgtgggccaaacactgaagatttccagctatctggtaatgaattgtggattcaatactcagacatccaaggcaggaacagagaagttatcaagtatgaagtggtggcagatgaagtcagaagtgtctttcaaggagggagaccatcaggattaaggatccaaggagaggcaagatctagggagcaagatctggaagttgccatcatgagaggtaaaatccagaggtctggaaacagtgaagtgctcttagagcaacagcatacctcaagagaaaagccactctgggaagcgtccacatttggaaggtgccaacagaggccccgtggagaatctagatgtctacacccacctggcagtaaggaggcagcaccccctttcagccaccagctagttttgcaacaaagatgcaagctgcaggcgtgcaatcttcatgcaagtggagtttctcttgaccgatgcagcagatggactttcagggaatcaagatggaaatgcacaccttgcaaaacagactggaaagtgatttttcccccagttgcaacgttagggaaggctgtgctgcagctacatgatgggccagggctggcagctaaaagctccaaacttggaactgagtatcttagtgcgcagacgtccttcctgcgaagggcgcgaaggccgctgggtaatgtagttctccggcggagtccacggggctctgatttaaggaaacgtggtcgccccggtcgctga

SEQ ID NO: 7302 - DNA, 501 bp, Homo sapiens
  SIMILAR (433)..(498): 1001254mologous to Homo sapiens Secreted protein of clone CJ424_9,accession number W69342,Smith-Waterman Score=121.
atgaccacaagcgaccccaggcccacaccagacaattctctggaaactcagagaggcggtagccacaaagaggcaacaaggttttacggaatcaaggttctacagaatcaaggttcaagacaaaatcgccagaggctcaactgtgacatgggagggtatacagctctggggacagtggcttctgggatcctggatgacacttggtgtcagagtgggcttggcaagtttcttaaattctctgaacctgttaccccaggaccctgggcctcagttttcctatctgagaagaagggcgaagagctgtgcccccggaccacacccgtcggtgatggggcaaaaaccgagggcaagcaggtttggttcctgcccagcaaagggctctttattttgaagtccacagttatccatggatttgtcccctttgcgaatcctggtactctgctggacacgaacggcctgtacgatgaggatgtgtgcacccccgacaacctgcagaagtaa

SEQ ID NO: 7303 - DNA, 3459 bp, Homo sapiens
  SIMILAR (1351)..(2646): 991254mologous to Homo sapiens neutral sphingomyelinase II,accession number AJ250460,Smith-Waterman Score=2288.
atggactgttctgaaaagtggcgggacccactggatgcagtgtgtgtacttcctgccacagaggagcctgtggtgcagggctcagcgctctatctggtagcccaccacgatgactactgcgtatggtacagcctgcagaggaccagccctgaaaagaatgagagagtccgccagatgcgccccgtgtgtgactgccaggctcacctgctctggaaccggcctcggtttggagagatcaatgaccaggacagaactgatcgatacgtccaggctctgaggaccgaaattcccctgactttgaaaggggccaaactgcagagggaggagaaggagggtgacatgccatgccgtgccaacatcctggtcacagagttgtttgacacagagctgatcggggagggggcgctgccctcctatgagcacgcacacaggcatctcgtggagaccagcctcggagagcaggtcatcgtccctcccgttgacgtggagagctgccctggcgcaccctctgtctgtgacattcagctgaaccaggtgtcaccagccgactttacagtcctcagcgatgtgctgcccatgttcagcatagacttcagcaagcaagtcagtagctcagcagcctgccatagcaggcggtttgaacctctgacatctggccgagctcaggtggttctctcgtggtgggacattgaaatggaccctgaggggaagatcaagtgcaccatggcccccttctgggcacactcagacccagaggagatgcagggttttgtaaagaggaggatcgaggatgtggaagagacagaggacacttacccctcccacttggaccctcctagaagagctgtcaccgcagacctgaaaggagatgagcagttcacaggggtgcccggaacaatctccagagctcacctgacagccaccgagcagcccagaacaggtttcatgtcttaccttatcctcaacatcactaatttctttgttgtatttgtttctgttaatgccaattactacttccagcatgtccactcaccactgtgcttcgtttatgaatgtcagcccctggtcccacaggccttggatgtaaagagaacaactctgctgtccccacgcccccagtacatctgctggcttggaatggagggaagctctccttcccgactgccagcccagatgaccaacagcgaccccaggcccacaccagacaattctctgaaaactcacagaggcgccccgatgaccaacagcgaccccaggcccacaccagacaattctctggaaactcagagaggcggtagccacaaagaggcaacaaggttctacggaatcaaggttctacagaatcaaggttcaagctgtctgtccgccctgcactgtgtgtcctgggcccttatctttccatgctactggctggtggaccggctcgctgcctccttcatacccaccacctacgagaagcgccagcgggcagacaacccgtgctgcctgcagctgctctgcactgccctcttcacgcccatctacctggccctcctggtggcctcgctgccctttgcgtttctcggctttctcttctggtccccactgcagtcggcccgccggccctacatctattcacggctggaagacaagggcctggccggtggggcagccctgctcagtgaatggaagggcacggggcctggcaaaagcttctgctttgccactgccaacgtctgcctcctgcccgactcactcgccagggtcaacaacctttttaacacccaagcgcgggccaaggagatcgggcagagaatccgcaatggggccgcccggccccagatcaaaatttacatcgactcccccaccaatacctccatcagcgccgctagcttcagcagcctggtgtcaccacagggcggcgatggggtggcccgggccgtccccgggagcattaagaggacagcctctgtggagtacaagggtgacggtgggcggcaccccggtgacgaggctgccaacggcccagcctctggggaccctgtcgacagcagcagcccggaggatgcctgcatcgtgcgcatcggtggcgaggagggcggccggccacctgaagctgacgaccctgtgcctgggggccaggccaggaacggagctggcgggggcccaaggggccagacgcccaaccataatcagcaggacggggattcagggagcctgggcagcccctcggcctcccgggagtccctggtgaaggggcgagctgggccagacaccagtgccagcggggagccaggtgccaacagcaagctcctgtacaaggcctcggtggtgaagaaggcggctgcacgcaggaggcggcaccccgacgaggccttcgaccatgaggtctccgccttcttccccgccaacctggacttcctgtgcctgcaggaggtgtttgacaagcgagcagccaccaaattgaaagagcagctgcacggctacttcgagtacatcctgtacgacgtcggggtctacggctgccagggctgctgcagcttcaagtgtctcaacagcggcctcctctttgccagccgctaccccatcatggacgtggcctatcactgttaccccaacaagtgtaacgacgatgccctggcctctaagggagctctgtttctcaagagccttattctggacacctcttccgttgacagtctttgcccgccaggactcaaaggcacagcctttcgtgtgattgcttgtttttgcaagagaaacacaaggctctgcggctcccaaggccacgagccaggaatcaatgaggcccagcaaataatcaagtggatcttggtgcaggtgggaagcacacctcaggaccaaagaatcgtcgggtacatcgcctgcacacacctgcatgccccgcaagaggacagcgccatccggtgtgggcagctggacctgcttcaggactggctggctgatttccgaaaatctacctcctcgtccagcgcagccaaccccgaggagctggtggcatttgacgtcgtctgtggagatttcaactttgataactgctcctctgacgacaagctggagcagcaacactccctgttcacccactacagggacccctgccgcctggggcctggtgaggagaagccgtgggccatcggtactctgctggacacgaacggcctgtacgatgaggatgtgtgcacccccgacaacctgcagaaggtcctggagagtgaggagggccgcagggagtacctggcgtttcccaccagcaagagctcgggccagaaggggcggaaggagctgctgaagggcaacggccggcgcatcgactacatgctgcatgcagaggaggggctgtgcccagactggaaggccgaggtggaagaattcagttttatcacccagctgtccggcctgacggaccacctgccagtagccatgcgactgatggtgtcttcgggggaggaggaggcatag

SEQ ID NO: 7304 - DNA, 690 bp, Homo sapiens
  SIMILAR (85)..(687): 931254mologous to synthetic construct chloramphenicol acetyltransferase,accession number A02739,Smith-Waterman Score= 1021.
gctttgcagaattatcagcggtataccggcatacagcatgtgcatcgcataggaatggcggaacgtatgtggtgtgaccggaacagagaacgtcacaccgtcagcagcagcggcgcaaccgcctccccaatccagaccgttcagctggatattacggcctttttaaagaccgtaaagaaaaataagcacaagttttatccggcctttattcacattcttgcccgcctgatgaatgctcatccggagttccgtatggcaatgaaagacggtgagctggtgatatgggatagtgttcacccttgttacaccgttttccatgagcaaactgaaacgttttcatcgctctggagtgaataccacgacgatttccggcagtttctacacatatattcgcaagatgtggcgtgttacggtgaaaacctggcctatttccctaaagggtttattgagaatatgtttttcgtctcagccaatccctgggtgagtttcaccagttttgatttaaacgtggccaatatggacaacttcttcgcccccgttttcaccatgggcaaatattatacgcaaggcgacaaggtgctgatgccgctggcgattcaggttcatcatgccgtttgtgatggcttccatgtcggcagaatgcttaatgaattacaacagtactgcgatgagtggcagggcggggcgtaa

SEQ ID NO: 7305 - DNA, 663 bp, Homo sapiens
ggatttgccgactcggaacccaccatcaaacaggattttcgcctgctggggcaaaccagcgtggcccgcttgctgcaactctctcagggccaggcggtgaagggcaatcagctgttgcccgtctcactggtgaaaagaaaaaccaccctggcgcccaatacgcaaaccgcctctccccgcgcgttggccgattcattaatgcagctggcacgacaggtttcccgactggaaagcgggcatatggcaatgaaagacggtgagctggtgatatgggatagtgttcacccttgttacgccgttttccatgagcaaactgaaacgttttcatcgctgtggagtgaataccacgacgatttccggcagtttctacacatatattcgcaagatgtggcgtgttacggtgaaaacctggcctatttccataaagggtttattgagaatatgtttttcgtctcagccaatccctgggtgagtttcaccagttttgatttaaacgtggccaatatggacaacttattcgcccccgttttcaccatgggcaaatattatacgcaaggcgacaaggtgctgatgccgctggcgattcaggttcatcatgccgtttgtgatggcttccatgtcggcagaatgcttaatgagttacaacagtactgcgatgagtga

SEQ ID NO: 7306 - DNA, 474 bp, Homo sapiens
  SIMILAR (456)..(4): 811254mologous to Plasmid F Protein D,accession number M12987,Smith-Waterman Score=588.
tcaggataattgtttcagcatcgcaaccgcatcagactccggcatcgcaaactgcacccggtgccgggcagccacatccagcgcaaaaaccttcgtgtagacttccgttgaactgatggacttatgtcccatcaggctttgcagaactttcagcggtataccggcatacagcatgtgcatcgcataggaatggcggaacgtatgtggtgtgaccggaacagagaacgtcacaccgtcagcagcagcggcggcaaccgcctccccaatccaggtcctgaccgttctgtccgtcacttcccagatccgcgctttctctgtccttcctgtgcgacggttacgccgctccatgagcttatcgcgaataaatacgttttcaccatgggcaaatattatacgcaaggcgacaaggtgctgatgccgctggcgattcaggttcatcatgccgtttgtgatggcttccatgtcggcagaatg

SEQ ID NO: 7307 - DNA, 441 bp, Homo sapiens
  SIMILAR (263)..(358): 931254mologous to Promoter probe vector pPR9TT Cat,accession number AF187996,Smith-Waterman Score=153.
tcagcggattccggcaaccaccatggcctggcatagtatggcggtcggtatgtgttgggccggaacagagaacgtccccgcggtcagcagcagcgtcggcaaccgctctcccattccaggtcctgaccgttctgtccgtcgactacccagatgtggggtttttgtgtccttcctgtgccacgggtacgccggctccatgagcttttcgggaatatataccggtaagccctggtccaccttttggcgataatgagacgttgatcggcacgtaagaggttccaactttcgccataatgaaataagatcactaccgggcgtattttgtgagttatcgagattttcaggagctaaggaagcatgggcaaatattatacgcaaggcgacaaggtgctgatgccgctggcgattcaggttcatcatgccgtttgtgatggcttccat

SEQ ID NO: 7308 - DNA, 831 bp, Homo sapiens
  SIMILAR (436)..(714): 861254mologous to unidentified cloning vector 29kD protein essential for the replication of mini F plasmid,accession number AB015619,Smith-Waterman Score=399.
atgctgtatgccggtataccgctgaaagttctgcaaagcctgatgggacataagtccatcagttcaacggaagtctacacgaaggtttttgcgctggatgtggctgcccggcaccgggaactgagaatgcagaaaacatacaaagctaaagctacagcctacgatatggcacgttctcaaaataataactcagagaagcttttggtttatagaaaattattacaagtgttgacaggactttataaacggagtaacctcggtgtgcggttgtatgcctgctgtggattgctgctgtgtcctgcttatccacaacattttgcgcacggttatgtggacaaaatacctggttacccaggccgtgccggcacgttaaccgggctgcatccgatgcaatgtgacaatctaaaaacttgtcacacttcacatggatctgtcatggcggaaacagcggttatcaatcacaagaaacgtaaaaatagcccgcgaatcgtccagtcaaacgacctcactgaggcggcatatagtctctcccgggatcaaaaacgtatgctgtatctgttcgttgaccagatcagaaaatctgatggcaccctacaggaacatgacggtatctgcgagatccatgttgctaaatatgctgaaatattcggattgacctctgcggaagccatactgaggtacttcattaagcattctgccgacatggaagccatcacaaacggcatgatgaacctgaatcgccagcggcatcagcaccttgtcgccttgcgtataatatttgcccatggtgaaaacgggggcgaagaagttgtccatattggccacgtttaa

SEQ ID NO: 7309 - DNA, 612 bp, Homo sapiens
  SIMILAR (487)..(612): 971254mologous to Promoter probe vector pPR9TT Cat,accession number AF187996,Smith-Waterman Score=227.
tcaaagtggtatctctagacgcagcctggtttctgcacgtaggctgtttttggaagagtcaccctcgtattctctggagggccttggtggaaggccaaagtcagcctgtttgtcatttgcacagtcatcaatattcagtaagccatacggtcgcataaaaaggtccgtaatatccagctgaacgggtctggtaatagggtacattgagcaactgattggaaatgctccaaaatgttctccacgatgccattggaatacatcaacggcggtataaccagcgatatttttctccattttagcttccgtagctcctgaaaatctcgataactcaaaaagatacgcccggtagtgatctggattggggaggcggtcgccgccgctgctgctgacggtgtgacgttctctgttccggtcacaccacagacgttccgccattcctatgcgatgcacatgctgtaagccggaacaccgctgaaagtactgcaaagcgtggccaatatggacaacttcttcgcccccgttttcaccatgggcaaatattatacgcaaggcgacaaggtgctgatgccgctggcgattcaggttcatcatgccgtttgtgatggcttccat

SEQ ID NO: 7310 - DNA, 3171 bp, Homo sapiens
  SIMILAR (2460)..(310): 991254mologous to Homo sapiens unknown,accession number AF148856,Smith-Waterman Score=3720.
tcaagccctgctaaaccaggggccccggagaggtacctcagtgtcagagcagttgccattcagagcctcgatgtttggatccctccagtcttctgagagtgaagggatgtaattgtctgtcagagcatcccaaaccctgggggatggtagaggatgaggaccctgatcagatattgggggtagagggttcttgctaaacttcacacggttcttgctgaaactggattttataaggaagtgcacagattgattgtttgtcagcatctgcaggtcttccactgagggaggagaggctttcttctcgtaaggaatgactgtgttcagatatggtgtgagatgatatctcatagtggttttgatttgcatttctctgatggccagtgatgatgagcatttcttcatgtgttttttggctgcataaatgtcttcttttgagaagtgtctgttcatgtccttcgcccactttttgatggggttgtttgtttttttcttgtaaatttgtttgagttcattgtagattctggatattagccctttgtcagatgagtaggttgcaaaaattttctcccatgttgtaggttgcctgttcactctgatggtagtttcttttgctgtgcagaagctctttagtttaattagatcccatttgtcaattttgtcttttgttgccattgcttttggtgttttggacatgaagtccttgcccacgcctatgtcctgaatggtaatgcctaggttttcttctagggtttttatggttttaggtttaacgtttaaatctttaatccatcttgaattgatttttgtataaggtgtaaggaagggatccagtttcagctttctacatatggctagccagttttcccagcaccatttattaaatagggaatcctttccccattgcttgtttttctcaggtttgtcaaagatcagatagttgtagatatgcggcattatttctgagggctctgttctgttccattgatctatatctctgttttggtaccagtaccatgctgttttggttactgtagccttgtagtatagtttgaagtcaggtagtgtgatgcctccagctttgttcttttggcttaggattgacttggcaatgcgggctcttttttggttccatatgaactttaaagtagttttttccaattctgtgaagaaagtcattggtagcttgatggggatggcattgaatctgtaaattaccttgggcagtatggccattttcacgatattgattcttcctacccatgagcatggaatgttcttccatttgtttgtgtcctcttttatttccttgagcagtggtttgtagttctccttgaagaggtccttcacatcccttgtaagttggattcctaggtattttattctctttgaagcaattgtgaatgggagttcacccatgatttggctctctgtttgtctgttgttcgtgtataagaatgcttgtgatttttgtacattgattttgtatcctgagactttgctgaagttgcttatcagcttaaggagattttgggctgagacaatggggttttctagataaacaatcatgtcgtctgcaaacagggacaatttgacttcctcttttcctaattgaataccctttatttccttctcctgcctgattgccctggccagaacttccaacactatgttgaataggagcggtgagagagggcatccctgtcttgtgccagttttcaaagggaatgcttccagtttttgcccattcagtatgatattggctgtgggtttgtcatagatagctcttattattttgaaatatgtaccatcaatacctaatttattgagagtttttagcatgaagggttgttgaattttgtcaaaggctttttctgcatctattgagataatcatgtggtttttgtctttggctctgtttatatgctggattacatttattgatttgcgtatattgaaccagccttgcatcccagggatgaagcccacttgatcatggtggataagctttttgatgtgctgctggattcggtttgccagtattttattgaggatttttgcatcaatgttcatcaaggatattggtctaaaattctcttttttggttgtgtctctgcccggctttggtatcagaatgatgctggcctcataaaatgagttagggaggattccctctttttctattgattggaatagtttcagaaggaatggtaccagttcctccttgtacctctggtagaattcggctgtgaatccatctggtcctggactctttttggttggtaaactattgattattgccacaatttcagagcctgttattggtctattcagagattcaacttcttcctggtttagtcttgggagagtgtatgtgtcgaggaatgtatccatttcttctagattttctagtttatttgcgtagaggtgtttgtagtattctctgatggtagtttgtatttctttctctctggctgcccttaacattttttccttcatttcaactttggtgaatctgacaattatgtgtcttggagttgctcttctcgaggagtatctttgtggcgttctctgtatttcctgaatctgaacgttggcctgccttgctagattggggaagttctcctggataatatcctgcagagtgttttccagcttggttccattctccacatcactttcaggtacaccaatcagacgtagatttggtcttttcacatagtcccatatttcttggaggctttgctcatttctttttattcttttttctctaaacttcccttctcgcttcatttcattcatttcatcttccattgctgataccctttcttccagttgatcgcatcggctcctgaggcttctgcattcttcacgtagttctcgagccttggttttcagctccatcagctcctttaagcacttctctgtattggttattctagttatacattcttctaaatttttttcaaagttttcaacttctttgcctttggtttgaatgtcctcccatagctcagagtaatttgatcgtctgaagccttcttctctcagctcgtcaaaatcattctccatccagctttgttctgttgctggtgaggaactgcgttcctttggaggaggagaggcgctctgcgttttagagtttccagtttttctgttctgttttttccccat

SEQ ID NO: 7311 - DNA, 760 bp, Homo sapiens
  SIMILAR (109)..(750): 981254mologous to Cloning vector pZC320 SopA,accession number U26464,Smith-Waterman Score=1117.
atggaagccatcacaaacggcatgatgaacctgaatcgccagcggcatcagcaccttgtcgccttgcgtataatatttgcccatggtgaaaacgggggcgaagaagttgtgcatattggccacgatctggctctgaaggggctacgtgttttgctcgtggaaggtaacgacccccagggaacagcctcaatgtatcacggatgggtaccagatcttcatattcatgcagaagacactctcctgcctttctatcttggggaaaaggacgatgtcacttatgcaataaagcccacttgctggccggggcttgacattattccttcctgtctggctctgcaccgtattgaaactgagttaatgggcaaatttgatgaaggtaaactgcccaccgatccacacctgatgctccgactggccattgaaactgttgctcatgactatgatgtcatagttattgacagcgcgcctaacctgggtatcggcacgattaatgtcgtatgtgctgctgatgtgctgattgttcccacgcctgctgagttgtttgactacacctccgcactgcagtttttcgatatgcttcgtgatctgctcaagaacgttgatcttaaagggttcgagcctgatgtacgtattttgcttaccaaatacagcaatagtaatggctctcagtccccgtggatggaggagcaaattcgggatgcctggggaagcatggttctaaaaaatgttgtacgtgaaacggatgaagttgacggaatcc

SEQ ID NO: 7312 - DNA, 1314 bp, Homo sapiens
  SIMILAR (1314)..(700): 991254mologous to unidentified cloning vector 29kD protein essential for the replication of mini F plasmid,accession number AB015619,Smith-Waterman Score=1073.
gtgggctgtaaggcagccatggtctttttccaatattgtgtcatggctaacttcttctggctgctggtggagggcctctacctgtacaccctgcttgccgtctccttcttctctgagcggaagtacttctgggggtacatactcatcggctggggtatgaccgttcagctggatattacggcctttttaaagaccgtaaagaaaaataagcacaagttttatccggcctttattcacattcttgcccgcctgatgaatgctcatccggagttccgtatggcaatgaaagacggtgagctggtgatatgggatagtgttcacccttgttacaccgttttccatgagcaaactgaaacgttttcatcgctctggagtgaataccacgacgatttccggcagtttctacacatatattcgcaagatgtggcgtgttacggtgaaaacctggcctatttccctaaagggtttattgagaatatgtttttcgtctcagccaatccctgggtgagtttcaccagttttgatttaaacgtggccaatatggacaacttcttcgcccccgttttcaccatgggcaaatattatacgcaaggcgacaaggtgctgatgccgctggcgattcaggttcatcatgccgtttgtgatggcttccatgtcggcagaatgcttcaatctgtgacagataaccctcagattatccgtcgtcatggaagtgatatcgcggaaggaaaatacgatatgagtcgtctggcggcctttctttttctcaatgtatgagaggcgcattggagttctgctgttgatctcattaacacagacctgcaggaagcggcggcggaagtcaggcatacgctggtaactttgaggcagctggtaacgctctatgatccagtcgattttcagagagacgatgcctgacgcatccggcttacgatactgacacagggattcgtataaacgcatggcatacggattggtgatttcttttgtttcactaagccgaaactgcgtaaaccggttctgtaacccgataaagaagggaatgagatatgggttgatatgtacactgtaaagccctctggatggactgtgcgcacgtttgataaaccaaggaaaagattcatagcctttttcatcgccggcatcctcttcagggcgataaaaaaccacttccttccccgcgaaactcttcaatgcctgccgtatatccttactggcttccgcagaggtcaatccgaatatttcagcatatttagcaacatggatctcgcagataccgtcatgttcctgtagggtgccatcagattttctgat

SEQ ID NO: 7313 - DNA, 552 bp, Homo sapiens
  SIMILAR (84)..(1): 961254mologous to Escherichia coli chloramphenicol acetyl transferase gene,accession number A24782,Smith-Waterman Score=145.
atggaagccatcacgaacggcatgatgaacctgaatcgccagcggcatcagcaccttgtcgccttgcgtataatatttgcccatggctccttccaagaggacataagagataccagccattgcctgccctgggcagcccctgggaagagcccaagagatcaggaccagctcacaggcgtcatcgtggtccagttactcctagcttgttcctggcaccaggcttctcctccatgtgacctcgtctgtgaactctgtgaccgactcccgggcggaaaatatgggatggacccgggcctttttaagaaggacctcctgcagaattcccccaattccatgttcggagtctccaataacccccacgggattgtggtcccagcctcagcgctccagcagggcaacatcgccatgacaaccgtcaactcacaagttgtgtcagacaattacatcccttcactctcagaagactgcagggaaccaaacatcgaggctctgaatggcaactgctgtgacactgaggtacctctccggggcccctggtttagcagggcttga

SEQ ID NO: 7314 - DNA, 504 bp, Homo sapiens
  SIMILAR (348)..(4): 931254mologous to Plasmid F Protein D,accession number M12987,Smith-Waterman Score=544.
tcaggataattgtttcagcatcgcaaccgcatcagactccggcatcgcaaactgcacccggtgccgggcagccacatccagcgcaaaaaccttcgtgtagactacaaaagaactgatggacgtatgtcccatcagcccccgcagaaccaacagcggtataccggcatacagcatgtgcatcgcataggaatggcggaacgtatgtggtgtgaccggaacagagaacgtcacaccgtcagcagcagcggcggcaaccgcctccccaatccaggtcctgaccgtctcgtccgtcacttcccagatccgagctttctctgtccttcctgtgcgacggttacgccgctccatgagcttatcgcgaataaatacgtggccaatatggacaacttcttcgcccccgttttcaccatgggcaaatattatacgcaaggcgacaaggtgctgatgccgctggcgattcaggttcatcatgccgtttgtgatggcttccatgtcggcagaatg

SEQ ID NO: 7315 - DNA, 1784 bp, Homo sapiens
  SIMILAR (604)..(1128): 991254mologous to Cloning vector pSacBII SacB,accession number U09128,Smith-Waterman Score=933.
aacatttttaagaaccatgcttcccagcgcatccggaatttgctcctctatccacgggggctgagagccatcactattgctgtatttggtaagcaaaatacgtacatcaggctcgaaccctttaagatcaacgttcttgagcagatcacgaagcatatcgaaaaactgcagtgcggaggtgtagtcaaacaactcagcaggcgtgggaacaattagtacatcagcagcacatactaccctcatcgtgccgatacccaggttaggcgcgctgtcaataactaccccaccatagtcatgagcaacagtttcaatggccagtaggagcatcaagtgtggatcggtgggcagtttaccttcatcaaatttgcccattaactcagtttcaatacggtgcagagccagacaggaaggaataatgtcaagctctggccagcaagtgggcgctcctgcataagtgacatctgccccgccctgccactcatcgcagtactgttgtaattcattaagcattctgccgacatggaagccatcacaaacggcatgatgaacctgaatcgccagcggcatcagcaccttgtcgccttgcgtataatatttgcccatggaggagcgactcaagccttcgcgaaagaaaataaccaaaaagcatacaaagaaacgtacggcgtctctcatattacacgccatgatatgctgcagatccctaaacagcagcaaaacgaaaaataccaagtgcctcaattcgatcaatcaacgattaaaaatattgagtctgcaaaaggacttgatgtgtgggacagctggccgctgcaaaacgctgacggaacagtagctgaatacaacggctatcacgttgtgtttgctcttgcgggaagcccgaaagacgctgatgacacatcaatctacatgttttatcaaaaggtcggcgacaactcaatcgacagctggaaaaacgcgggccgtgtctttaaagacagcgataagttcgacgccaacgatccgatcctgaaagatcagacgcaagaatggtccggttctgcaacctttacatctgacggaaaaatccgtttattctacactgactattccggtaaacattacggcaaaaaaagcctgacaacagcgcagcattctgccgacatggaagccatcacaaacggcatgatgaacctgaatcgccagcggcatcagcaccttgtcgccttgcgtataatatttgcccatgctcctgaaaatctcgataactcaaaaattcgcccggtagtgatcttatttcattatggtgaaagttggaacctcttacgtgccgatcaacgtctcattttcgccaaaagttggcccagggcttcccggtatcaacagggacaccaggatttatttattctgcgaagtgatcttccgtcacaggtatttattcgcgataagctcatggagcggcgtaaccgtcgcacaggaaggacagagaaagcgcggatctgggaagtgacggacagaacggtcaggacctggattggggaggcggttgccgccgctgctgctgacggtgtgacgttctctgttccggtcacaccacatacgttccgccattcctatgcgatgcacatgctgtatgccggtataccggtgaaaggttctgcaaagcctgatgggacataagtccatcagttcaacggaagtctacacgaaggtttttgcccctgatggggcctgccccgcacccggcggcagtttggcaatgccggaaactcgatgccggttggcaatgcttgaaacaattatcctga

SEQ ID NO: 7316 - DNA, 1712 bp, Homo sapiens
  SIMILAR (1194)..(1307): 841254mologous to synthetic construct chloramphenicol acetyltransferase,accession number A02739,Smith-Waterman Score=169.
atgccaaaggaaaaaaatccacaatataaatttccagacattgcagaaactgtggaagacccagcaacgccgcgggaaaccacaagcagcgcccagaaacaaccaaccatcacggggttggcagctcgggacggcccccaacaacgaaacccaaccgaaccaccgcacaacaaaacgggaaaggagggacaccacacaccggcaagggaacaagcgggcacggaggcagcgacccgacgcaaggacaaaggggcccaaaaggacacagaaagaaagaataagaccggcgacgggccagcacaacaggggtttattgagaatatgtttttcgtctcagccaatccctgggtgagtttcaccagttttgatttaaacgtggccaatatggacaacttcttcgcccccgttttcaccatgggcaaatattatacgcaaggcgacaaggtgctgatgccgctggcgattcaggttcatcatgccgtttgtgatggcttccatgtcggcagaatgcttaatgaattacaacagtactgcgatgagtggcaggcgcggggcggattttgccgatttcggaaccaccatcaaacaggattttcgcctgctggggcaaaccagcgtggaccgcttgctgcaactctctcagggccaggcggtgaagggcaatcagctgttgcccgtctcactggtgaaaagaaaaaccaccctggcgcccaatacgcaaaccgcctctccccgcgcgttggccgattcattaatgcagctggcacgacaggtttcccgactggaaagcgggcacccgtccagttggatattacggcctttttaaaggaccgtaaagaaaaaataagcacaagttttatccgggcctttattcacattcttgccccccctgatgaatgctcatccggagttccgtaggccaatgaaagccggtgagctggtgatatgggatagtgttcacccttgttacaccgttttccatgagcaaactgaaacgttttcatcgctctggagtgaataccacgacgatttccggcagtttctacacatatattcgcaagatgtggcgtgttacggtgaaaacctggcctatttccctaaagggtttattgagaatatgtttttcgtctcagccaatccctgggtgagtttcaccagttttgatttaaacgtggccaatatggacaacttcttcgcccccgttttcaccatgggcaaaatattatacgcaaggcgacaaggtgctgatgccgctggcgattcaggttcatcatgccgtttgtgatggcttccatgtcggcagaatgcccccagtaggggcagactgacacttcacacggccgggtactcctctgagacaaaacttccagaggaacgatcagacagcagaatttacggttcacgaaaaaccgctgttctgcaaacaccgctgctgatacccaggcaaacagggtctggagtggacctctagcaagctccaacagacctgcagctgagagtcctgtccttggaggggacatatgagacctaggcttctgagggtggccgatgaccagcaacagcaacaaaccagcactggccagcaggcccatagcctccacgcaccggcctcgcacgtcctccctcccatgggcaaatattatacgcaaggcgacaaggtgctgatgccgctggcgattcaggttcatcatgccgtttgtgatggcttccat

SEQ ID NO: 7317 - DNA, 1218 bp, Homo sapiens
  SIMILAR (814)..(885): 911254mologous to Homo sapiens Human secreted protein, SEQ ID NO: 7678,accession number G03597,Smith-Waterman Score=112.
tcatgttttcctggatggccttaatgcttctggatgtttgtcaatgtctgggcattgaggagttaggtatattatagccttcacagtgttctcttttttataaccatctttcttgtgaaggcttcccaagaatttaaagaggaatcgggtgttgtgatgtaagtctttggtcactgcagccatatctgtgccaggggcaacccaaggccagtacattgtggttcttgcaaacttgtagagataccgccttggtggtcttaggtaagatccggaagatttatctggattccagccagtgactcctgttctctttcctttccctagaatgacagtttctccatagtgagttgccttgaggcactgtccctcgccctcggtggccagatctggccacagcttggacacttccttgtctgggtccaagttgcactcatgggggttgaggccacagtgggcatccgtaagccagagagccttgaatgagcccttgccccatgggggcagcctgagtgcctctagggcaggtgctgagtccccttcacccccgtatccatgatgccagtgtgatgccaggcttgccgctcgggtcccttccacgctgtcaaagctttgttctttcactctttgcaataaatcttgctgctgctcgctctttgggtccacactgcctttatgagctgtaacactcaccacgaaggtctgcagcttcactcctgaagccagcgagaccacgaacccaccgggaggaacgaacaactccagacgcaccgccttaagagctgtagcactcaccgcgaaggtccgcagcttcactccgcgagggtccgcggcttcattcttgaagtcagtgagaccaagaacccaccaattccggacacaatagcacgtgcaccaaatagaattctcacctgggggactgtgggaatcctgcccaagagcctcctcctccactggggacccagggaggcctcctgaaagaagaggtgctgcagccaggaagacagtgggagtccagggggtggggtacagcttgcccaggaagctctgccccctgttctcccggaccacgtatccccacacgagtctcaggaaggactgtcttgagtctgacaccactgctgagtaggggagtgacagcagctgccttcctttgctgctggcgatggcaatacaagtgacccttgaacaacgcaggggtggggcgccgaacccccacat

SEQ ID NO: 7318 - DNA, 438 bp, Homo sapiens
  SIMILAR (264)..(431): 671254mologous to Homo sapiens Human secreted protein, SEQ ID NO: 7678,accession number G03597,Smith-Waterman Score=154.
ccatttatttatttatttattggtggtcttgctgtggtgtccaggctggcctcaaactgctggactcaaaggatcctcctgcctcagcctcctgagtaactgtaattataggccaccactctaggctctacttcttggaacgcaaaaactaccgagagtctggaattttatcatggtccgaagaatacaggatggagtgaagccatctgtgtccatagcagagagagagatgaaatcgcgaaagtctgcagcttcactcctgagccagcgagaccacgaacccaccagaaggaagaaactccgaacacatccgaacatcagaaggaacaaactccagacgcgccaccttaagagctgtaacactcactgcgagggtccatggcgtcattcttgaagtcagtgagaccaagaacccaccaattccggacacagtatgat

SEQ ID NO: 7319 - DNA, 342 bp, Homo sapiens
  SIMILAR (162)..(4): 621254mologous to Homo sapiens Secreted protein of clone DA306_4,accession number W69344,Smith-Waterman Score=171.
ttaacttttccccgattcaacacattcctcgatcaaggttccataacaggatttttctatataagtatggtaagtaaaggattgttgtatttttcctccgtagtggaaagactgataatgagaggtgacagcgtgctggcagtcctcgcagcccttgctcgctctcagcgcctcctctgcctgggctcccactttggcggcacttgaggagcccttcagcccgccgctgcactgtgggggcccctttctgggctggccaaggccggagccggctccctcaggttgcagaaaagctgctgcttcaccctccgctgtgcacaggagactgcgaaatttggccag

SEQ ID NO: 7320 - DNA, 882 bp, Homo sapiens
  SIMILAR (1)..(519): 1001254mologous to unidentified cloning vector 29kD protein essential for the replication of mini F plasmid,accession number AB015619,Smith-Waterman Score=915.
atgctgtatctgttcgttgaccagatcagaaaatctgatggcaccctacaggaacatgacggtatctgcgagatccatgttgctaaatatgctgaaatattcggattgacctctgcggaagccagtaaggatatacggcaggcattgaagagtttcgcggggaaggaagtggttttttatcgccctgaagaggatgccggcgatgaaaaaggctatgaatcttttccttggtttatcaaacgtgcgcacagtccatccagagggctttacagtgtacatatcaacccatatctcattcccttctttatcgggttacagaaccggtttacgcagtttcggcttagtgaaacaaaagaaatcaccaatccgtatgccatgcgtttatacgaatccctgtgtcagtatcgtaagccggatggctcaggcatcgtctctctgaaaatcgactggatcatagagcgttaccagctgcctcaaagttaccagcgtatgcctgacttccgccgccgcttcctgcaggacccccggcagtcctcgcagccctcgctcgctctcggagcctcttctgcctggactcccattttggcggcacttgagaagcccttcagcccgccgctgcactgtgggagcccctttctgggctggccaaggccggagctggctccctcagcttgcagggaggtgaggagggagaggcgccagcgggaaccggggctgcacctggcgcttgcgtgccagctggagttccgggctgaggagtgtgggcgcactgtgtgggactggcaggcagctccacctacggcccaggtgtgggattcactgggtgaagccagctgggctcctgagtctggtggggacttggagaactttatgtctagctag

SEQ ID NO: 7321 - DNA, 4491 bp, Homo sapiens
  SIMILAR (142)..(4488): 991254mologous to Homo sapiens PI3-kinase,accession number AJ000008,Smith-Waterman Score=7650.
ggctcgagcggccgcccgggcaggttgagatcgtgtttcatttcaggaagatatatgcgtcaggaaaatttctatcttcttttgtattatcaaggagatatttggagcagagtcaaccctctcagttacataaaataaaaaatggcatattcttggcaaacggatccaaatcctaatgaatcacacgaaaagcagtatgaacaccaagaatttctctttgtaaatcaaccccattcttctagccaagtcagtctgggttttgatcagatagtagatgagatcagtggcaaaattccacactacgagagtgaaattgatgaaaacaccttttttgtgcccactgcaccaaaatgggactcaacagggcattcattaaatgaagcacaccaaatatccttgaatgaattcacttctaaaagccgtgaactctcctggcatcaagttagcaaagcaccagcaattggttttagtccttctgtgttaccaaaacctcaaaatacgaataaagaatgctcctggggaagccccataggaaaacatcatggtgctgatgattccagattcagtattttagctccatcattcacaagtttggataaaattaatctagagaaagaattagaaaatgaaaatcataactaccatataggatttgaaagtagcattcctccaacaaattcatccttctcaagtgacttcatgccgaaagaagagaataaaaggagtggacatgtgaacattgtggaaccatctttgatgcttttgaaaggctctcttcaacccggaatgtgggaaagtacatggcagaagaatatagagtcaataggttgttccattcagctagtggaagtacctcaaagcagcaatacgagtctggcctctttttgcaacaaagtaaaaaaaatcagagaaagatatcatgcagctgatgttaatttcaattctgggaagatctggagcactactacagcatttccgtatcagctcttttctaagaccaagtttaatatacatatttttattgataactcaacacaacctcttcattttatgccatgtgctaattatcttgtcaaagatctaattgcagaaattctgcatttttgcacaaatgaccagctactccccaaagatcatattctaagtgtatgtggctctgaagaatttttacaaaacgaccactgtttggggagccacaaaatgtttcaaaaagataaatctgttattcagctccacctgcagaaaagtagggaagctccaggaaagctatctcgaaagcatgaagaggaccacagtcagttttatctgaatcaacttctagaatttatgcatatttggaaagtatccagacaatgtctcttaacactcatcagaaaatatgacttccacctgaaatacctattgaaaacccaggaaaacgtgtataatattattgaagaagttaaaaaaatatgcagtgttctagggtgtgtggaaaccaaacaaattacagatgcagtaaatgaactaagtctaattcttcagagaaaaggagagaatttttatcaaagttcagagacttcagcaaaaggcttgatagagaaggtaacaactgaactatccacatccatctaccagctaatcaatgtctactgtaacagcttttatgcagattttcagcctgtaaatgtacctagatgcacttcctatctaaatcccgggcttccttcccacctcagcttcacagtgtatgcagcacacaacattccagaaacctgggtgcacaggatcaattttccccttgaaataaagtcacttccaagggaatccatgctcactgtaaaactgtttgggattgcctgtgcaaccaacaatgcaaatttactggcgtggacttgtcttccactgtttccaaaagaaaaatccattctcgggtctatgctgttcagcatgacattacagagtgagcctcccgtagaaatgataactccaggagtgtgggatgtaagtcagccatccccggtgaccctgcagattgattttccagctactgggtgggagtatatgaaacctgattctgaagagaatagaagtaatcttgaagagccactaaaggagtgtataaaacatattgccagactttcacagaaacagactcccctactactctctgaagaaaagaaaagatatttatggttttatcgcttctactgcaataatgaaaactgctcccttcctttagtcctgggtagtgcccctggatgggatgaaaggactgtttcagaaatgcataccattttgagaagatggacattttctcaacctttagaggctcttgggcttttgacttccagttttccagatcaagaaattcgtaaagtggcagttcaacaattagacaacctcttgaatgatgaactactggaatatctcccacagctagttcaggctgtcaagtttgaatggaaccttgagagtcctttagtgcaacttctactccaccgctccttgcagagcatccaggttgcccatcgtctttactggctgctaaaaaatgcagaaaatgaagcttattttaaaagctggtatcagaagctactagctgctctccaattctgtgcaggtaaagccttgaatgatgagttttccaaggagcagaaacttatcaaaattctgggagatattggggaaagagtcaagtctgccagtgaccatcaaagacaggaggtactgaagaaagaaattggcagactagaagagttctttcaagatgtaaatacttgtcatcttcctctgaaccctgccctatgtataaaagggattgatcacgatgcatgttcatattttacatctaatgctttgccattgaagattactttcatcaatgctaatctgatgggcaaaaacatcagcattatttttaaggctggagatgatcttcgtcaggatatgcttgttctgcagcttattcaagtgatggacaatatttggctgcaggaaggcttggatatgcaaatgatcatttatagatgtctatccacaggaaaagaccaacgattggtgcagatggtacctgatgctgtgaccctagcaaagattcatcgccattctggactgataggaccattgaaagaaaataccattaaaaagtggttcagtcagcacaaccacttaaaggcagattatgaaaaggccttgaggaactttttctactcctgtgctggctggtgtgtggtaacattcatcctgggagtatgtgaccgtcacaatgataatatcatgctgacaaagtcgggccacatgtttcatattgactttggaaaattcttaggtcatgcacaaacatttggagggataaaaagggaccgagctcctttcatttttacttcagagatggaatactttattacagagggtgggaaaaacccacagcattttcaagattttgtggaactttgctgtcgtgcttataatattatcagaaagcacagccaactgctcttgaacctgctggaaatgatgctgtatgcaggactgcctgagctaagtggaattcaagacctgaaatatgtgtataataatcttcgtccacaagacacagacctggaagcaacaagtcattttaccaagaaaataaaggaaagtctggagtgtttccctgttaaattgaataacttgatccacacacttgcacaaatgtcagccataagccctgccaaatctacttcacagacttttcctcaggaatcctgtttgctgagtacaactaggtcgattgaaagagcaacaattttagggttcagcaagaaatccagtaatctgtatctgatccaggtgacacacagcaacaacgaaacaagcctgacagaaaaatcatttgagcagttttcaaaacttcacagccaacttcagaagcagtttgcatcactgactctcccagagtttcctcattggtggcacctaccttttacaaattcagatcacagaagattcagagatctaaatcattacatggaacagatattaaatgtatcacatgaagttacaaacagtgattgtgtacttagctttttcctctctgaggctgtgcaacaaacagttgaatcatcacctgtgtacctaggtgagaagaagtttccagacaagaagcctaaggtgcagttagtcatatcctacgaggatgtgaagctgaccatactagtgaaacacatgaaaaacattcatctcccagatggctctgcgcccagtgcacatgttgaattttatcttttaccatatcccagtgaagttctgaggaggaaaacaaaatctgttccaaaatgtacggaccccacttacaatgaaattgtagtatatgatgaagtcacagagctccaaggacatgtcttaatgcttattgtgaagagtaaaactgtatttgtgggagcaattaacatccgactctgtagtgtcccactcgataaagaaaaatggtatccattaggaaacagtataatttcaccattgctatga

SEQ ID NO: 7322 - DNA, 936 bp, Homo sapiens
  SIMILAR (586)..(729): 831254mologous to Homo sapiens PI3-kinase,accession number AJ000008,Smith-Waterman Score=205.
atgaagccgcggaccttcgcggtgagtgttacagctcttaaggtggcgcgtctggagtttgttctttctgatgttcggatgtgttcggagtttcttccttctggagtgaagctgcggacctacgcggtgagtgttacagctcttaaggcggtgtgtctggagttgttcgttcctcccggtgggttcgtggtcccgctggtttcaggagtgaagctacagaccttcgcggtggtcgatgggactgggcgccgtggagcagggggccgcgctcgtaggggaggctcggctgcacaggagcacatggaggcttggggaggctcaggcatggctggctgcaggtcccgagccttgccccgcgggaaggcagctaaggcccggcgagaaatccagcgcagcgctgctgagggagccagctccggccttggccagcccagaaaggggctcccacacagcagcggccggctgaagggctcctcaagtgccgccaaagtgggagcccaggcagaggaggcgccgagagcgagcgagggctgtgaggactgccagcacgctgtcacctctcacaggtactttgaaaaatccttacatttttctttacttgttcttgttgtggttaagatgctgtatgcaggactgcctgagctaagtggaattcaagacctgaaatatgtgtataataatcttcgtccacaagacacagacctggaagcaacaagtcattttaccaaaccacagtcttctcaaggtttttcagagcctgcgttggctgaagttgaacaaagatatattctccagcctttctcaggcactcatccttttatccggaatacctcaagcatcagcagagaacagaagttcctttctggaactgctatctctatgctaccaccaggagtcccctggatatttggttccagatctgctttgctgccctga

SEQ ID NO: 7323 - DNA, 1001 bp, Homo sapiens
  SIMILAR (341)..(162): 771254mologous to Homo sapiens Human secreted protein, SEQ ID NO: 7678,accession number G03597,Smith-Waterman Score=205.
atgatgacaggattaaatccacacataccaatattgaacttaaatgtaaatgagctaaatgctccaattaaaaggcacagggtggcaatttggacaaagaaggaaaacccaatggtacgctgtcttcaagaaacccatctcacatgcaatgacactcatagtgtgtccggaattggtgggttcttggtctcactgacttcaagaatgaagccgcggaccctcgcggtgagtgttacagctcttaaggtggcacgtctggagtttgttccttctgatgttcggatgtgttcggagtttcttccttctggagtgaagctgcagaccttcgcggtgagtgttacagctcttaaggcagcacgtctggagttgttcgttcctcctggtgggctcgtggtctcactggcttcaggagagaagctgcagatcttcgcagtgagtgttacagctcataaaagcagtgtggacccaaagaactcaggagcccagctggcttcacctagtggatcccgcaccggggctgcaggtggagctgcctgccagtcccacgcggtacgctcacactcctcagcccttgggtggttgatgggactgggcgccgtggagcagggggcggtgctcgttggggaggctcgggccacacaggagcccacggagggctggagaggctcaggcatggcgggctgcaggtcccaagccctgcctgcctggggctggtggggccagccggccgctccgagtgcggggtccgacaagcccacgcccacccagaactcacgctggccagcaagcaccatgcgcagccccagttcctgcccgtgtctctccctccacacctccccgcaagctgagggagcctgctccggccttggccagcccagaaaggggctcccacagtgcagcggcaggctgaagggctcctcaagtgctgccaaagtggaagcccaggcagaggaggcgccgagagccagcgagggctgtgaggactgccagcacgctgtcat

SEQ ID NO: 7324 - DNA, 3101 bp, Homo sapiens
  SIMILAR (133)..(1479): 931254mologous to Homo sapiens Human calcium channel SOC- 4/CRAC-3,accession number Y95437,Smith-Waterman Score=2181.
atggttggaggatgcaggtggacagaagacgtggagcctgcagaagtaaaggaaaagatgtcctttcgggcagccaggctcagcatgaggaacagaaggaatgacactctggacagcacccggaccctgtactccagcgcgtctcggagcacagacttgtcttacagtgaaagcgccagcttctacgctgccttcaggacacagacgtgcccaatcatggcttcttgggacttggtgaattttattcaagcaaattttaagaaacgagaatgtgtcttctttaccaaagattccaaggccacggagaatgtgtgcaagtgtggctatgcccagagccagcacatggaaggcacccagatcaaccaaagtgagaaatggaactacaagaaacacaccaaggaatttcctaccgacgcctttggggatattcagtttgagacactggggaagaaagggaagtatatacgtctgtcctgcgacacggacgcggaaatcctttacgagctgctgacccagcactggcacctgaaaacacccaacctggtcatttctgtgaccgggggcgccaagaacttcgccctgaagccgcgcatgcgcaagatcttcagccggctcatctacatcgcgcagtccaaaggtgcttggattctcacgggaggcacccattatggcctgatgaagtacatcggggaggtggtgagagataacaccatcagcaggagttcagaggagaatattgtggccattggcatagcagcttggggcatggtctccaaccgggacaccctcatcaggaattgcgatgctgagggctattttttagcccagtaccttatggatgacttcacaagagatccactgtatatcctggacaacaaccacacacatttgctgctcgtggacaatggctgtcatggacatcccactgtcgaagcaaagctccggaatcagctagagaagtatatctctgagcgcactattcaagattccaactatggtggcaagatccccattgtgtgttttgcccaaggaggtggaaaagagactttgaaagccatcaatacctccatcaaaaataaaattccttgtgtggtggtggaaggctcgggccagatcgctgatgtgatcgctagcctggtggaggtggaggatgccctgacatcttctgccgtcaaggagaagctggtgcgctttttaccccgcacggtgtcccggctgcctgaggaggagactgagagttggatcaaatggctcaaagaaattctcgaatgttctcacctattaacagttattaaaatggaagaagctggggatgaaattgtgagcaatgccatctcctacgctctatacaaagccttcagcaccagtgagcaagacaaggataactggaatgggcagctgaagcttctgctggagtggaaccagctggacttagccaatgatgagattttcaccaatgaccgccgatgggagaagagcaaaccgaggctcagagacacaataatccaggtcacatggctggaaaatggtagaatcaaggttgagagcaaagatgtgactgacggcaaagcctcttctcatatgctggtggttctcaagtctgctgaccttcaagaagtcatgtttacggctctcataaaggacagacccaagtttgtccgcctctttctggagaatggcttgaacctacggaagtttctcacccatgatgtcctcactgaactcttctccaaccacttcagcacgcttgtgtaccggaatctgcagatcgccaagaattcctataatgatgccctcctcacgtttgtctggaaactggttgcgaacttccgaagaggcttccggaaggaagacagaaatggccgggacgagatggacatagaactccacgacgtgtctcctattactcggcaccccctgcaagctctcttcatctgggccattcttcagaataagaaggaactctccaaagtcatttgggagcagaccaggggctgcactctggcagccctgggagccagcaagcttctgaagactctggccaaagtgaagaacgacatcaatgctgctggggagtccgaggagctggctaatgagtacgagacccgggctgttggtgagtccacagtgtggaatgctgtggtgggcgcggatctgccatgtggcacagacattgccagcggcactcatagaccagatggtggagagctgttcactgagtgttacagcagcgatgaagacttggcagaacagctgctggtctattcctgtgaagcttggggtggaagcaactgtctggagctggcggtggaggccacagaccagcatttcatcgcccagcctggggtccagaattttctttctaagcaatggtatggagagatttcccgagacaccaagaactggaagattatcctgtgtctgtttattatacccttggtgggctgtggctttgtatcatttaggaagaaacctgtcgacaagcacaagaagctgctttggtactatgtggcgttcttcacctcccccttcgtggtcttctcctggaatgtggtcttctacatcgccttcctcctgctgtttgcctacgtgctgctcatggatttccattcggtgccacacccccccgagctggtcctgtactcgctggtctttgtcctcttctgtgatgaagtgagacagggccggccggctgctcccagtgcggggcccgccaagcccacgcccacccggaactccatctggcccgcaagctccacacgcagccccggttcccgctcacgccactccttccacacttccctgcaagctgagggtgccagctctggccttggccagcccagaaaggggctcccacagtgcagcggtgggctgaaggggctcctcaagtgcggccaaagtgggagcccaggcagaggacgcgcccagagtgagcgagggctgtgaggactgccagcaagcacgctgtcacctctcagaagcgtaagacagcaatggaccaaacagacgaagatctcttcccctatggagcattctaccagttcctgatgatttccaggagctttcgaggagaggagatgagcatcggcaagcagcactaa

SEQ ID NO: 7325 - DNA, 1641 bp, Homo sapiens
  SIMILAR (1641)..(40): 981254mologous to Homo sapiens putative p150,accession number U93564,Smith-Waterman Score=2788.
tcattgttcaattcccacctatgagtgagaatatgcgtgaactagtttacagtcccaccaacagtgtaaaagtgttcctatttctccacatcctctccagcacctgttgtttcctgactttttaatgattgccattctaactggtgtgagatgatatctcatagtggttttgatttgcatttctctgatggccagtgatgatgagcatttcttcatgtgttttttggctgcataaatgtcttcttttgagaagtgtctgttcatgtccttcgcccactttttgatggggttgtttgtttttttcttgtaaatttgtttgagttcattgtagattctggatattagccctttgtcagatgagtaggttgcgaaaattttctcccatgttgtaggttgcctgttcactctgatggtagtttcttttgctgtgcagaagctctttagtttaattagatcccatttgtcaattttggcttttgttgccattgcttttggtgttttggacatgaagtccttgcccacgcctatgtcctgaatggtaatgcctaggttttcttctagggtttttatggttttaggtctaaagtttaaatctttaatccatcttgaattgatttttgtataaggtgtaaggaagggatccagtttcagctttctacatatggctagccagttttcacagcaccatttattaaatagggaatccttttcccattgcttgtttttctcaggtttgtcaaagataagatagttgtagatatgcggcattatttctgagggctctgttctgttccattgatctatatctctgttttggtaccagtaccatgctgttttggttactgtagccttgtagtatcgtttgaagtcaggtagtgtgatgcctccagctttgttcttttggcttaggattgacttggcgatgcgggctcttttttggttccatatgaactttaaagtagttttttccaattctgtgaagaaagtcattggtagcttgatggggatggcattgaatctgtaaattaccttgggcagtatggccattttcacgatattgattcttcctacccatgagcatggaatgttcttccatttgtttgtgtcctcttttatttccttgagcagtggtttgtagttctccttgaagaggtccttcacatcccttgtaagttggattcctaggtattttattctctttgaagcaattgtgaatgggagttcacccatgatttggctctctgtttgtctgttgttggtgtataagaatgcttgtgatttttgtacattgattttgtatcctgagactttgctgaagttgcttatcagcttaaggagattttgggctgagacgatggggttttctagataaacaatcatgtcgtctgcaaacagggacaatttgacttcctcttttcctaattgaataccctttatttccttctcctgcctgattgccctggccagaacttccaacactatgttgaataggagcggtgagagagggcatccctgtcttgtgccagttttcaaagggaatgcttccagtttttgcccattcagtatgatattggctgtgggtttgtcatagatagctcttattattttgagatacgtcccatcaatacctaatttattgag

SEQ ID NO: 7326 - DNA, 1464 bp, Homo sapiens
  SIMILAR (695)..(1150): 941254mologous to Homo sapiens putative p150,accession number U93574,Smith-Waterman Score=734.
ctcagagcacatgagtcaggtgcgagtggccaggagacgctttcctgaggaccttacgtagcctctggcccaggcaggctgagtgggcagctctgtctttactatgctgtgtacctctgggcaacctgctaccctctctgtggctcccacgcagatgctgcatggggtcagtcagaaattcagcacaagtcaaagcagagagaagaaaacatcctgtgagctcaccgacagcaacccctgggggcctggtaaagagcaacaactgatgcaactccaccttttgcttggtagccaaaacctgagagctcagagcctaatccagggaacggacaaaacctcacctccccagtcacccccacctttccacttccagtgccatcaaggcacggtcatcaaagccaggcaggtctgagtgctgctctgcaacttactacctttatgaccatacgcaagtcataagtctggccatacgcactactgccagagaccccattttattctgtaagaagtgacaggaaggcatagcttgttccccacaaaataccccatcttcaattttctcccttgcttggctccaacggcagagaaaaatgtgcatggacaccaaaccatctccaagaagcagccattaggtaatctgggacatggcattgacaatggcaccgggcacagggcttctgacatcatataagcaagggccgaagtcaaattgtccctgtttgcagatgacatgattgtatatttagaaaaccccatcatctcagcccaaaatctcctcaagctgataagcaagttcagcaaagtctcaagatacaaaattaatgtgcaaaaatcacaagcattcctatacaccaataacagacaaacagagagccaaatcatgagtgaactcccattcacaattgctacaaagagaataaaatacctaggaatacaacttacaagggatgtgaaggacctcttcaaggagaactacaaaccactgctcaatgaaataaaggaggacacaaacaaatggaagaacattccatgctcatggataggaagaatcaatatcgtgaaaatggccatactgcccaaggtaatttatagattcagtgccatccccatcaagctaccaatgactttcttcacagaattggaaaaaacaaactggctagcaatatgtagaaagctgaaactggatttcttctttataccttacacaaaaattaattcaagatggattaaagacttaaatgttagacctaaaaccatgaaaaccctagaagaaagcctaggcaataccattcaggacataggcatcggcaaggacttcatgactaaaacaccaaaagcaatggcaacaaaagccaaaagagcttctgcacagcaaaagaaactaccatcagagtgaacaggcaacctacagaatgggagaaaatttttgcaatctatccatctgacaaagggttaatatccaga

SEQ ID NO: 7327 - DNA, 3529 bp, Homo sapiens; identical to SEQ ID NO: 6262
  SIMILAR (305)..(1849): 891254mologous to Homo sapiens putative p150,accession number U93572,Smith-Waterman Score=2317.

SEQ ID NO: 7328 - DNA, 1314 bp, Homo sapiens
  SIMILAR (505)..(1227): 911254mologous to Homo sapiens putative p150,accession number U93572,Smith-Waterman Score=1131.
caagatgagtatcatatggttcatctagtatgtacttctcggactcctcccagttctccaaaatccagcaccaatagagaaagtcatgaagcattggcatccagcagcaattctagttcagatcattcaggatcaacaactccatcatctggtcaagaaaccttgtctttagctgtgggttcttcctcagaaggattgaggcagcgtacccttccacaagcacaaactgaccaagcacagagtcaccagtttccatatgtaatgcaaggaaatatggccatcagagagtactataaacacctctacgcaaataaactagaaaatctagaagaaatggataaattcctcgacacatacaccctcccaagactaaaccaggaagaagttgaatccctgaatagaccaataacgggttctgaaattgaggcaataattaatagcctaccaaccaaaaaaagtccaagaccagacggattcacagctgaattctaccagagatgcagaaaaggcctttacaaaattcaacagctcttcatgctaaaaactctcaataaattaggtattgatgggacgtatctcaaaatagtaaaagctgtttatgacacacccacagccaatatcatactgaatgggcaaaaactggaagcattccctttgaaaactggcacaagacagggatgccgtctctcaccactccttttcaacgtagtgttggaagttctggccagggcaatcaggcaagagaaagcaataaagggtattcaattaggaaatgaggaagtcaaattgtccctgtttgcagatgacatgattgtatatttagaaaaccctatcatctcagcccaaaatctccttaagctgataagcaacttcagcaaagtctcaggatacaaaatcaatgtgcaaaattcacaagcattcctatacaccaataacagacagacagagagccaaatcatgagtgaactcccattcacaattgcttcaaagagaataaaatacctaggaatccaaattacaagggatgtgaacgacctcttcaaggagaactacaaaccactgctcagcgaaataaaagaggacacaaacaaatggaagaacattccatgctcatggataggaagaatcaatatcgtgaaaatggccatactgcccaaggtaattcatagattcaatgccatccccatcaagctaccaatgactttcttcacagaattggaaaaaactaaagttcatatggaaccaaaaaagagcccgcattgccaagtcagtcctaagccaaaagaacaaagttggaggcatcacgctacctga

SEQ ID NO: 7329 - DNA, 1995 bp, Homo sapiens
  SIMILAR (1197)..(22): 981254mologous to Homo sapiens putative p150,accession number U93574,Smith-Waterman Score=2008.
ttatttattaataaagaatgagatatgtggcattatttctgaaggctctgttctgttccattgatctatatctctgttttggtaccagtaccatgctgtttgcgttactgtagccttgtagtatagtttgaagtcaggtagtgtgatgcctccagctttgttcttttggcttaggattgacttggcgatgcgggctcttttttggttccatatgaactttaaagtagttttttcgaattctgtgaagaaagtcattggtagcttgatggggatggcattgaatctgtaaattaccttgggcagtatggccattttcacgatattgattcttcctacccatgagcatggaatgttcttccatttgtttgtgtcctcttttatttccttgagcagtggtttgtagttctccttgaagaggtccttcacatcccttgtaagttggattcctaggtattttattctctttgaagcaattgtgaatgggagttcactcatgatttggctctctgtttgtctgttgttggtgtataagaatgcttgtgatttttgtacattgattttgtatcctgagactttgctgaagttgcttatcagcttaaggagattttgggctgagacaatggggttttctagataaacaatcatgtcgtctgcaaacagggacaatttgacttcctcttttcctaattgaataccctttatttccttctcctgcctgattgccctggccagaacttccaacactatgtttaataggagcggtgagagagggcatccctgtcttgtgccagttttcaaagggaatgcttccagtttttgcccattcagtatgatattggctgtgggtttgtcatagatagctcttattattttgaaatacgtcccatcaatacctaatttattgagagtttttagcatgaagggttgttgaattttgtcaaaggctttttctgcatctattgagataatcatgtggtttttgtctttggctctgtttatatgctggattacatttattgatttgcgtatattgaaccagccttgcatcccagggatgaagcccacttgatcatggtggataagctttttgatgtgctgctggattcggtttgccagtattttattgaggatttttgcatcaatgttcatcaaggatattggtctaaaattatcttttttggttgtgtctctgcccggcagttcctccttgtacctctggtagaattcggctgtgaatccatctggtcctggactctttttggttggtaaactattgattattgccacaatttcagagcctgttattggtctattcagatattcaacttcttcctggtttagtcttgggagagtgtatgtgtcgaggaatgtatccacttcttctagattttctagtttatttgcatagaggtgtttgtagtattctctgatggtagtttgtatttctgtgggattggtggtgatatcccctttatcattttttattgtgtctatttgattcttctctctttttttctttattagtcttgctagcggtctatcaattttgttgatcctttcaaaaaaccagctcctggattcattgattttttgaaggattttttgtgtctctatttccttcagttctgctctgattttagttatttcttgccttctgctagcttttgaatgtgtttgctcttgcttttctagttcttttaattgagatgttagggtgtcaattttggatctttcctgctttctcttgtaggcatttagtgctataaatttccctctacacactgctttgaatgcgtcccagagattctggtatgtggtgtctttgttctcgttggtttcaaagaacatctttatttctggcttcatttcgttatgtacccagtagtcattcaggagcaggttgttcagtttccatgtagttgagcggctttgagtgagattcttaatcctgagaaataatgccgcatatctacaactatctgatctttgacaaac

SEQ ID NO: 7330 - DNA, 1653 bp, Homo sapiens
  SIMILAR (652)..(1650): 871254mologous to Homo sapiens putative p150,accession number U93563,Smith-Waterman Score=1506.
atgaaggcagaaataacaatgttctttgaaaccaatgagaacaaagacacaacgtaccataatctccgggacacatttaaagcagtgtttagagggaaatttatagcactaaatgcccacaagagaaagcaggaaagatctaaaattcacaccctaacatcacaattaaaagaactggagaagcaagagcaaacacattcaaaagctagcagaaggcaagaaataactaagatcagagcagaactgaaggagatagagacacaaaaaacccttcaaaaaatcaatgaatccaggagctggttttttgaaaagatcaacaaaattgatagaccgctagcaagactaataaagaagaaaatagagaagaatcaaatagacataataaaaaatgataaaggggatatcaccaccgatcccacagaaatacaaactaccatcagagaattctataaacacttctatgcaaatagactgaaaaatctagaagaaatggatgaattcctggaaacatacaccctcccaagactaaaccaggaagaagttgaatctctgaatagaccaataacaggctctgaaattgaggccataatcaatagcctaccaaccaaaaaaagtccaggaccagacggattcactgctgaaatctaccagagaaccaatgacaaaaaccacatgattatctcaatagatgaagaaaaggcctttgacaaaattcaacagcccttcatgctagaaatgctcaataaactaggtatttatggaatgtatatcaaaataataagaactatttatgacaaatccacagccaatatcatactgaatgtgcaaaaactggaagcattccctttgaaaactggcacaagacagggatgccctctctcaccactcctattcaacatagtgttggaagttctggccagggcaatcaggcaagagaaagaaataaagggtattcgattaagaaaagaggtattcaaaatgttcctgtttgcagatgacatgattgtatatttagaaaaccccatcatctcagccccaaatctccttaagctgataagcaacttcagcaaagtctcaggatacaaaatcaatgtgcaaaaatcacaagcattcctatacaccaataacagacaaacagagagccaaatcatgagtgaactcccattcacaattgctacaaagagaataaaatacctaggaatccaacttacaagggatgtgaaggacctcttcaaggagaactacaaaccactgctcaatgaaataaaggaggacacaaacaaatggaagaacattccatgctcgtggataggaagaattaatattgtgaaaatggccatactgcccaaggtaatttatagattcaatgccattcccatcaagctaccaatgactttcttcacagaattggaaaaaactactttaaagttcatatggaaccaaaaaagagccctcaatgccaagacaatcctaagccaaaagaacaaagctggaggcatcatgctacctgacttcaaattaccctacaaggctacatggtactggaaccaaaacacagagatagaccaatggaacaaaacagaggcctcagaaataacaccacacatctacaaccatctggtctttgacaatcctgacaaaaacaagaaatag

SEQ ID NO: 7331 - DNA, 1581 bp, Homo sapiens
  SIMILAR (574)..(1467): 871254mologous to Homo sapiens putative p150,accession number U93572,Smith-Waterman Score=1340.
atgcatttattgagtgcctacttcgtgccaggatctatgctagtaggctcaggttatatgatggtgaatatcacagatgtgtccccaccatcatggagcttcctgtgtagcatgctcatcaccagtgaaagcacatttcccccaataacaaatgtaaaaaaagggtccttgagaagtgtttataaggagtatgtgggacctccgctggtgatacccaggcaaacacagtctggagtggacctccagcaaactccaacagacctgcagctgagggacctgactgtcagaaggacaacgaacaaacagaaaggaatagcatcaacatcaaaaaaaaaggacatccacaccaaaaccccatctgtaggtcaccaatatcaaagaccaaacgtagataaaaccacaaagatggggagaaaccagagcagaaaagctgaaaattctaaaaaccagagtgccttttctcctccaaaggatcacagctcctcaccagtaatggaacaaagctggatggagaatgactttgacgagctgacagaagtaggcttcagaagcctggcagagacacaacaacaacaaaaagagaaatttagaccaatatccctgatgaacatcgatgtgaaaatcctcaataaaatactggcaaaccgaatccagcagcacatcaaaaagcttatccaccatgatcaagttggcttcatctctgggatgcaaggctggttcaacatatgcaaatcaataaacgtaatccatcacataaacagaaccaatgacaaaaaccacatgattatctcaatagatgcagaaaaggcctttgacaaaattcaacagcccttcatgctaaaaactctcaaaaaactaggtattgatgggacgtatctcaaaataataagagctatttatgacaaatccacagccagtatcatactgaatgggcaaaaactggaagcattccctttaaaagacaggacaagacaaggatgtcctctctcaccactcctattcaacatagcattggaagttctggccagggcaatcaggcaagagaaagacataaagtgtattcaattaggaaaagagaaagtcagattgtccctgtttgcagaggacatgattgtatatttagaaaaccccatcgtctcagccccaaatctctttaagctgataagcaacttcagcaaagtctcaggatacaaaatcaatgtgcaaaaatcacaagtattcctatacatcaataacagacaaagagagagccaaatcatgaatgaattcccattcacaattgccagaaggagaataaaatacctaggaatccaacttacaagggatgtgaaggacctcttcaaggagaactacaaaccactgctcaaggaaataaaagaggatacaaacaaatggaagaatatgccatgctcatggataggaagaatcaatatcatgaaaatggccatactggccaagctctatcaccctgatgtagatcattctgagttttcctggacaactacaactgtcagctgtctagactccttttcttcatcctactgcattcccaacagtgttttaatgatagaagaactttga

SEQ ID NO: 7332 - DNA, 1223 bp, Homo sapiens; identical to SEQ ID NO: 7046
  SIMILAR (292)..(1221): 971254mologous to Homo sapiens putative p150,accession number U93564,Smith-Waterman Score=1532.

SEQ ID NO: 7333 - DNA, 1314 bp, Homo sapiens
  SIMILAR (1)..(672): 941254mologous to Homo sapiens putative p150,accession number U93563,Smith-Waterman Score=1097.
atgaaggcagaaataaagatgttctttgaaaccaaagagaacaaagacacaacataccagaatctctgggacacatttaaagcagtgtgtagagggaaatttatagcactaaatgcccacaagagaaagcaggaaagatctaaaattgacaccctaacatcacaattaaaagaactagaaaagcgagagcaaacacattcaaaagttagcagaaggcaagaaataactaagattagagcagaactgaaggaaatagagacacaaaaaacccttcaaaaaatcaatgaatccaggtcctggttttttgaaaagatcaacaaaattgatagaccgctagcaagactaataaagaagaaaagagagaagaatcaaatagatgcaataaaaaatgataaaggggatatcaccactgatcccacagagatacaaactaccatcagagaatactataaacacctctacacaaataaactagaaaatctagaagaaatggatacattcctcgacacatacaccctcccaagactaaaccaggaagaagttgaatctctgaatagaccaatgacaggttctgaaattgaggcaataattaatagcttaccaaccaaacaaagtcctggaccagatggattcacagctgaattctaccagaggtacaaggaggaactgctgataagcaacttcagcaaagtttcaggatacaaaatcaatgtgcaaaaatcacaagcattcttatacaccaataacagacaaacagagagccaaatcatgagtgaactcccattcacaattgcttcaaagagaataaaatacctaggaatccaacttacaaggaatgtgaaggacctcttcaaggagaattacaaaccactgctcaacgaaattaaagaggacacaaacaaatggaagaacattccatgctcatggataggaagaatcaatattgtgaaaatggccatactgcccaaggtaatgtatggattcaatgccatccccatcaagctaccaatgactttcttcacagaattggaaaaaactactttaaagttcatatggaaccaaaagagagcccacattgccaagtcaatcctaagccaaaagaacaaagctggaggcatcatgctacctgacttcaaactatactacaaggctacattatccaaaacagcatggcagtggtaccaaaacagagatatagaccaatggaacagaacagagccctcagaaataatgccgcataactacaaccatctgatctttgacaaacctgacaaaaacaagcaatgggaaaaggattccctatttaatagatag

SEQ ID NO: 7334 - DNA, 1608 bp, Homo sapiens
  SIMILAR (3)..(1475): 921254mologous to Homo sapiens putative p150,accession number U93572,Smith-Waterman Score=2311.
ctagcagaagacaagaaataactaagatcagagcagaactgaagaagatagagacacaaaaacccttcaaaaaaatcaatgaatccaggagctggttttttgaaaagatcaacaaaattgatagactgctagcaagactaataaagaagaaaatagagaagaatcaaatagatgcaataaaaaatgataaagggaatatcaccaccaatcccacagaaatacaaactaccatcagagaatactataaacacctctatgcaaataaactagaacacctagaagaaatggataaattcctggacatatacaccctcccaagactaaaccaggaagaagttgaatctgtgaatagaccaataacaggttctgaaattgaggcaataattaatagtctaccaaccaaaaaaagtccaggaccagacagattcacagctgaactctaccagaggtacaaagaggagctggtaccattccttctgaaactattccaatcaatagaaaaagagggaatcctccctaattcattttatgaggccagcatcatcctgatatcaaagcctggcagagacacaacaaaaaaagagaattttagaccaatatccctgatgaacatcgatgcaaaaatcctcaataaaatactggcaaaccaaatccagcagcacatcaaaaagcttatccaccaccatcaagttggcttcatccctgggatgcaaggctggttcaacatactcaaatcaataaacgtaatccatcatataaacagaaccaaagacaaaaaccacatgattatctcaatagaagcagaaaaggcctttgacaaaattcaacagccctttatgctaaaaactctcaataaactaggtattgatgggacatatctgacatatctcaaaataataagagctatttatgacaaacccacagccaatatcatactgaatgggcaaaaactggaagcattcccttttaagactggcacaagacagggatgtcctctctcaccactcctattcaacatagtgttggaagctctggccagggcaatcaggcaagagaaagaaataaagggtattcaattaggaaaagaggatgtcaaattgtccctgtttgcagatgacatgattgtatatttagaaaaccccatcgtctcagcccaaaatctccttaagctgataagcaacttcagcgaagtctcaggatacaaaatcaatgtgcaaaaatcacaagcattcctatacaccaataacagacagacagagagccaaatcatgagtgaactcccattcacaattgcttcaaagagaataaaatacctaggaatacaacttacaagggatgtgaaggacctcttcaaggagaactacaaaccactgctcaatgaaataaaagaggacacaaacaaatggaagaacattccatgctcatggataggaagaatcaatattgtgaaaatggccatactgcccaagactctcaatcagaaattctcatactggttcagagtcaacaaacactacattcaccagaggacttttcccctcaaagagacagaattcaacaccatagcaacgctttataatggtgcttctccagcacagcaccaaaaag

SEQ ID NO: 7335 - DNA, 1476 bp, Homo sapiens
  SIMILAR (1)..(1128): 981254mologous to Homo sapiens unknown,accession number AF149422,Smith-Waterman Score=1983.
atgggtgaactcccattcacaattgcttcaaagagaataaaatacctaggaatccaacttacaagggatgtgaaggacctcttcaaggagaactacaaaccactgctcaaggaaataaaagaggacacaaacaaatggaagaacattccatgctcatgggtaggaagaatcaatatcgtgaaaatggccatactgcccaaggtaatttacagattcaatgccatccccatcaagctaccaatgactttcttcacagaattggaaaaaactactttaaagttcatatggaatcaaaaaagagcctgcattgccaagtcaatcctaagccaaaagaacaaagctggaggcatcacactacctgacttcaaactatactacaaggctacagtaaccaaaacagcatggtactggtaccaaaacagagatatagatcaatggaacagaacagaggcctcaaaaataatgccgcatatctacaactatctgatctttgacaaacctgagaaaaacaagcaatggggaaaggattccctatttaataaatggtgctgggaaaactggctagccatatgtagaaagctgaaactggatcccttccttacaccttatacaaaaatcaattcaagatggattaaagatttaaacgttagacctaaaaccataaaaaccctagaagaaaacctaggcattaccattcaggacataggcgtgggcaaggacttcatgtccaaaacaccaaaagcaatggcaacaaaagacaaaattgacaaatgggatctaattaaactaaagagcttctgcacagcaaaagaaactaccatcagagtgaacaggcaacctacaacatgggagaaaattttcgcaacctactcatctgacaaagggctaatatccagaatctacaatgaactcaaacaaatttacaagaaaaaaacaaacaaccccatcaaaaagtgggcgaaggacatgaacagacacttctcaaaagaagacatttatgcagccaaaaaacacatgaagaaatgctcatcatcactggccatcagagaaatgcaaatcaaaaccgctatgagataccatctcacaccagttagaatggcaatcattaaaaagtcaggaaacaacagaatctttgatcacctgctcagctttctgctgctgctgtccttttctgctgttataccttatgatgtctttgtctttgacagttacaaaccactaattccaccaacccctccttttgaactctccacatctgtatttcaacatataatggttgtcaagaaaacaaagttacctgtcaaacagactcaggcaggtccttcaaaaggtattccagaagacgccattgttatcataggaaatgacagcttcatgcatgttactgtccctgaagacctttcagtgggacaagatgtggaggtggaagacaatgatactgctaatcctgacccatgtaggcctagcctaatatga

SEQ ID NO: 7336 - DNA, 1428 bp, Homo sapiens
  SIMILAR (1)..(1389): 901254mologous to Homo sapiens putative p150,accession number U93574,Smith-Waterman Score=2191.
atgattatctcaatagatgcagaaaaggcctttgacaaaattcaacaacacttcatgctaaaaactctcaataaactaggtattgatgggacgtatctcaaaataataagagctatttatgacaaacccacagccaatatcatactgaatgggcaaaaactgaaagcattccctttgaaaactggcacaagacagggatgccctctctcacaacttctattcaacatagtgttggaagttctggccagggcaatcaggcaagagaaagaaataaagggtattcacttaggaaaagaggaagtcaaattgttcctgtttgcagatgacatgattgtatatctagaaaaccccgttgtctcagcccaaaatctccttgggccaataagcaacttcagcaaagtctcaggatacaaaatcaatgtgcaaaaatcacaagcattcatatacatcaataacagacaaacagagagccaaatcatgagtgaactcccattcacaattgcttcaaagagaataaaatacctaggaatccaacttacaagggacgtgaaggacctcttcaaggagaactacaaaccactgctcaatgaaataaaagaggacacaaacaaatggaagaacattccatgctcatggataggaagaatcaatattgtgaaaatcgccatactgcccaaggtaatttatagattcaatgccacccccatcaagctaccaaggactttcttcacagaattggaaaaaactactttaaagttcatatgcaacgaaaaaagagcccgcattgccaagtcaatcagaagcaaaaaagacaaagctggagacatcatgctacctgacttcaaactatactacaaggctacagtaaccaaaacagcatggtactggtaccaaaacagagatataagccaatggaacagaacagagccctcagaaataataccacacagctacaaccatctggtctttgacaaacctgacaaaaacaagaaatggggaaaggattccctatttaataaatggtgttgggaaaactggctagccatatgtagaaagctgaaactggatcccttccttacaccttatacaaaaattaattcaagatggattaaagatttaactgtaagacctaaaaccataaaagccctagaagaaaaccttggcaataccatttgggacataggcatgggcaaggacttcacgtctaaaacaccaaaagcaatggcaacaaaagccaaaattgacaaatgggatctaactaaactaaagagcttctgcacagcaaaagaaactaccatcagagtgaacaggcaacctacagaatgggagaaaatttttgcaatcttctcatctgacaaaaggctaatatccagaatctacaaagaattattcaacctcaaaacggaaatttttgaggataaaccttga

SEQ ID NO: 7337 - DNA, 2334 bp, Homo sapiens
  SIMILAR (328)..(1971): 971254mologous to Homo sapiens putative p150,accession number U93564,Smith-Waterman Score=2803.
atgtcccagggctattccatccaccttgctccagcagcagggtctggggacgagtcagcttctttggaaggccttcatgaaatacaaactgccatcagagaatactacaaacacctctacgcaaataaactagaaaatctagaagaaatggatacattcctcgacacatacactctcccaagactaaaccaggaagaagttgaatctctgaatagaccaataacaggctctgaaattgtggcaataatcaatagtttaccaaccaaaaagagtccaggaccagatggattcacagccgaattctaccagaggtacaaggaggaactgcatataaacagagccaaagacaaaaaccacatgattatctcaatagatgcagaaaaagcctttgacaaaattcaacaacccttcatgctaaaaactctcaataaattaggtattgatgggacgtatttcaaaataataagagctatctatgacaaacccacagccaatattatactgaatgggcaaaaactggaagcattccctttgaaaactggcacaagacagggatgccctctctcaccactcctattcaacatagggttggaagttctggccagggcaatcaggcaggagaaggaaataaagggtattcaattaggaaaagagaaagtcaaattgtccctgtttgcagacgacatgattgtttatctagaaaaccccatcgtctcagcccaaaatctccttaagctgataagcaacttcagcaaagtctcaggatacaaaatcaatgtacaaaaatcacaagcattcttatacaccaacaacagacaaacagagagccaaatcatgagtgaactcccattcacaattgcttcaaagagaataaaatacctaggaatccaacttacaagggatgtgaaggacctcttcaaggagaactacaaaccactgctcaaggaaataaaagaggacacaaacaaatggaagaacattccatgctcatgggtaggaagaatcagtatcgtgaaaatggccatactgcccaaggtaatttacagattcaatgccatccccatcaagctaccaatgactttcttcacagaattggaaaaaactactttaaagttcatatggaaccaaaagagagcccgcatcgccaagtcaatcctaagccaaaagaacaaagctggaggcatcacactacctgacttcaaactatactacaaggctacagtaaccaaaacagcatggtgctggtaccaaaacagagatatagatcaatggaacggaacagagccctcagaaataatgccgcatatctacaactatctgatctttgacaaacctgagaaaaacaagcaatggggaaaggattccctatttaataaatggtgctgggaaaactggctagcgatatgtagaaagctgaaactggatcccttccttacaccttatacaaaaatcaattcaagatggattaaagatttaaacgttagacctaaaaccataaaaaccctagaagaaaacctaggcattaccattcaggacataggcgtgggcaaggacttcatgtccaaaacaccaaaagcaatggcaacaaaagccaaaattgacaaatgggatctaattaaactaaagagcttctgcacagcaaaagaaactaccgtcagagtgaacaggcaacctacaacatgggagaaaattttcacaacctactcatctgacaaagggctaatatccagaatctacaatgaactcaaacaaatttacaagaaaaaaacaaacaaccccatcaaaaagtgggcgaaggacatgaacagacacttctcaaaagaagacatttatgcagccaaaaaacacatgaagaaatgctcatcatcactggccatcagagaaatgcaaatcaaaaccactatgagatatcatctcacaccagttagaatggcaatcattaaaaagtcaggaaacaacagcaacagttgggtcagcaaaaagattcttcttaaaattaaaaaacataagaaattgcgatgcatttgccaagaatggctgacatctttttcaattgtgttgattgaaaatgagctggctaaaagtttacattttgatgatctaatcaataaagttgcagaaagtgtgaagaaacatcctgaagttattcacagtgacttcaatgaacaacacattagtatactttttacacaggggacagaagtaaaagccggcttgatcatttacaaggctttcaccatgccgctgagatgtcaaggactacaagttgatcttcagcctcttaaaatatggcctcgaagcctttcatgtcttcagacaactccagcattttga

SEQ ID NO: 7338 - DNA, 1542 bp, Homo sapiens
  SIMILAR (164)..(196): 901254mologous to Homo sapiens putative p150,accession number U93565,Smith-Waterman Score=41.
atggataaattcctcgacacatacactctcccaagactaaaccaggaagaagttgaatctctgaatagaccaataacaggctctgaaattgaggcaataatcaatagcttactaaccaaaaaaactccaggaccagatggattcacagccgagttctaccagagtgttggaagttctggccagggcaatcgggcaatcaggcaggagaaggaaataaagggtattcaattaggaaaagaggaagtcaaattgtccctgtttgcagacgacatgattgtttatctagaaaaccccatcatctcagcccaaaatctccttaagctgataagcaaattcagcaaagtctcaggatacaaaatcaatgtacaaaaatcacaagcattcttatacacctacaacagacaaacagagagccaaatcatgggtgaactcccattcacaattgcttcaaagagaataaaatacctaggaatccaacttacaagggatgtgaaggacctcttcaaggagaactacaaaccactgctcaaggaaataaaagaggacacaaacaaatggaagaacattccatgctcatgggtaggaagaatcaatatcgtgaaaatggccatactgcccaaggtaatttacagattcaatgccatccccatcaagctaccaatgactttcttcacagaattggaaaaaactactttaaagttcatatggaaccaaaaaagagcccgcattgccaagtcaatcctaagccaaaagaacaaagctggaggcatcacactacctgacttcaaactatactacaaggctacagtaaccaaaacagcatggtactggtaccaaaacagagatatagatcaatggaacagaacagagccctcagaaataatgctgcatatctacaactatctgatctttgacaaacctgagaaaaacaagcaatggggaaaggattccctatttaataaatggtgctgggaaaactggctagccatatgtagaaagctgaaactggatcccttccttacaccttatacaaaaatcaattcaagatggattaaagatttaaacgttaaacctaaaaccataaaaaccctagaagaaaacctaggcattaccattcaggacataggcgtgggcaaggacttcatgtccaaaacaccaaaagcaatggcaacaaaagacaaaattgacaaatgggatctaattaaactaaagagcttctgcacagcaaaagaaactaccatcagagtgaacaggcaacctgttgggagaaaattcaggcaacctgaatgggagaaaatttttgcaacctactcatctgacaaagggctaatatgcagaatctacaacaaactcaaacaaatttacaagaaaaaaacaaacaaccccatcaaaaaatgcagaaacccagtggaatcctctgaggccttgaaagatagtggacccaccagatggaaggaccataggtccctaaatgagtatcgctaccatctactctcccatcccccaccttcttgcattgctctgggaatgagcaagaaataa

SEQ ID NO: 7339 - DNA, 2361 bp, Homo sapiens
  SIMILAR (898)..(2172): 831254mologous to Homo sapiens putative p150,accession number U93574,Smith-Waterman Score=1772.
atgtgggaaagtttggaacttcacggagacttgttgaatgattttgaccaaaatgctaatagtgatatgggtagtgaagtccaggctgagttgagctcagatagaaatgagaaagttattgggaactacagtaaaggtcactcttgctattctttagctaaaagactgatagcattgtgcccttgctgtagagatctatggaactttgaacttgagagagatgatttaaggtatctggcagaagaaatttctaagcagcaaagcactcaagatgtggtctggctgctcctcacagcgtacagtcgtatgtgttcacaaagagatggtctgaaattggaacttatgtttaaaagggaaacagagcataaaagtttggaaaatttgcagcctgaccatgtggttgaaaaaaaaaaagagccattttctggggacaaattcaagctggctgcagaaatttgcataagtaaagacaaaccaaatgttaacagccaagacaatggggaaaatgtctccagggcatgcctggaggcctacgagggaaaaaaggttttgtgggccatgcccagggccctgctgctctgtgccactttgggacatgatgccctgcaacccagcccctccagctccagccatggcaaaaaggagccaagatacagcttgggctgttgcttcggagggtgcaaggcccaggctttggcagcttccacctccttcaatcctatcaccaacaggcacctaaggttgtttgagctggccaaggactatatgaatggaacaggaagatatagagttgtcaaacacatgatctttcctgttggtgatgcttataagaagaaaggactcattcctgcccatcaccaggtcatcatagccgaacttgccaccaagaattccaaactaaaccaggaagacattgaatccctgaacagaccaataacaggttctgaaattgaggcaataattaatagcctaccaaccaaaaaaagtccaggaccagatggattcacagccgatttctaccagaggtacaaacaggagctagtaccattccttctgaaactattccaatcaatagaaaaagagggaatcctccctaattcatttgatgaggccagcatcatcctgataccaaagcctggcagagacacaacaaaaaaagagaattttagaccaatatccctgatgaacattgatgcaaaaattctggcaaaccaaatccagcagcagatcaaaaagtttatccaccacgatcaagttggcttcatccctgggatgcaaggctggttcaacatacacaaatcaataaatgtaatccagcatataaacagaaccaaagacaaaaaccacacgattatctcaacagatgcagaaaaggccttcgacaaaattcaacagcccttcatgctaaaaactctgaataaactaggtattgatgggacgtatctcaaaataataagagctatttatgatgaacccacagccaatatcatactgaatgggcaaaaactggaagcattccctttgaaaactggcacaagacagggatgtcctctctcaccactcctattcaacatagtattggaagttctggccagggcaatcaagcaggataaagaaatacaggatattcagttaggaaaagaagtcaaattgtccctatttgcagatgtcatgattgtatatttagaaaactccatcgtctcagtccaaaatctccttaagctgataagtaacttcagcgaagtctcaggatacaaaatcaatgtgcaaaaatcacaagcattcctctacaccaataaaagacaaagagagagccaaatcatgagtgaactcccattcacaattgcttcaaagagaataaaatacctaggaatccaacttacaagggatgtgaaggacctcttcaaggagaactacaaaccactgctcaatgaaataaaagaggacacaaacaaatggaagaacattccatgctcatggattggaagaatcaatatcgtgaaaatggccatactgcccaagataatttatgcagccaaaaaacacatgaaaaaatgctcatcatcactggccatcagagaaatgcaaatcaaaaccacaatgagataccatctcacaccagttagaatggcgatcattaaaaagtcaggaaacaacagaagtacccgtggcctgctcagctgtgactctgctgacctcaggacctcactggtcaaggtatgtagggacccttgcaggagacttggtaatggtgaaatgatcctatcgttacattatctatggagcaacaactttgtacagagaaccagctgcttggctttttctcccagtgcccaggatgctgctgatgcggccgtgtaa

SEQ ID NO: 7340 - DNA, 6024 bp, Homo sapiens
  SIMILAR (837)..(196): 931254mologous to Homo sapiens putative p150,accession number U93567,Smith-Waterman Score=1102.
gttttagggtacatgtgcacattgtgcaggttagttacatatgtatacatgtgccatgctggtgcactgcaccactaactcgtcatctagcattaggtatatctcccaatgctatccctcccccctcccccctccccaccatagtccccagagtgtgatattccccttcctgtgtccatgtgatctcattgttcaattcccacctatgagtgagaatatgcggtgtttggttttttgttcttgcgatagtttactgagaatgatggtttccaatttcatccatgtccctacaaaggatatgaactcatcattttttatggctgcatagtattccatggtgtatatgtgccacattttcttaatccagtctatcattgttggacatttgggttggttccaagtctttgctattgtgaatagtgccgcaataaacatacgtgtgcatgtgtctttatagcagcatgatttatagtcctttgggtatatacccagtaatgggatggctgggtcaaatggtatttctagttctagatccctgaggaatcgccacactgacttccacaatggttgaactagtttacagtcccaccaacagtgtaaaagtgttcctatttctccgcatcctctccagcacctgttgtttcctgactttttaatgattgccattctaactggtgtgagatgatatctcatagtggttttgatttgcatttctcttgatggccagtgatgatgagcatttttttcatgtgtctgtatggctgcataaatgtcttcttttgaaaagtgtctgttcatattttttgcccactttttgatggggttgtttgatttttttcctgtaaatttgtttgagttcattgtagattctggatattagccctttgtcacatgagtaggttgcgaaaattttctcccattttgtaggttgcttgttcactctgatggtagtttcttttgctgtgcagaagctctttagtttaattagatcccatttgtcaattttggcttttgttgccattgcttttggtgttttagacatgaagtccttgcccatgcctatgtcctgaatggtaatgcctaggttttcttctagggtttttatggttttagttgtaacatttaagtctttaatccatcttgaattaatttttgtataagctgtaaggaagggatccagtttcagctttctacatatggctagccagttttcccagcaccatttattaaatagggaatccttttgccattgtttgtttttctcaggtttttcgaagatcagatggttgtaggtgtatggtattatttccaagggctctattctgttccactggtctatatctctgttttggtaccagtaccatgctgttttggtaccagtaccatccaggctgttttggttactgtagccttgtagtatagtttgaagtcaggtagcgtgatgcctccagttttgttcttttggcttagggatgacttggcaatgagggctctcttttggttccatatgaactttaaagtagttttttccaattctgtgaagaaagtcattggtagcttgatggggatggcattgaatctgtaaattaccttgggcagtatggccattttcacgagattgattcttcctcctacccatgagcatggaatgttcttccatttgttttgtgtcctcttttatttccttgagcagtggtttgtagttctccttgaagaggtccttcacatcccttgtaagttggattcctaggtattttattctctttgaagcaattgtgaatgggattgcactcatgatttggctctctgtttgtctgttgttggtgtataagaatgcttgtgcatttttgtacattgattttgtatattttgtatcctgagactttgctgaagttgcttatcagcttaaggagattttgggctgagacaatggggttttctagatatacaatcatgtcatctgcaaacagggacaatttgacttcctcttttcctaattgaatacccttggtttccttctcctgcctaattgccctggccagaacttccaacactatgttgaataggagtggtgagagagggcatccctgtcttgtgccagttttcaaagggaatgcttcccatttttgcccattcagtatgatattggctgtgagtttgtcatagatagctcttattattttgagatacatcccatcaataccgaatttattgagagtttttagcatgaagggttgttgaattttgtcaaaggccttttctccatctattgagataatcatgtggtttttgtcgttggttctgtttatatgctggattacatttatcgatttgcgtacattgaaccagccttgcatcccagggatgaagcccacttgatcatggtggataagctttttgatgtgctgctggattcggtttgccagtattttattgaggatttttgcatcagtgttcatcaagggtattggtctaaaattctcttttttggttgtgtctctgcccagctttggtatcaggatgatgctggcctcatcaaatgagttagggaggattccttctttttctattgattggaatagtttcagaaggaatggtaccagttcctccttgtacctctggtagaattcggctgtgaatccatctggtcctggactctttttggttggtaagctattgattattgccacaatttcagatcctgttattggtctattcagagattcaacttcttcctggtttggtcttgggagggtgtatgtctccaggaatttatccatttcttctagattttctagtttctttgcgtagaggtttttatagtattctctgatggtagtgtgtatttctgtgggatcggttggtgatatcccctttatcattttttattgtgtctatttgattcttctctctttttttctttattagtcttgctagcggtctatcaattttgttgatcttttcaaaaaaccagctcctggattcattgatttttttgaagggttttgttgtgtctctatttccttcagttctgctctgattttagttatttcttgccttctgctagcttttgaatgtggttgctcttgcttctctagttcttttaattgtgaatgttagggtgtcaattttggatctttcctgctttctcttgtgggcatttagtgctataaatttccctctacacactgctttgaatgcgtcctagagattctggtatgttgtgtctttgttctcgttggtttcaaagaacatctttatttctgccttcatttcgttatgtacccagtagtcattcaggagcaggttgttcagtttccatgtagttgagcggctttgagtgagattcttaatcctgagttctagtttgattgcactgtggtctgagagatagtttgttataatttctgttcttttacatttgctgaggagagcttcacttccaagtatgtggtcaattttggaatagctgtggtgtggtgctgaaaaaaatgtatattctgttgatttggggtggagagttctgtagatgtctattaggtctgcttggtgcagagctgagttcaattcctgggtatccttgttgactttctgtctcgttgatctgtctaatgttgacagtggggtgttaaagtctcccattattaatgtgtgggagtctaagtctctttgtaggtcactcaggacttgctttatgaatctgggtgctcctgtattgggtgcatacatatttaggatagttagctcctcttgttgaattgatccctttaccatcatgtaatggccttctttgtctcttttgatctttgttggtttaaagtctgttttatcagagactaggattgcaacccctgcctttttttgttttccatttgcttggtagatcttcctccatccttttattttgagcctatgtgtgtctctgcacatgagatgggtttcctgaatacagcacactgatgggtcttgactctttatccaacttgccagtctgtgtcttttaattggagaatttagtccatttacatttaaagttaatattgttatgtgtgaatttgatcctgtcattatgatgttagctggtgattttgctcgttagttgatgcagtttcttcctagtctcgatggtctttacattttggcatgattttgcagtggctggtaccggttgttcctttccatgtttagcgcttccttcaggagctcttttagggcaggcctgctggtgacaaaatcggtcagcatttgcttgtctgtaaagtattttatttctccttcacttatgaagcttagtttggctggatatgaaattctgggttgaaaattcttttctttaagaatgttcaatattggcccccactctcttctggcttgtagggtttctgccgagagatccgctgttagtctgatgggcttccctttgagggtaactcgacctttctctctggctgcccttaacattttttccttcatttcaactttggtgaatctgacaattatgtgtcttggagttgctcttctcgaggagtatctttgtggcgttctctgtatttcctgaatctgaacgttggcctgccttgctagattggggaaagtctcctggataatatcctgcagagtgttttccaacttggttccattctccgcatcactttcaggtacaccaatcagacgtagatttggtcttttcacatagtcccatatttcttggaggctttgctcgtttctttttattcttttttctctaaacttcccttcttgcttcatttcattcatttcatcttccattgctgataccctttcttccagttgatcgcattggctcctgaggcttctgcattcttcacgtagttctcgagccttggttttcagctccatcagctcctttaagcacttctctgtattggttattctagttatacattcttctaaatttttttcaaagttttcaacttctttgcctttggtttgaatgtcctcccgtagctcagagtaatttgagcgtctgaagccttcttctctcagctcgtcaaaatcattctccatccagctttggtccgttgctggtgaggaactgcgttcctttggaggaggagaggtgctctgcgttttagagtttccagtttttctgttctgttttttccccatctttgtggttttatctacttttggtctttgatgatggtgatgtacagatgcgttttcggtgtggatgtcctttctgtttgttagttttccttctaacagacaggaccctcagctgcaggtctgttggaataccctgccgtgtgaggtgtcagtgtgcccctgctggggggtgcctcccagttaggctgctcgggggtcaggggtcagggacccacttgaggaggcagtctgcccgttctcagatctccagctgcgtgctgggagaaccactgctctcttcaaagctgtcagacagggacatttaagtctgcagaggttactgctgtctttttgtttgtctgtgccctgcccccagaggtggagcctacagaggcaggcaggcctccttgagctgtggtgggctgcacccagttcgagcttccccggctgctttgtttacctaagcaagcctgggcaatggcgggcgcccctcccccagccttgctgcggccttgcagtttgatctcagaccgctgtgctagcaatcagcgagattccgtgggcgtaggaccctccgaaggccaggtgtgggatatagtctcgtggtgcgccgttttttaagccggtctgaaaagcgcaatattcgggtgggagtgacccgattttccaggtgcgtccgtcacccctttctttgactcggaaagggaactccctgaccccttgcgcttcccaggtgaggcaatgcctcgccctgcttcggctccgcacggtgcgcgcacccactggcctgcgcccactgtctggcactccctagtgagatgaacccggtacctcagatggaaatgcagaaatcacccgtcttctgcgtcgctcacgctgggagctgtagaccggagg

SEQ ID NO: 7341 - DNA, 462 bp, Homo sapiens
  SIMILAR (4)..(333): 591254mologous to Mus musculus semaphorin cytoplasmic domain- associated protein 3B,accession number AF127085,Smith-Waterman Score=323.
ccaaaaaagcaagaagaagaagaaggcacaacagacactgcaacatcctcatccaacaaccatgagaaggacagtggagtaggacgtacagatgaaagcttgcgaaatgatgagagctcagagcaggagaatgcagccgaggaccccaatagcacatctttgaagagcaagagagacctggggcagagcatagacactctgggaagtgttgaacttcagtacaatgagagcctcgtatctggtgaatacattgactcagactgcattggcaacccagatgaggactgtgaaagattcaggcagctcttggagctcaaatgcaagattcgaaatcatggagatgacatcacttgcgtcgactcgagtacggcagactatcggtcgtgttcgctaataggcagcacgatgtgcaacggcagccaatggaagcagcaattacgcatcatggaagaactaccatga

SEQ ID NO: 7342 - DNA, 1064 bp, Homo sapiens
  SIMILAR (99)..(482): 421254mologous to Ciona intestinalis COS41.5,accession number Z83760,Smith-Waterman Score=314.
atcgtggtgtatgtgggcgtctcctcagccggcagcttcactgtgccctgcggttgatgtccaaggttttgactgtgtgggtttgtgtctttccggcaggtgtctcctctgtgacttccctgatgtccctggcttgggtgctagcctcctatcacaagctgctgcgggactccagggacgacaagaagagcatgagctacagaggggccatcatccaggtcttctggcgcctcttcaccatctcatcccgagtgatctcttttgccctctttgcttccatcttccagctctattttgggatcttcgtggtggttcactggtgcgccatggccttctggatcatccatggcggaacagacttctgcatgtccaagtgggaggagatcctcttcaacatggtggtagggatcgtgtacattttctgctggtttaacgtcaaggaagggcggactcgatatcgaatgtttgcatattatacgatagtcttgaccgagaatgctgccttgacgttcctttggtatttttacagagacccggagaccactgactcctatgcggtgccagcactgtgttgtgtctttattagctttgtggctgggatcgcaatgatgctcttatactatggcgtgctgcatcccacaggaccacgagctaagatccttgccagctcctgttgtgccgagctgctctggggcatccctttgccccccgatgttgagcccatggcgcctgagatccctgggtaccgggggacccaggttacgcccaccagagccgtaacggaacaacaggaggatctcacggctgacacttgcttgcctgttttccaagtgagacccatggggccccctaccccgttggggcgtccttacctcccagaagggcccctcattaagattgacatgccaagaaagcgatacccagcttgggatgctcattttgtagacaggaggctgagaaggactattaacattctacaatatgtcacccccaccgcagtaggcattcgatatcgagacggaccactcctctatgagttgctacagtatgagtcttcactctaa

SEQ ID NO: 7343 - DNA, 896 bp, Homo sapiens
  SIMILAR (195)..(461): 321254mologous to Homo sapiens Human Toll protein PRO358,accession number Y05868,Smith-Waterman Score=117.
acgagcttattgctgttagtctttatatattattgtgaataagtcaattcattttcctttttccaggcattatgaaaaacctctatttcagagtcattaccatagttatatggctttatttcactggtataatgacaaatgcatcaagaaaaagcaatattttattcaattctgaatgccaatggaatgaatatattctgacaaattgttcttttaccggaaagtgtgatatacctgtggacatatcacagacagcagccactgtggatgtaagtttcaatttctttagagttctcttacagtctcacacgaaaaaagaagagtggaaaataaaacatctggacctcagtaacaatctcatatcaaaaataaccttaagcccttttgcatatttacatgctttggaagtgttaaacctcagcaacaatgccatccactccctctcattggatctactcagtcctaagtcctcatgggtgaaacgccacagaagcagcttcagaaacaggtttccattgctgaaggtgctcattcttcaaagaaataaactcagtgacactcccaaggagtgtttgaaagctcagagcaaggatgatgcttgtagccagttacgcctgaccggctatgtcactgacttgtggttccggtgcagtaccttctacttagtgaaagtaaagatgtctcgaagtcggagtccttctccaataagatgtggattgccaagtttagaccaacagaccttccaggactggcttaaggagtgtgggattgagtccattctgcacgaacacacagacgtgagcacacacacacacacacacacacattaccacagatactgtcaaactgaaaaggcccaagatgtggctgtgggcagttttactttgaatatgtaa

SEQ ID NO: 7344 - DNA, 277 bp, Homo sapiens
  SIMILAR (1)..(96): 961254mologous to Homo sapiens Human aspartate protease psl 2 protein,accession number B10548,Smith-Waterman Score=174.
acagccgctcaggaagcaatcttgcatgcgtctggaaatggcacaaccaaggactactgcatgctttataacccttattggacagctcttccaaacttccattagtttgatgaatctgacttccacaccactatgcaacctttctgatattcctcctgttggcataaagagcaaagcagttgtggttccatggggaagctgccattttcttgaaaaagccagaattgcacagaaaggaggtgctgaagcaatgttagttgtcaataacagtgtccta

SEQ ID NO: 7345 - DNA, 845 bp, Homo sapiens
  SIMILAR (159)..(191): 1001254mologous to Homo sapiens Human aspartate protease psl 2 protein,accession number B10548,Smith-Waterman Score=58.
gcggccgctgtagttgcggcggtccagtcgtagcccggccgcccgcgcctgtccggtccggtccggccacggaggcagcgcagcggcgggactccgagcctaccccgccgagtgagctgcgccgcaccgtgccgtcccacccggcacccaccagtccgatggggccgcagcggcggctgtcccctgccggggacagccctactctggggcttcctgctccagctgacagccgctcaggaagcaatcttgcatgcgtctggaaatggcacaaccaaggactactgcatgctttataacccttattggacagctcttccaagtaccctagaaaatgcaacttccattagtttgatgaatctgacttccacaccactatgcaacctttctgatattcctcctgttggcataaagagcaaagcagttgtggttccatggggaagctgccattttcttgaaaaagccagaattgcacagaaaggaggtgctgaagcaatgttagttgtcaataacagtgtcctatttcctccctcaggtaacagatctgaatttcctgatgtgaaaatactgattgcatttataagctacaaagactttagagatatgaaccagactctaggagataacattactgtgaaaatgtattctccatcgtggcctaactttgattatactatggtggttatttttgtaattgcggtgttcactgtggcattaggtggatactggagtggactagttgaattgattgcatgtcgtggcaaaaacatggaagtgagacttatttttctctctggactgtgcatagcagtagctgttgtttgggctgtgtttcgaaatgaagacag

SEQ ID NO: 7346 - DNA, 3399 bp, Homo sapiens
  SIMILAR (322)..(2382): 911254mologous to Homo sapiens pM5 (3' partial),accession number U91318,Smith-Waterman Score=3192.
atgctggtgggccagggcgcggggccgctggggcccgcggtggtcaccgccgcggtggtgctgctgctgagcggcgtggggccggcgcacggctcggaggacatcgtggtgggctgcggtggcttcgtcaagtcggacgtggagatcaactactctctcatcgagataaagctgtacaccaagcatgggactttgaaataccagacagactgtgcccctaataatggttactttatgatccctttgtatgataaggaccatttggcaatgtctagagacgtttttgttgtgacatctgtggctgtgcgctacagtcacccaggggatttcattctgaagattgagcctcccctagggtggagttttgagccgacgaccgtggagctccatgtggatggagtcagtgacatctgcacaaagggtggggacatcaactttgtcttcactgggttctctgtgaatggcaaggtcctcagcaaagggcagcccctgggtcctgcgggagttcaggtgtctctgagaaacactgggaccgaagcaaagatccagtccacagttacacagcctggcggaaattcatgcctgtcacctctgtcaaacccagtcgaatgttctgtgactggtccctgctgtgctacaaggattggttttatgccagaaatccttgagattaagggagacgtaagcactcctctttccgatcagcacatggagcacccctcttggcacacagcaagcaccacagtgcgtgtaaccaactccaatgccaatgcggccagtcccctcatagttgctggctacaatgtgtctggctctgtccgaagtgatggggagcccatgaaaggcgtgaagtttcttctcttttcttctttagtaactaaagagccccaagacgagagtctggtgtatttgtgctacacggtctccagagaagatggctcgttctctttctattccttgccaagtgggggctacactgtgattccgttctatcgaggggagaggattacctttgatgtggcgccttccagacttgacttcacagtggagcatgacagcttgaaaatcgagcccgtgttccacgtcatgggattctccgtcaccgggagggtcttgaacggacccgaaggagatggtgttccagaagcagtagtcaccctgaataaccaaatcaaagttaaaacaaaagctgatggctcattccgccttgagaacataaccacagggacatacaccatccatgctcagaaagagcacctctactttgaaacggtcaccatcaaaattgcaccaaacacacctcagctggctgacattgttgcaacagggttcagtgtctgtggtcagatatcaatcattcgcttccccgacaccgtcaagcagatgaataaatacaaagttgtcctgtcatctcaagacaaggacaagtctttggtcaccgtggagacagatgctcatggatcattttgttttaaagcaaacccagggacttacaaagtgcaggtgatggttcctgaggcagaaaccagagcagggctgacgttgaaaccccagacatttcctcttactgtgaccgacaggcctgtgatggatgtggcctttgtacagttcttggcatcagtttctgggaaagtctcttgtttggacacctgtggtgacttgctggtgactctacagtccctgagccgccagggtgagaagcggagcctccagctctccggcaaggtcaacgccatgactttcacctttgacaacgtgctccctggaaaatacaaaataagcatcatgcatgaggattggtgctggaagaacaagagcctggaggtggaagtgctggaggatgacgtgtctgcagttgagttcaggcagacgggctacatgctgagatgttccctgtctcacgccatcactctggaattttatcaggatggaaatgggcgtgagaatgtggggatttataacctctccaaaggagtcaaccgattctgcctgtccaagcctggtgtgtacaaagtgacccctcgctcctgccaccggtttgagcaagcgttctacacctatgacacgtcttcacctagtatcttgacattgacagccattcgccaccatgtccttggaactatcaccaccgacaaaatgatggatgtcactgtgactatcaagtcttccatcgacagtgaacccgccttggtcttaggccctctgaagtctgtgcaggagctgcggagggagcagcagctggctgagatcgaggcccgcaggcaggagagggagaaaaacggcaaagaggaaggcgaagaaagaatgaccaagcctcccgtgcaggagatggtagatgagttacaaggccccttctcgtatgatttctcttactgggcgcgtgtcctctgttttgtggggacaggacccgccaaactgaagtatattaattattttaggtctggagagaaaatcactgttacaccgtcatctaaagagctgctcttttatcccccttcaatggaagccgttgtcagtggagaaagctgcccagggaagctgatcgagatccacgggaaggcaggcctgtttttagaaggccagatccaccccgagttggaaggagtcgagattgtcatcagtgaaaagggggcaagttcaccgctgatcacagtctttactgatgacaaaggtgcctacagtgttggccccctgcacagtgacctggagtacacggtgacctcacagaaggagggctatgttctgactgcggtggaaggaaccatcggagacttcaaggcctatgccctggcaggcagccctggccagtattacttcaaacccatgatgaaggagttccggtttgagccatcctcacagatgatcgaggtgcaggaaggccagaacctgaagatcaccatcacggggtaccgaaccgcttacagttgctatggcacagtgtcttccttaaacggagagcccgaacaaggggttgccatggaagcggtgggccagaacgactgcagcatttacggagaagacaccgtgacagacgaagagggcaagttcagattacgtggattgctggttgggaataatgacatcgatgatgtaaacatcatagttttccggcagattaatcaatttgatttaagtggaaatgtgatcacttcctctgaataccttcctacgttatgggtcaagctttacaaaagcgaaaacctcgacaatccaatccagacagtttcccttggccagtccctgttcttccatttccccccactgctcagagatggcgagaactatgttgtgcttctggactccacactccccagatcccagtatgactacatcttgcctcaagtttctttcaccgcagtgggctaccataaacacttcaccttgatttttaatcccacg

SEQ ID NO: 7347 - DNA, 3129 bp, Homo sapiens
  SIMILAR (2334)..(2375): 641254mologous to Homo sapiens polycystic kidney disease 1 protein,accession number L43619,Smith-Waterman Score=50.
atggcaagcaccacagtgcgtgtaaccaactccaatgccaatgcggccagtcccctcatagttgctggctacaatgtgtctggctctgtccgaagtgatggggagcccatgaaaggggtgaagtttcttctcttttcttctttagtaactaaagagccccaagacgagagtctggtgtatttgtgctacacggtctccagagaagatggctcgttctctttctattccttgccaagtgggggctacactgtgcccgtgttccacgtcatgggattctccgtcaccgggagggtcttgaacggacccgaaggagatggtgttccagaagcagtagtcaccctgaataaccaaatcaaagttaaaacaaaagctgatggctcattccgccttgagaacataaccacagggacatacaccatccatgctcagaaagagcacctctactttgaaacggtcaccatcaaaattgcaccgaacacacctcagctggctgacattgttgcaacagggttcagtgtctgtggtcggatatcaatcattcgcttcccggacaccgtcaagcagatgaataaatacaaagttgtcctgtcatctcaagacaaggacaagtctttggtcaccgtggagacagatgctcatggatcattttgttttaaagcaaaaccagggacttacaaagtgcaggtgatggttcctgaggcagaaaccagagcagggctgacgttgaaaccccagacatttcctcttactgtgaccgacaggcccgtgatggatgtggcctttgtacagttcttggcatcagtttctgggaaagtctcttgtttggacacctgtggtgacttgctggtgactctacagtccctgagccgccagggtgagaagcggagcctccagctctccggcaaggtcaacgccatgactttcacctttgacaacgtgctccctggaaaatacaaaataagcatcatgcatgaggattggtgctggaagaacaagagcctggaggtggaagtgctggaggatgacgtgtctgcagttgagttcaggcagacgggctacatgctgagatgttccctgtctcacgccatcactctgctacttcgctgcctgtgttcaccatacctcttgtcattgtcatcgtctctcacgtattctggtcttatactcatcgtgtcgcttattcgtggttactgcctactcgtactcatctatcggtgttttgatgattctttcaatgctgaccgggctctggtcctggggtttggaggagggggaccctgggggttggtggcctgtcccagcctgagctggcaagattccgaatgccaggcccctcaagtgtgcaacagggcacagggtgacctcgtgggcagagacgtctcccacaacctgctccgggcgctggacgttgggctcctggcgaacctctcggcgctggcagagctggatataagcaacaacaagatttctacgttagaagaaggaatatttgctaatttatttaatttaagtgaaataaacctgagtgggaacccgtttgagtgtgactgtggcctggcgtggctgccgcgatgggcggaggagcagcaggtgcgggtggtgcagcccgaggcagccacgtgtgctgggcctggctccctggctggccagcctctgcttggcatccccttgctggacagtggctgtggtgaggagtatgtcgcctgcctccctgacaacagctcaggcaccgtggcagcagtgtccttttcagctgcccacgaaggcctgcttcagccagaggcctgcagcgccttctgcttctccaccggccagggcctcgcagccctctccgagcagggctggtgcctgtgtgggtcagcccagccctccagtgcctccttcgcctgcctgtccctctgctccggccccccgccgcctcctgcccccacctgtaggggccccaccctcctccagcacgtcttccctgcctccccaggggccaccctggtggggccccacggacccctggcctccggccagctagcagccttccacatcgctgccccgctccctgtcactgccacacgctgggacttcggagacggctcccccgaggtggatgccgctgggccggctgcctcgcatcgctatgtgctgcctgggcgctatcacgtgacggccgtgctggccctggggaccggctcagccctgctggggacagacgtgcaggtggaagcggcacctgccgccctggagctcgtgtgcccgtcctcggtgcagagtgacgagagcctcgacctcagcatccagaaccgcggtggttcaggcctggaggccgcctacagcatcgtggccctgggcgaggagccggcccgagcggtgcacccgctctgcccctcggacacggagatcttctctggcaatgggcactgctaccgcctggtggtggagaaggcggcctggctgcaggcgcaggagcagtgtcgggcctgggccggggccaccctggcaatggtggacagtcccgccgtgcagcgcttcctggtctcccgggtcaccaggagcctagacatgtggatcggcttctcgactgtgcagggggtggaggtgggcccagcgccgcagggcgaggccttcagcctggagagctgccagaactggctgcccggggagccacacccagccacagccgagcactgcgtccggctcgggcccaccgggtggtgtaacaccgacctgtgctcagcgccgcacagctacgtctgcgagctgcggcctggaggcccagtgcaggatgccgagaacctcctcgtcatggtattcccgggcctgcgtctgagccgtgaagccttcctcaccacggccgaatttgggacccaggagctccggcggcccgcccagctgcggctgcaggtgtaccggctcctcagcacagcagggaccccggagaacggcagcgagcctgagagcaggtccccggacaacaggacccagctggcccccgcgtgcatgccagggggacgctggtgcgctggagccaacatctgcttgccgctgacgcctcctgccaccccaggcctgcgccaatgctgcacagaagtgactatttcaacacccctggagaaagaggaggagaaaattccgtga

SEQ ID NO: 7348 - DNA, 390 bp, Homo sapiens
  SIMILAR (169)..(387): 731254mologous to Homo sapiens pm5 protein,accession number X57398,Smith-Waterman Score=268.
atggttaatattgagtgtcaacttgattggatcgaagggggcaaagtattgatcctggctctcatcacttcatcatctaattctacagatgagaacactgaggcttggggagatattaaatgtcttatccagattgcatgcattgaagaaaagcttcctgaggtctcaccagaagcagatgctggcatcatgcttcttgtacagtctgcagaacttaaaacaaaagctgatggctcattccgccttgagaacataaccacagggacatacaccatccatgctcagaaagagcacctctactttgaaacggtcaccatcaaaattgcaccgaacacacctcagctggctgacattattgcaacaggggaggaagggcagctgctgatttga

SEQ ID NO: 7349 - DNA, 4093 bp, Homo sapiens
  SIMILAR (1)..(1170): 891254mologous to Homo sapiens pm5 protein,accession number X57398,Smith-Waterman Score=1774.
cgcgacctcgtggtgggctgcggtggcttcgtcaagtcggacgtggagatcaactactctctcatcgagataaagctgtacaccaagcatgggactttgaaataccagacagactgtgcccctaataatggttactttatgatccctttgtatgataagggggatttcattctgaagattgagcctcccctagggtggagttttgagccgacgaccgtggagctccatgtggatggagtcagtgacatctgcacaaagggtggggacatcaactttgtcttcactgggttctctgtgaatggcaaggtcctcagcaaagggcagcccctgggtcctgcgggagttcaggtgtctctgagaaacactgggaccgaagcaaagatccagtccacagttacacagcctggcggaaagtttgcattttttaaagttctgcctggagattatgaaatcctcgcaactcatccaacctgggcgttgaaagaggcaagcaccacagtgagtgtaaccaactccaatgccaatgcggccagtcccctcatagttgctggctacaatgtgtctggctctgtccgaagtgatggggagcccatgaaaggcgtgaagtttcttctcttttcttctttagtaactaaagaggatgtcctgggctgcaatgtctcaccagtgcctgggttccagccccaagacgagagtctggtgtatttgtgctacacggtctccagagaagatggctcgttctctttctattccttgccaagtgggggctacactgtgattccgttctatcgaggggagaggattacctttgatgtggcgccttccagacttgacttcacagtggagcatgacagcttgaaaatcgagcccgtgttccacgtcatgggattctccgtcaccgggagggtcttgaacggacccgaaggagattggtgttccagaagcagtaagtcaccctgaataaccaaatcaaagttaaaacaaaagcttgatgggctcattcccgccttgagaacataaccacagggacatacaccatccatgctcagaaagagcacctctacttttgaaacggtcaccatcaaaattgcaccaaacacacctcagctggctgacattgttgcaacagggttcagtgtctgtggtcagatatcaatccattcggttccccgacaccgtcaagcagatgaataaatacaaagttgtcctgtcatctcaagacaaggacaagtctttggtcaccgtggagacagatgctcatggatcattttgttttaaagcaaacccagggacttacaaagtgcaggtgatggttcctgaggcagaaaccagagcagggctgacgttgaaaccccagacatttcctcttactgtgaccaacaggcccatgatggatgtggcctttgtacagttcttggcatcagtttctgggaaagtctcttgcttgaacacctgtggtgacttgctggtgactctacagtccctgagccgccagggtgagaagcggagcctccagctctccggcaaggtcaacgccatgactttcacctttgacaacgtgctccctggaaaatacaaaataagcatcatgcatgaggattggtgctggaagaacaagagcctggaggtggaagtgctggaggatgacatgtctgcagttgagttcaggcagacgggctacatgctgagatgttccctgtctcacgccatcactctggaattttatcaggatggaaatgggcgtgagaatgtggggatttatagcctcttcaaaggagtcaaccgattctgcctgtccaagcctggtgtgtacaaagtgacccctcgctcctgccaccggtttgagcaagcgttctatatctatgacacgtcttcacctagtatctttacattgacagccattcgccaccatgtccttggaactatcaccaccgacaaaatgatggatgtcactgtgactatcaagtcttccatcgacagtgaacccgccttggtcttaggccctctgaagtctgtgcaggagctgcggagggagcagcagctggctgagatcgaggcccgcaggcaggagagggagaaaaacggcaatgaggaaggcgaagaaagaatgaccaagcctcccgtgcaggagatggtagatgagttacaaggccccttctcgtatgatttctcttactgggcgcggtctggagagaaaatcactgttacaccgtcatctaaagagctgctcttttatcccccttcaatggaagccgttgtcagtggagaaagctgcccagggaagctgatcgagatccatgggaaggcaggcctgtttttagaaggccagatccaccccgagttggaaggagtcgagattgtcatcagtgaaaagggggcaagttcaccgctgatcacagtctttactgatgacaaaggtgcctacagtgttggccccctgcacagtgacctggagtacacggtgacctcacagaaggagggctatgttctgactgcggtggaaggaaccatcggagacttcaaggcctatgccctggcaggcgtaagctttgagataaaagctgaggatgaccagcccctcccgggagtcctcttatccctgagcggtggcctgtttcgttccaacctcttgacccaggacaacggcattctgacattctcaaacctgagccctggccagtattacttcaaacccatgatgaaggagttccggtttgagccatcctcacagatgatcgaggtgcaggaaggccagaacctgaagatcaccatcacggggtaccgaaccgcttacagttgctatggcacagtgtcttccttaaacggagagcccgaacaaggggttgccatggaagcggtgggccagaacgactgcagcatttacggagaagacaccgtgacagacgaagagggcaagttcagattacgtggattgctgccgggatgtgtgtaccacgttcagctcaaggcagaaggcaacgaccacattgagcgggcgctcccccaccatagggtgattgaggttgggaataatgacatcgatgatgtaaacatcatagttttccggcagattaatcaatttgatttaagtggaaatgtgatcacttcctctgaataccttcctacattatgggtcaagctttacaaaagcgaaaacctcgacaatccaatccagacagtttcccttggccagtccctgttcttccatttccccccactgctcagagacggcgagaactatgttgtgcttctggactccacactccccagatcccagtatgactacatcttgcctcaagtttctttcaccgcagtgggctaccataaacacaccaccttgatttttaatcccacgaggaagctgcctgaacaggacatcgcacaaggatcctacattgccctgccattgacgctgctggttctgctggccggttacaaccatgacaagctcattcctttgctgctgcagttgacaagccggctacagggagtccgcgcgctcggccaggcagcctctgacaatagcggcccagaagatgcaaagagacaagccaagaaacagaagacaaggcggacttgaggaggaaggggacagttgcagtctcacttgggacaggccacagccaggggtccggccactacccgcccgtgggataaaagccaaaagcatgcgtcagctaacttcagcctgtgctgctgggcccgcaccccatgtcccttgtcactgtgacatcctgcacccatcctcacccctccgtagagcccctcgtgcaatgcaatgaatggaccctcctgtcactctgctgaacagaatttattttctgagtcaaatataatttattattattttcgtcaaagaagtatttaagctgtgctgtggtgtgagaatgtcattcttgatcttcagccttcgtttgcaaggagagttccagttgacgtggtgtttggttccatggcggggtaccctggggattcatctgttttcttcacttccctttgcatctgagatcctgttggaaaccacagcaacctgtattcattattaggaaataaaaatcgaaaaaaaggttcattcttttgtgttgtagttttg

SEQ ID NO: 7350 - DNA, 460 bp, Homo sapiens
  SIMILAR (159)..(191): 1001254mologous to Homo sapiens Human aspartate protease psl 2 protein,accession number B10548,Smith-Waterman Score=58.
gcggccgctgtagttgcggcggtccagtcgtagcccggccgcccgcgcctgtccggtccggtccggccacggaggcagcgcagcggcgggactccgagcctaccccgccgagtgagctgcgccgcaccgtgccgtcccacccggcacccaccagtccgatggggccgcagcggcggctgtcccctgccggggacagccctactctggggcttcctgctccagctgacagccgctcaggaagcaatcttgcatgcgtctggaaatggcacaaccaaggactactgcatgctttataacccttattggacagctcttccaagtaccctagaaaatgcaacttccattagtttgatgaatctgacttccacaccactatgcaacctttctgatattcctcctgttggcataaagagcaaagcagttgtggttccatggggaagctgccattttcttgaaaaag

SEQ ID NO: 7351 - DNA, 468 bp, Homo sapiens
  SIMILAR (251)..(463): 881254mologous to Mus musculus transient receptor potential- related protein,accession number AF149013,Smith-Waterman Score=337.
tttcgtcggaggcgggcgcgggcgcgtccctgtggccagtcaccggaggagttggtcgcacaattatgaaagatttcgttttttgctgctagcgcctgagctgagttagttctgagaaggtttccctgggcgttccttgtccggcggcctctgctgccgcctccggagacgcttcccgatagatggctacaggccgtggaggaggaggaggtggagttgctgcccttccggagtccgccccgtgaggagaatgtcccacaaatcctggatagaaagcactttgaccaagagggaatgtgtatatattataccaagttccaaggacccttacagatgccttccaggatgtcaaatttgtcagcaactcgtcaggtgtttttgtggtcgtttggtcaagcaacatgcttggtttactgcaagtcctgccatgaaatacttagatgtgaacttggtggcccatttttacag

SEQ ID NO: 7352 - DNA, 1805 bp, Homo sapiens
  SIMILAR (1220)..(1318): 1001254mologous to Homo sapiens Human calcium channel SOC- 2/CRAC-1,accession number Y95435,Smith-Waterman Score=174.
aaacaaggtccaactaatccaatgctgtttcatcttgttcgagacgtcaaacagggaaatcttcctccaggatataagatcactctgattgatataggacttgttattgaatatctcatgggaggaacctacagatgcacctatactaggaaacgttttcgattaatatataatagtcttggtggaaataatcggaggtctggccgaaatacctccagcagcactcctcagttgcgaaagagtcatgaatcttttggcaatagggcagataaaaaggaaaaaatgaggcataaccatttcattaagacagcacagccctaccgaccaaagattgatacagttatggaagaaggaaagaagaaaagaaccaaagatgaaattgtagacattgatgatccagaaaccaagcgctttccttatccacttaatgaacttttaatttgggcttgccttatgaagaggcaggtcatggcccgttttttatggcaacatggtgaagaatcaatggctaaagcattagttgcctgtaagatctatcgttcaatggcatatgaagcaaagcagagtgacctggtagatgatacttcagaagaactaaaacagtattccaaacagccgctcaggaagcaatcttgcatgcgtctggaaatggcacaaccaaggactactgcatgctttataacccttattggacagctcttccaaacttccattagtttgatgaatctgacttccacaccactatgcaacctttctgatattcctcctgttggcataaagagcaaagcagttgtggttccatggggaagctgccattttcttgaaaaagccagaattgcacagaaaggaggtgctgaagcaatgttagttgtcaataacagtgtcctatttcctccctcaggtaacagatctgaatttcctgatgtgaaaatactgattgcatttataagctacaaagactttagagatatgaaccagtatgtgaggctatcatatgacaccaaacctgaagtcattctgcaacttctgcttaaagaatggcaaatggagttacccaaacttgttatctctgtacatgggggcatgcagaaatttgagcttcacccacgaatcaagcagttgcttggaaaaggtcttattaaagctgcagttacaactggagcctggattttaactggaggagtaaacacaggtgtggcaaaacatgttggagatgcacctcaaagaacatgcttccagatcatctcgaaagatttgcactatcggaatagctccatggggagtgattgaaaacagaaatgatcttgttgggagagattcacccggaggagttggtcgcacaattatgaaagactcggcttctgctgctagcgccggagctgagttagttctgagaaggtttccctgggcgttccttgtccggcggcctctgctgccgcctccggagacgcttcccgatagatggctacaggccgcggaggaggaggaggtggagttgctgcccttccggagtccgccccgtgaggagaatggtactggacccacgcaggcccgggcggggaatggttctggggttgcgggcggtaaaggagagacttggcaggcaagtgtgtggggagccgcgttccatgcggcgaaggaccctcgaattgccttgaggcttccggatttgtcctctcgggacgggtgtgcagttcgttctgggcataggcttcatcaagaactgactcgcaatgttactgtggtgattatcggaaatgatccaaatgccttccaggatgtcaaatttgtcagcaactcgtcag

SEQ ID NO: 7353 - DNA, 5521 bp, Homo sapiens
  SIMILAR (474)..(5246): 1001254mologous to Homo sapiens TIAM1 protein,accession number U16296,Smith-Waterman Score=8203.
cgccccgcatcgtgcccggccccgtcgcggagatcccggacgaccgtcgcgggttgatggtcgcattccagatgtaaacagcttcagaagcctgacggtcatatggtagaatcactgtggactgagacccacctttctagacctgaagcccaggaggaggaagaggaggctggttggtaccatgggcataatgctctgaatcctagtctctcacctagtatgtgagcagtccctgcagatggcccatttggagatcttgacaaagcctcttctgtttccaatggggtttttggcgcattctcacagacttagatgaaactgtgatggccaccgcagggggcaggtgctgacatcgtccccagccctgtggctgttcatccggacatcatttccaacctcaatatctaaatgccacagtgctcttggagcaagttgggctggggaccactgttgccttttaagaccataaaaccatgggaaacgcagaaagtcaacatgtagagcacgagttttatggagaaaagcatgccagcctggggcgcaacgacacttcccgctccctgcgcctctcgcacaagacgcggaggaccaggcacgcttcctcggggaaggtgatccacaggaactccgaagtgagcacccgatccagcagcacccccagcatcccccagtccctggctgaaaatggcctggagcccttctcccaagatggtaccctagaagacttcgggagccccatctgggtggaccgagtggacatgggcttgagacctgtgtcttacactgactcttctgtcactcccagcgtagacagcagcatcgtcctcacagcagcctctgtgcagagcatgccagacactgaggagagcaggctttacggggatgacgctacatatttggctgagggaggcaggaggcagcattcctatacatccaatgggcccactttcatggagacggcgagctttaagaagaaacgctccaaatctgcagacatctggcgggaggacagcctggaattctcactctctgatctgagccaagaacatttaacaagcaacgaagaaatcttgggttccgccgaagagaaggactgcgaggaggctcgggggatggaaacgcgggcgagtccgcggcagctcagcacctgtcagagagccaattccttgggtgacttgtatgctcagaaaaactctggagtgacagcaaacatggggccggggagcaaatttgcaggctactgtcggaatttggtgtctgatattcccaatcttgcaaaccataagatgccaccagctgctgctgaagagactcctccgtacagtaattataacacacttccctgtaggaaatctcactgtctctctgaaggtgccaccaacccacaaattagccatagcaacagcatgcaaggcagaagagctaaaacaactcaggatgttaatgcaggcgagggcagtgagtttgcagacagtgggattgaaggggccactaccgacacggacctcctgtccaggcgatctaatgccaccaactccagctactcacccaccacaggccgggcctttgtgggcagcgacagcggcagcagctccaccggggatgcggctcgtcagggggtgtacgagaacttccggcgggagctggagatgagcaccaccaacagcgagagcctggaggaggccggctctgcgcacagcgatgagcagagcagcggcaccctgagctctccgggccagtcggacatcctgctgaccgccgcacagggcacggtgcgcaaggccggcgccctggccgtcaagaacttcctggtgcacaagaagaacaagaaggtggagtcagccacccggaggaagtggaagcactactgggtgtccctgaaaggatgcacgctatttttctacgagagcgacggcaggtctgggatagaccacaacagcatccccaaacacgccgtctgggtggagaacagcattgtgcaggctgtgcctgagcaccccaagaaggactttgtcttctgcctcagcaattccctgggtgatgccttcctttttcagaccactagccagacggagcttgaaaactggatcaccgccatccactctgcctgcgccactgcggtcgcgaggcaccaccacaaggaagacacgctccgactcctgaaatcagagatcaaaaaactggaacagaagattgacatggatgaaaagatgaagaaaatgggtgaaatgcagctgtcttcagtcactgactcaaagaaaaagaaaacaatattagatcagatctttgtctgggagcaaaatctcgagcagttccaaatggacctgtttcgtttccgctgttatttagccagccttcagggtggggagctgccaaaccccaaaaggcttctcgcttttgcaagtcgaccaacgaaagtggccatgggccgccttggaatcttttcggtatcatcgtttcatgccctggtggcagcacgcactggtgaaactggagtgagaagacgtactcaggccatgtccagatccgcgagcaagcgaaggagcaggttttcttctctgtggggtctggatactacctccaaaaagaagcagggacggccaagcatcaatcaggtgtttggagagggaaccgaagctgtaaagaaatctttagagggaatatttgatgacattgttccagatggcaagagggagaaagaagtggtcttacctaacgttcaccagcacaaccctgactgcgacatttgggtccacgagtatttcactccatcctggttctgtctgcccaataatcagcctgccctgacggtcgtccggccaggcgacactgcacgggacaccctggagctgatttgcaagacacatcaactggatcattctgctcattacctgcgcctgaaatttctaatagaaaacaaaatgcagctctatgttccacagcccgaggaagacatctatgagctgctgtacaaagaaattgaaatctgtccaaaagtcactcacagcatccacattgagaagtcagatacagctgctgatacttacgggttttcactttcttctgtggaagaagatggtattcgaaggctgtacgtgaatagtgtgaaggaaaccggtttagcttccaagaaaggcctgaaagcaggagatgagattcttgagatcaataatcgtgctgctgacgccctgaactcttctatgctcaaagatttcctctcacaaccctcgctgggcctcctggtgaggacctaccccgagctggaggaaggagtggagctgctggaaagcccgccccaccgagtggacggccctgccgaccttgacgagagccccctcgcctttctcaccagcaacccagggcacagcctttgcagcgagcagggcagcagtgctgagaccgctccagaggagaccgaggggccagacttggaatcctcagatgagactgatcacagcagcaagagtacagaacaggtggccgcattttgccgcagtttgcatgagatgaacccctctgaccagaacccatctcctcaggactccacggggcctcagctggcgaccatgagacaactctcggatgcagataacgtgcgcaaggtgatctgcgagctcctggagacggagcgcacctacgtgaaggatttaaactgtcttatggagagatacctaaagcctcttcaaaaagaaacttttctcacccaggatgagcttgacgtgctttttggaaatttaacggaaatggtagagtttcaagtagaattccttaaaactctagaagatggagtgagactggtacctgatttggaaaagcttgagaaggttgatcaatttaagaaagtgctgttctctctggggggatcattcctgtattatgctgaccgcttcaagctctacagtgccttctgcgccatccacacaaaagttcccaaggtcctggtgaaagccaagacagacacggctttcaaggcattcttggatgcccagaacccgaagcagcagcactcatccacgctggagtcgtacctcatcaagcccatccagaggatcctcaagtacccacttctgctcagggagctgttcgccctgaccgatgcggagagcgaggagcactaccacctggacgtggccatcaagaccatgaacaaggttgccagtcacatcaatgagatgcagaaaatccatgaagagtttggggctgtgtttgaccagctgattgctgaacagactggtgagaaaaaagaggttgcagatctgagcatgggagacctgcttttgcacactaccgtgatctggctgaacccgccggcctcgctgggcaagtggaaaaaggaaccagagttggcagcattcgtcttcaaaactgctgtggtccttgtgtataaagatggttccaaacagaagaagaaacttgtaggatctcacaggctttccatttatgaggactgggaccccttcagatttcgacacatgatccccacggaagcgctgcaggttcgagctttggcgagtgcagatgcagaggcaaatgccgtgtgtgaaattgtccatgtaaaatccgagtctgaagggaggccggagagggtctttcacttgtgctgcagctccccagagagccgaaaggatttcctaaaggctgtgcattcaatcctgcgtgataagcacagaagacagctcctcaaaaccgagagccttccctcatcccagcaatatgtcccttttggaggcaaaagattgtgtgcactgaagggggccaggccggccatgagcagggcagtgtctgccccaagcaagtctcttgggaggaggaggcggcggctggctcgaaacaggtttaccattgattctgatgccgtctccgcaagcagcccggagaaagagtcccagcagccccccggtggtggggacactgaccgatgggtagaggagcagtttgatcttgctcagtatgaggagcaagatgacatcaaggagacagacatcctcagtgacgatgatgagttctgtgagtccgtgaagggtgcctcagtggacagagacctgcaggagcggcttcaggccacctccatcagtcagcgggaaagaggccggaaaaccctggatagtcacgcgtcccgcatggcacagctcaagaagcaagctgccctgtcggggatcaatggaggcctggagagcgcaagcgaggaagtcatttgggttaggcgtgaagactttgccccctccaggaaactgaacactgagatctgactgcgtcacctgccccgtagagaatgtgtgtagatacttcctgccctaactctgcccaccctcctgtaccgtcgacaagaatgtccccttaggtcgcgctcttgcacacacggttttggcagctgacttggttctgaagccatgtagccacccaactttgtcattttcaacaacatcagaaagaattgatcagaatcccaaataaaacccaaaagtgtctaatgtattcattcattagctaactaaaagcccaaaaaagacaagacacccag

SEQ ID NO: 7354 - DNA, 1005 bp, Homo sapiens
  SIMILAR (726)..(830): 1001254mologous to Homo sapiens TIAM1 protein,accession number U16296,Smith-Waterman Score=183.
ttaagcagcgtttgttgaacaggaaaggcctctgtgatagccgtgaaagtcgaaggcaccttgcttcagagagaggaattgccaagtgctgagcacggacagccgcttggtctgcatgggcaggacgtgcctctgtgcagtacccgtgaagtgtgaggttctattttggtctgatgttccatggagatggcctggagctcgattctgaaaaccgaagacagtcaggcggcagggaggggcggcaaaggaagaggaactgcacagatttctcttcccacaaacaaatatggtccagggcttcagattctctgaagtctcacagatacccggcagcacatggtcctctgtttgtttgtcgataacatttggagacacgcgcgcctcgtaaactgtcggcctgctgtgcttcttgtcacacagcacatggcctgcctgcgtgggccctgctatggccgggggcggggtaacttccagtgagatttgactgatgacaccgtcaaatccgagccctcttcctctcccccggtcccctgctgcatgcctggcagtgtgctcagtactgggatgtggatgggcatcctgcttctccagccacgactgagccttatcttcagctttcttctctctctgattggtagcagagctgtcgtgctttgtttcacaggggtggcttttagcaattactgtccatgttgacccacattttcttctgatttcatctgacagggcacagcctttgcagcgagcagggcagcagtgctgagaccgctccagaggagaccgaggggccagacttggaatcctcagatgagactgatcacagcagcaaggtgagagattttcattttcacatcccatgctttgaaccactgaagaatcacagctgacaatgtcacctacacagctgtatgtggttaccaggcctctccatggacgaagtgtttttgcttctgagatgttgcgtcgctgtccttgctgcgttgagacgtggccgtagattttcat

SEQ ID NO: 7355 - DNA, 661 bp, Homo sapiens
  SIMILAR (411)..(1): 871254mologous to Homo sapiens PKU-alpha,accession number AB004884,Smith-Waterman Score=591.
cctttgcgccagctgctctgtgtcaagcgagggttttgctagcatcactgacatgagggttgccagagcagactgctcctccgttgcctcctttgcagcactgccatctaaaccatagaggggctgttctactcgtcgctcaaagtaatcactaattttatgtcccctaggagtgcctttcccttggctagtttcatatggttcagcttttcttttccgatttcgctggtcattctgctttttctcgggagtctctacttctttatcactcaaggatccgacgctgcacaagctctggttggaagactcactattaagtggtcccttactaacacctaatccagtaaaacctggcctccaataattcctggcgtcgtggggtcccaggctatgcaattcttccatcatttctgctgccgccgccgccgccgccgctccacgctcctcccgggaggggccccgacccgacccggctgcggaccgctccgctctccccctgggcaggcccggggcggagccggggcctctcctgagcgccgcaaccccccgcccgggcagccgccgccggcgccgggctccacgagagggcgggcgggggagggggggcacgaaggccgcagatccccgggctcgcgtacagagccaggcgcccgacgcgggc

SEQ ID NO: 7356 - DNA, 1848 bp, Homo sapiens
  SIMILAR (127)..(1845): 531254mologous to Homo sapiens ha0946 protein is Kruppel- related,accession number D31763,Smith-Waterman Score=1606.
atggcgggatccttgtcatttgaagatgtgactgtgggcttcacccaggaggagtggcagcatctggaccctgctcagatgaccctgtacagggatgtgatgctagagaactacagccacctcgtctcagtggaagtctgcaaagtggatgatcaactagagcactgtcaggaaatccaggacagacatatctggcaagctccatatatcaacaatagaacactgactatagagagaggtaacatagtaggaaaagtgtttgatttcagcatacacccacttccttccataaaaataccttgtaaatgtgacttatgtggtatgagtttgcaatacatttcagatttatttaatagtaagaaaaactatttaagaaagatgcctcatgacctcagtgcatatggaaaactattcctcaatagtaaccatgaaaaaactcatatggaagagaaaccttatgagtttattcaaaatggaaaatgtctcagtcataaggaggacttcatttcatatctgagaattcaaaatttagagcaatcttttgaatataaggaatgtgaaaaggatttctatggaaaggcagttttcattacatataagcaagcttacacaggagcgagtccttgtgtacacaatgaatgtaataaagtgttctgtaataattcaactctcatggtccataaaatgtcagaaaaaagagaaaacttttatgagtttaatgaatatgaaaaaacctttgagaagtcccctttcttgaaacataaagttcatttggaggaaatctctcctcactctacatcagagagtccacacaggagagaaaccctatgtaaggaatgtgggaaatgcttttctaggaattcacacctcataatacatcagagaactcacacaggagagcaaccctgtgaatgcaaggaatgtagaaaaagcttctatcataagtcatatcttacagtacatcagagaattcacacaggggagaaaccctatgaatgtaatcaatgtggaaaaaccttcataagcaactctgttctcacaatacatcgtaaaacatatacaggtgagaaaccctatgaatgtaatgaatgtgggaaatctttctctaggagttcatatcttacaatacatcagagaactcacccaggcgagaaaccctatgaatgtaaggtatgtagaaaaaccttttgccacaagtctgatgccactaaacatcagaagactcacctagggggaaaaccctatgaatgtactcaatgtgggaaaacttttagtcgtaactcaggcctaaaagtacatcagagaacacatgcaaaggagaaaccctatgaatatactgagtgtgggaaatccttctctgagaaatcagtcctcacagtacatcagagaatacacacaggggaaaaaccttataaatgtaatgcacgtggaaaaaccttctacaataaatcagacctaaccaaacatcagagaacacacacaggtgagaagccctgtgaatgtaaggaatgtgggaaattcttctctaggaattcataccttacaatacaccagagaatgcatacaggagacaaaccctatgtgtgtaaaaaatgtgggaaaaccttctaccataaggcagactatacagtacataagagaacacacagaggggagaaatcttattactgtaataaatgtgggaaaacctttatttgcaactcagtcctcaaatcacatcagagaacacacacaggggagaagccctatggatgtaatgagtgtgggaagtccttctctgagaaatcagtccttactgtacatcagagaatacacacaggggaaaaaccttataaatgtaatgaatga

SEQ ID NO: 7357 - DNA, 1508 bp, Homo sapiens
  SIMILAR (95)..(202): 331254mologous to Homo sapiens ha0946 protein is Kruppel- related,accession number D31763,Smith-Waterman Score=44.
atgggatccttgagtgataaagaagtagagactcccgagaaaaagcagaatgaccagcgaaagtggaaaagaaaagccgaaccacatgaaactagccaagggaaaggcactgctgggggacaatcttatcaagcatcagaaaaggataaattcacagagggaagagatagaaagacaacggaaaatgttagcaaagcgggaaacctcctgccatgggtcaggcccctcctgcaaccaatgagcagaaacagcggaaaagcaagaccaatggagctgaaaatgaaacgttaacgttagcagaataccatgaacaagaagaaatcttcaaactcagattaggtcatcttaaaaaggaggaagcagagatccaggcagagctggagagactagaaagggttagaaatctacatatcagggaactaaaaaggatacataatgaagataattcacaatttaaagatcatccaacgctaaatgacagatatttgttgttacatcttttggatagaggagaagtctgcaaagtggatgatcaactagagcactgtcaggaaatccaggacagacatatctggcaagctccatatatcaacaatagaacactgactatagagagagtacatcagagaattcacacaggggagaaaccctatgaatgtaatcaatgtggaaaaaccttcataagcaactctgttctcacaatacatcgtaaaacatatacaggtgagaaaccctatgaatgtaatgaatgtgggaaatctttctctaggagttcatatcttacaatacatcagagaactcacccaggcgagaaaccctatgaatgtaaggtatgtagcaaaaccttttgccacaagtctgatgccactaaacatcagaagactcacctagggggaaaaccctatgaatgtactcaatgtgggaaaacttttagtcgtaactcaggcctaaaagtacatcagagaacacatgcaaaggagaaaccctatgaatatactgagtgtgggaaatccttctctgagaaatcagtcctcacagtacatcagagaatacacacaggggaaaaaccttataaatgtaatgcacgtggaaaaaccttctacaataaatcagacctaaccaaacatcagagaacacacacaggtgagaagccctgtgaatgtaaggaatgtgggaaattcttctctaggaattcataccttacaatacaccagagaatgcatacaggagacaaaccctatgtgtgtaaaaaatgtgggaaaaccttctaccataaggcagactatacagtacataagagaacacacagaggggagaaatcttattactgtaataaatgtgggaaaacctttatttgcaactcagtcctcaaatcacatcagagaacacacacaggggagaagccctatggatgtaatgagtgtgggaagtccttctctgagaaatcagtccttactgtacatcagagaatacacacaggggaaaaaccttataaatgtaatgaatga

SEQ ID NO: 7358 - DNA, 688 bp, Homo sapiens
  SIMILAR (2)..(685): 821254mologous to Homo sapiens KIAA0934 protein,accession number AB023151,Smith-Waterman Score=1012.
ctctcctgttggggatgtgccattcatccgatcaggattgctggggtttgtagggccgggtagtttggtgttcgtggttgggaaaatggatggcttactgatggttagtggtcgaagacataatgctgatgacattgttgctactggattggctgtagaatcaataaagactgtttatagaggaagaattgctgtgttttctgtgtctgtattttatgatgagcgcattgtggtggttgcggaacaaagacctgatgcttctgaggaagatagtttccagcggatgatccgcgtgctgcaggcgatcgatagcattcatcaagtgggggtttattgtcttgctctggtgccagccaatacattgccaaaaactccactaggaggaatccatatatctcagacgaaacaactctttctggagggatcactgcatccttgcaacatcctcatgtgcccccatacatgtgtgacaaacttgccaaagccccggcaaaaacaaccaggtgtaggccctgcttccgtgatggttgggaatctggttgctggaaaacgtatagcacaagctgctggaagggatctgggacaaatagaagagaatgatttggtgaggaagcaccagtttctggcagagatcctacagtggcgagcccaggcgactcctgaccatgtactcttcatgctgttaaaa

SEQ ID NO: 7359 - DNA, 518 bp, Homo sapiens
  SIMILAR (350)..(454): 541254mologous to Homo sapiens activating transcription factor 5,accession number AF101388,Smith-Waterman Score=95.
atgctgctggcatggtccaagtgggaagaaaaagagccctacgtggtgacattctggaaggatatcatggatgattgcaaaagatgcagtgatgatgtccagagtgtacgggaaataaaacgtattgaaatgctagaacataagtacggcggtcacctggtgtcccggcgcgccgcttgcaccatccaaaccgccttccgccaataccagctcagcaagaacttcgagaaaatccgcaactcgcttctggagagccgcctgccacggcggatctccctgcgcaagcctggcggccgagaaagcgctcatggagggctacggctcgtggggctgccgctggtgcgctcgccctccctgccgcccaccttcgcaggcaccctcaccgagctggaggactccttcaccgagcaggtgcaatccctggccaagtccatcgacgacgcgctcagcacgtggagcctcaagaccatgtgctccctgcgagatagtggcgcttaccagctccaccaggccctgca

SEQ ID NO: 7360 - DNA, 279 bp, Homo sapiens
  SIMILAR (1)..(168): 561254mologous to Homo sapiens ZNF198-FGFR1 oncoprotein,accession number Y06456,Smith-Waterman Score=138.
atgacaactcagaaaggacctgaaaacttacattatgatcagggttgtcagacatctcgaaccaaaatgacacccctcagacagggcattttaaaggctttcacggtgtaccacatgagggagctttgtaacaaggcttgtgaggctctcaatgccgacaaggaaaccaccatggatagactcctggaagcagtcacaatatgcatcttcttgattatggcgacacaacctgggggcagtataaagcagtccattgataactgttgggaagatgtttga

SEQ ID NO: 7361 - DNA, 5071 bp, Homo sapiens
  SIMILAR (984)..(4328): 971254mologous to Homo sapiens zinc finger protein,accession number AF060181,Smith-Waterman Score=5934.
ccgccgcctcctccgcctcctcctcctcaccagcgctaaagccgggactggaccgagcggagttgaccaagaatcgccttcagccctgtctggtgcatccttggcagaaagtgaggaggaaaacacccccattgttagatgaggtcttaatcatggaacatttgaagtcacgtaaagaaggttctttggcatggacacaagttcagtgggaggattagaattgactgatcagactcctgttttattagggagtacggccatggcaactagtctcacgaatgtaggaaactcatttagtggtccagctaatcctttagtgtctagatctaataagtttcagaactcgtcagtggaagatgatgatgatgttgtttttatcgaacctgtacaacctcccccaccttctgtaccagtggtagctgatcaaagaaccataacatttacatcatcaaaaaatgaagaactacaaggaaatgattccaaaattactccttcctcaaaagagttggcatctcagaagggaagtgtaagtgagacaattgtcattgatgatgaagaggacatggaaacaaatcaagggcaagagaaaaattcctccaattttattgaacgaagacctcctgagactaaaaacagaaccaatgatgtggatttctccacttccagtttttcaagaagtaaggtaaatgcaggaatgggtaatagtggtatcaccacagaaccagactctgaaattcagattgctaatgttacaactttagaaacaggtgtaagctctgtgaatgatggccaattagaaaatactgacgggcgagatatgaacttaatgattacacatgtaacatcactgcagaataccaacttgggagatgtctctaacggactgcagtcaagtaattttggtgttaatatacaaacatacaccccatctttaacttcacagaccaagactggagtaggaccttttaatcctggtagaatgaatgtggcaggagacgtttttcagaatggagaatctgcaactcatcataatcctgattcttggatctcccagtcagcttcatttccccgtaatcagaaacaaccaggggtggactctttatcaccagtggcctcacttcctaaacagattttccagccgtctgtccaacagcagcctactaaaccagttaaagttcacttgtgcaaactgcaaaaaacctttacagaagggccagacagcttatcaacgaaaaggatcagctcacctcttttgttctaccacctgcctttcttccttctcccacaagcctgctccaaagaaactctgtgttatgtgtaaaaaagatataactacaatgaaaggaaccattggttggctcaagtggattcaagtgagtccttccaggaattctgtagtaacatcctgtttaatctctctaatgaagaacaacagaatcctactaaagggagctctaaataaatcaagatgtacaatctgtggtaaactaactgagattcgccatgaagtcagctttaaaaatatgactcataagctgtgcagtgaccactgctttaatagatatagaatggccaatggtttaataatgaattgctgtgaacagtgtggagagtacttgcccagtaaaggtgctggaaataatgttctggtgattgatggtcaacagaaaagattttgctgtcaaagttgtgtcagtgaatacaaacaggtaggtagccatccaagcttcctgaaggaggttcgagatcacatgcaggactctttcttaatgcagcctgagaaatatggaaaactgacaacttgtactggttgccgaacacagtgcaggttttttgatatgactcagtgtataggtcctaatggatatatggagccatattgttcaactgcttgtatgaacagtcacaagacaaaatatgcaaaatcacaaagtttgggaattatttgccatttttgtaagcgaaactctttacctcaataccaagccacaatgcctgatggaaaactgtacaacttttgcaattccagttgtgtggctaaatttcaggctctaagtatgcagtcatctccaaatggccagtttgtagcgccaagtgatattcagttgaaatgcaactactgcaaaaattccttttgttcaaaaccagaaatcctggaatgggagaacaaagtgcatcagttctgcagcaaaacttgttcagatgactataagaagttgcattgcatagttacatattgcgaatactgtcaagaggagaagactcttcatgaaacagtaaatttctctggcgttaagagacctttctgtagtgaaggctgcaaattattatacaaacaggattttgccagacgtttaggattgagatgtgttacttgcaactattgttctcagctatgtaaggggggagcaactaaagaactcgatggtgttgtgagagatttctgcagtgaagattgctgtaaaaaatttcaggattggtactacaaggctgcaaggtgtgactgttgtaaatctcaaggaactcttaaagagcgagttcagtggcgtggggaaatgaaacatttctgtgatcaacattgcttactgcgtttctactgtcaacaaaatgagcccaacatgacaactcagaaaggacctgaaaacttacattatgatcagggttgtcagacatctcgaaccaaaatgacaggttcagcaccacccccttctccaacacctaacaaagagatgaagaacaaagcagttctttgcaaacctttaacaatgacaaaagctacttactgtaaacctcacatgcagaccaaatcttgtcagacagatgatacttggaggacagaatatgttccagtgcctatccctgtgcctgtgtatatcccagttcctatgcacatgtacagtcagaatattcctgttcctactacagttcctgttcctgtgccagttcctgtttttctgcctgctccattggacagcagtgagaagattcctgcagcaattgaggagctaaaaagcaaggtttcttcagatgctcttgatacagagttgcttacaatgacggatatgatgagtgaagacgaggggaaaacagagacaaccaacatcaacagtgtaattattgaaacagatataattggttcagaccttttgaagaactctgacccagagacacagtccagcatgcctgatgtaccatatgaaccagatttggatatcgaaatagattttcccagagctgctgaggagcttgatatggaaaatgaatttttattaccacctgtttttggcgaagaatatgaggaacagcccagacctcgatctaaaaaaaagggagccaagagaaaggctgtatcaggataccagtctcatgatgatagttctgacaattcagaatgcagctttcctttcaaatatacgtatggcgtaaatgcatggaaacactgggtcaaaactaggcaacttgatgaagatcttctggtattagatgagttaaaatcttctaaatcagtaaagttaaaagaggatctactctctcacaccacagctgagcttaactatgggttagctcattttgtcaatgagatccgacggccaaatggagagaattatgcacctgacagcatctattacctttgccttggaatacaggagtatttgtgtggaagtaatcgaaaagacaacatatttattgatcctggataccaaacatttgagcaagaattgaataaaatactgcgaagctggcaaccaagcatacttccagatgggtcaatattctctcgagttgaagaagactatctctggaggataaaacaactaggatcacactctccagtagctcttctgaatacactgttctactttaacactaagtattttggcctgaaaacagtggaacaacacttaagactttcctttggcactgtgtttaggcattggaaaaaaaatcctttaacgatggaaaacaaagcgtgtcttcgataccaagtgtcttccttgtgtggaacagataatgaagataaaattactactggaaaaagaaaacatgaagatgatgagccagtatttgaacaaattgaaaacacagccaatccttccagatgtcctgtgaaaatgtttgaatgctacttgtctaaaagtccacagaatcttaatcagaggatggatgttttttatttgcaaccagaatgctctagttctacagatagccctgtctggtatacgtctacttcactggaccgaaacaccttggaaaatatgcttgtacgggttcttctagtaaaagatatttatgataaagacaattatgaactggatgaagacacagactaaaaaggaacgttgcagaagcaatcgggataaaacagcattagatagtcatgctgctagatctttattatggaaaacatttcaagtttactccttctgttttgagttttgtagcagtgtacccacgctgggtattaccatgtaaataatctgtgagtgaaagttgccattattctatgtagtggttttaggatacttaacaaatacattcaaattctttttttattattatttatttgattaggtatgtttgtaactttttacattacagaatatgaatgagaatgtgccatgtataatttttttcttgtagtaagaaacatccatattgcacaactctactgttgcaaagcttccttggaagggggctcttttactgggttcttaaccagatggttgtgtatgggtagcactactaaaagtttagaacttgcagtgtctttcggaatttttaaaataaactgtaaactaataggctggggtttttgttttgttttggggttttgttttgtttggttttacattttagttactgaagccttacaaggttatgtagagagataccatcttctgtaccaaaaatagacaagagaatgctgtcaatattggtgtactgtaatgtgaatctatgctggtgaaaacaattttttgttccccttattaaaaccttagtgtccttttctcatttgtggctttctgcatcacccaatcaataaaaaacaaatatatatatgtaaaaaaaa

SEQ ID NO: 7362 - DNA, 1074 bp, Homo sapiens
  SIMILAR (508)..(882): 721254mologous to Homo sapiens netrin-2 like protein,accession number U86758,Smith-Waterman Score=522.
atgaaggctgcctcatcctcaggcctgcctgtaaaggatgtgctgttactatccccaatctatggtggaggaaactggggcaccaaaagattaggtcacttgcccaaggtctcacagcaggtgactgataaatatgtgtttaatgaccgaatactttccccctgtggttggtttgaggagtcagtacctgcatccagccaggccctgggatgggtgctcggaaactgttattacatcatcatcaccaccaccatcatcatcaccactatcaccaccatcatcaccactatcaccatcaccatcatcacgactatcaccaccatcatgtaccgggatcatgctagaacgctgtttgtttttttgtcgtctttgtgtcggcgtcgttgtgtgttggttctccgttcggctgttgtcgtctcctcctcctgttctctcgtgttgcgttttttgtttcctgagcgttttgctggctggtgctacgcgcgtgtgttcggctcgccctttggttgtttggcctgctcctgcaaccagcacgcccgacgctgccggttcaactctgagctgttcagactgtcgggcggccggagtgggggtgtttgtgagcggtgccgccaccacacagctgggcggcactgccactactgccaacctgggttctggagggaccctagccagcctatcttcagccgcagggcctgcagagcctgccagtgccaccctattggggcaacaggaggaacctgcaaccagaccagtgggcagtgcacctgcaagttaggggtcacaggcctgacctgcaaccgctgtggccctggctaccagcagagccgctcccccagatgccttccagctcacatcggaccagcacctgaccccgaggactggtggagctacaaggataatctccagggaaacttcgtgccaggtgccgccaaggcggggacccaggagtccggccctcccggcgcctccttcttcagactcaggaacctgggttcccagctccctcctcccccccaggaccaggagtcccagccccctcctctgtccctcaggagtcgggccagcttctga

SEQ ID NO: 7363 - DNA, 2121 bp, Homo sapiens
  SIMILAR (4)..(1557): 861254mologous to Mus musculus zinc-finger homeodomain protein 4,accession number AB024499,Smith-Waterman Score=2344.
  misc_feature (1)...(2121): n = a,t,c or g
accccggatccaacccttccgcggtttatgggagcgcttttcatgttgaaaatggtgactcttttgccggctggtttgccttcttaaaaaggaagcgcgagcacctcgagctcagcagagcagccgctggggattacccaaaatncaaaggctgaagtgaatctgggggggctgtctagtttagtagtgaacaccccaattacctctgtctccctcagccactcatcgtctgagtctagcaagatgtcagagagcaaagaccaagagaacaactgtgaaaggccaaaagaaagcaacgttttacacccaaacggggagtgccctgtcaaaagtgaacccactgaaccgggagatgaggatgaagaagatgcgtactccaatgaacttgatgacgaggaagtattaggtgaactcaccgatagtattggtaacaaagatttccctctcttaaaccaaagcatttctcctttatcatccagtgtgctaaaatttattgaaaagggtacctcgtcctcctcggcgactgtttctgatgacacagaaaagaaaaaacagactgctgctgttagggccagtggcagtgttgctagtaactatggcatcagtggcaaggactttgcagacgcaagtgccagtaaagacagtgccacagctgctcatccaagtgaaatagcccggggagacgaagacagttcagccactcctcaccagcatggctttaccccgagtactcctggcacaccagggcctggaggagacggctcaccgggcagtggcatcgagtgtccaaagtgcgacactgtgttggggtcttcgaggtctcttggtggtcatatgactatgatgcactcgaggaactcatgcaaaaccctcaaatgtcctaaatgtaactggcactacaaatatcagcagaccctggaggcccatatgaaggagaaacaccctgagccgggtggctcttgtgtttattgtaagactggacagcctcaccccaggcttgcccggggtgagagttacacgtgtggctataaacccttccgttgtgaggtttgtaactactctaccactaccaaaggcaacctcagtattcatatgcagtcggacaagcacctgaacaatgttcagaatctccaaaatggcaatggtgagcaggtgtttggccactctgccccagcccccaacaccagcctcagtggctgcggaacaccctctccgtccaaacccaaacagaaacccacctggcggtgtgaagtttgtgattatgaaaccaatgtcgccaggaacctccgaattcatatgaccagcgaaaagcacatgcataatatgatgcttttgcagcagaacatgaagcagatccagcataatctgcacttgggcctcgccccggcggaagcagagctttatcagtactacctagcccagaacataggcctgaccggaatgaagctggaaaaccctgccgaccctcagctgatgatcaatccattccagctggatccagcgacagcagcggctttggcaccagggctcgtaaataatgagctgccgcctgaaatccggcttgccagtggtcagctaatgggtgatgacctgtccctccttactgcaggagagctgtcaccttatatcagtgacccagcgctgaagctattccagtgtgctgtttgcaacaaattcacctctgacagcctggaggccctaagtgtgcatgtgagcagtgagcgctctctccctgaagaggaatggagggcagtaattggagatatctaccagtgcaagctctgcaactacaacactcagctcaaagccaacttccagctacactgcaagactgataaacatatgcagaaatatcaactggtggctcacattaaagaagggggcaaaagcaatgagtggaggttgaagtgtattgccattggcaaccctgttcacctaaaatgtaacgcctgtgactattacaccaacagtgtggataaattacgcttgcataccaccaatcacaggcacgaggcggccctgaagctctacaagggcaatttgcttggtgccacagttacccttgaagttccttttcatggagagttggatgttgtctttgaatttataacaaccaattaa

SEQ ID NO: 7364 - DNA, 2932 bp, Homo sapiens
  SIMILAR (938)..(2863): 991254mologous to Homo sapiens Human adult neural tissue secreted protein s195_10,accession number W88407,Smith-Waterman Score=3335.
cgcccctccccctcccgtgacgctcgctttctgtcagcctctctccctctccctctcccctctccttcctctcgcttcctctctcgcacctgagcgtacgcacctgcccgggcccggctccctcctcctctcccctccctctttccccgcccggccgcgggagcctcgtggctgcgtcaccgccgcccccccagacaagatggacaccgcggaggaagacatatgtagagtgtgtcggtcagaaggaacacctgagaaaccgctttatcatccttgtgtatgtactggcagtattaagtttatccatcaagaatgcttagttcaatggctgaaacacagtcgaaaagaatactgtgaattatgcaagcacagatttgcttttacaccaatttattctccagatatgccttcacggcttccaattcaagacatatttgctggactggttacaagtattggcactgcaatacgatattggtttcattatacacttgtggcctttgcatggttgggagttgttcctcttacagcatgccgcatctacaagtgcttgtttactggctccgtgagctcactactgacgctgccattagatatgctgtcaacggaaaatttgttggcagattgtttgcagggttgttttgtggtgacgtgcacactgtgtgcattcatcagcctggtgtggttgagagagcagatagtccatgggggagcaccaatttggttggagcatgctgccccaccgttcaatgctgcggggcatcaccaaaatgaggctccagcaggaggaaatggtgcagaaaatgttgctgctgatcagcctgctaacccaccagctgagaacgcagtggtgggggaaaaccctgatgcccaggatgaccaggcagaagaggaggaggaggacaatgaggaggaagatgacgctggtgtggaggatgcggcagatgctaataacggagcccaggatgacatgaattggaatgctttagaatgggaccgagctgctgaagagcttacatgggaaagaatgctaggacttgatggatcactagtttttctggaacatgtcttctgggtggtatctttaaatacactgttcattcttgtttttgcattttgcccttaccatattggtcatttctcccttgttggtttgggatttgaagaacacgtccaagcatctcattttgaaggcctaatcacaaccatagttgggtatatacttttagcaataacactgataatttgtcatggcttggcaactcttgtgaaatttcatagatctcgtcgcttactgggagtctgctatattgttgttaaggtctctttgttagtggtggtagaaattggagtattccctctcatttgtggttggtggctggatatctgttccttggaaatgtttgatgctactctgaaagatcgagaactgagctttcagtcggctccaggtactaccatgtttctgcattggctagtgggaatggtatatgtcttctactttgcctccttcattctactactgagagaggtacttcgacctggtgtcctgtggtttctaaggaatttgaatgatccagatttcaatccagtacaggaaatgatccatttgccaatatataggcatctccgaagatttattttgtcagtgattgtctttggctccattgtcctcctgatgctttggcttcctatacgtataattaagagtgtgctgcctaattttcttccatacaatgtcatgctctacagtgatgctccagtgagtgaactgtccctcgagctgcttctgcttcaggttgtcttgccagcattactcgaacagggacacacgaggcagtggctgaaggggctggtgcgagcgtggactgtgaccgccggatacttgctggatcttcattcttatttattgggagaccaggaagaaaatgaaaacagtgcaaatcaacaagttaacaataatcagcatgctcgaaataacaacgctattcctgtggtgggagaaggccttcatgcagcccaccaagccatactccagcagggagggcctgttggctttcagccttaccgccgacctttaaattttccactcaggatatttctgttgattgtcttcatgtgtataacattactgattgccagcctcatctgccttactttaccagtatttgctggccgttggttaatgtcgttttggacggggactgccaaaatccatgagctctacacagctgcttgtggtctctatgtttgctggctaaccataagggctgtgacggtgatggtggcatggatgcctcagggacgcagagtgatcttccagaaggttaaagagtggtctctcatgatcatgaagactttgatagttgcggtgctgttggctggagttgtccctctccttctggggctcctgtttgagctggtcattgtggctcccctgagggttcccttggatcagactcctcttttttatccatggcaggactgggcacttggagtcctgcatgccaaaatcattgcagctataacattgatgggtcctcagtggtggttgaaaactgtaattgaacaggtttacgcaaatggcatccggaacattgaccttcactatattgttcgtaaactggcagctcccgtgatctctgtgctgttgctttccctgtgtgtaccttatgtcatagcttctggtgttgttcctttactaggtgttactgcggaaatgcaaaacttagtccatcggcggatttatccatttttactgatggtcgtggtattgatggcaattttgtccttccaagtccgccagtttaagcgcctttatgaacatattaaaaatgacaagtaccttgtgggtcaacgactcgtgaactacgaacggaaatctggcaaacaaggctcatctccaccacctccacagtcatcccaagaataa

SEQ ID NO: 7365 - DNA, 1680 bp, Homo sapiens
  SIMILAR (25)..(864): 911254mologous to Homo sapiens Accession No. AJ237839,accession number AP001725,Smith-Waterman Score=1314.
atggaactggattacacagatccggcgctcatcggccagagcttttatggcaagctgcagacccaggcccccaatgtctgcccccactccctgctcattgaactccttacctacctctgcctgagcttcctccgctcctactacccctgctacctgaaggtctgccacagggacatccttggcaaccgcgacgtgcaggtcaagagcgtggaggtcctcattaggattacagcacagctggtctccatggccaagtcggcggaagggaagaacacggagttcatccacagcctgctgcagaggtgcaaggtccaggagttcgtcctgctctcgctgtccgcgtccatgtacaccagccagaagcgctacggcctggccaccgccgaccggggcggcaggctcctcgcggaggacagcctctttgaggagagcctcatcaatctggggcaggaccagatctggagcgagcacccactgcagatcgagctgctcaagctgctgcaggccctcatcgtcctggagcaccacctgggccagggccaggaggaggcggagactcagccggccctatcccgagagtggcagagggctctcaacttccagcaggccatcggtgccatgcagtacgtgcagccccaccccctcacctcccagggccttctggtctcagctgtggtgagagggctgcagcccgcctatggctacggcatgcaccccgcctgggtgagcctggtcacgcattccttgccatactttggaaagtctctgggctggacagtgacaccctttgttatccagatttgcaaaaatttggacgatctggtcaagcaatatgaaagtgaatctgtcaagttcaccatcagccgcgtggccctggtaactggggctaacaaaggcatcggctttgcgatcacgcgtgacctgtgtcggaaattctccggggacgtggtgctcacggcgcgggacgaggcgcggggccgcgcggcggtgcagcagctgcaggcggagggcctgagcccacgcttccaccagctggacatcgacgacccgcagagcatccgtgcgctgcgcgactttctgcgcaaggagtacgggggacttaacgtgctggtcaacaacgcgggcatcgcctttagaatggatgacccaacacccttcgacattcaagctgaggtgacactgaagacgaacttttttgccactagaaatgtctgcactgagttactgcctataatgaaaccacatggatgtaagatggacccggaggagcaggagctactgaacgattacagatacagaagctactcctcagtaatcgagaaggcgttgagaaactttgagtcctccagcgaatgggcagatctcatctcttcgctcggcaagctcaacaaggtgctgggtcacttcctatgggaggcccggccgcgggagcctcgtggctgcgtcaccgccgcaccccccagacaagatggacaccgcgtgaggaagtgccctaccccctcgcgacagaacttctttgttgactttgaaacttcgcgaaaaataccccgccagatgacggccgagtggatgcctttcctgtgcacaggattcagcgctttcccagcgggctccctgcagctccaccaaggagtgctggaggctgagtcagcagcacggccaggaaatggtaacagatga

SEQ ID NO: 7366 - DNA, 13329 bp, Homo sapiens
  SIMILAR (193)..(13329): 991254mologous to Homo sapiens ankyrin G,accession number U13616,Smith-Waterman Score=22372.
gggacaccatcatttgggtttttaaaagcttcagcttctccagcatctttgcattgtgaatatcttcctgcttctagtcaaagctttctctctagtgattggaatgctgctgtaagcctattagaggtgcctgaggatatcaccttttacaaggaagccgtgtgtgcttgagaggatctttttaaatgcattatggctcatgcagcctcacaattaaagaaaaacagggatttagaaatcaatgctgaagaagagcctgagaaaaaaaggaaacaccgcaaacggtcccgggatcggaagaaaaagtctgatgccaatgcaagttacttaagagcagctcgagctggacaccttgaaaaggccctcgactacataaaaaatggagttgacatcaacatttgcaatcagaatgggttgaacgctctccaccttgcttccaaagaaggccatgtagaggttgtttctgagctgctgcagagagaagccaatgtggatgcagctacaaagaaaggaaacacagcattgcacatcgcatctttggctgggcaagcagaggtggtaaaagtcttggttacaaatggagccaatgtcaatgcacaatctcagaatggtttcacgccattgtatatggcagcccaggaaaatcacctggaagttgtcaagtttcttcttgacaatggtgcaagccagagcctagccacagaggatggcttcacaccattggcagtggctttgcaacaaggtcacgaccaagtcgtttcgctcctgctagagaatgacaccaaaggaaaagtgcgtctcccagctcttcatatcgcggcccgcaaagacgacacaaaagccgccgccctgctgctgcagaatgacaacaatgcagatgtggaatcaaagagtggcttcactccgctccacatagctgctcactatggaaatatcaatgtagccacgttgctgttaaaccgagcggctgctgtggatttcaccgcaaggaatgacatcactcctttacatgttgcatcaaaaagaggaaatgcaaatatggtaaaactattgctcgatcgaggagctaaaatcgatgccaaaaccagggatggtctgacaccactgcactgtggagcaaggagtggccacgagcaggtggtagaaatgttgcttgatcgagctgcccccattctttcaaaaaccaagaatggattatctccattgcacatggccacacaaggggatcatttaaactgcgtccagcttctcctccagcataatgtacccgtggatgatgtcaccaatgactacctgactgccctacacgtggctgcccactgtggccattacaaagttgccaaggttctcttggataagaaagctaaccccaatgccaaagccctgaatggctttacccctcttcatatcgcctgcaagaagaatcgaattaaagtaatggaactccttctgaaacacggtgcatccatccaagctgtaaccgagtcgggccttaccccaatccatgttgctgccttcatggggcatgtaaatattgtatcacaactaatgcatcatggagcctcaccaaacaccaccaatgtgagaggagaaacagcactgcacatggcagctcgctccggccaagctgaagttgtgcggtatctggtacaagacggagctcaggtagaagctaaagctaaggatgaccaaacaccactccacatttcagcccgactggggaaagcagacatagtacaacagctgttgcagcaaggggcatctccaaatgcagccacaacttctgggtacaccccacttcacctttccgcccgagaggggcatgaggatgtggccgcgttccttttggatcatggagcgtctttatctataacaacaaagaaaggatttactcctcttcatgtggcagcaaaatatggaaagcttgaagtcgccaatctcctgctacagaaaagtgcatctccagatgctgctgggaagagcgggctaacaccactgcatgtagctgcacattacgataatcagaaagtggcccttctgcttttggaccaaggagcctcacctcacgcagccgcaaagaatggttatacgccactgcacatcgctgccaaaaagaaccagatggacatagcgacaactctgctggaatatggtgctgatgccaacgcagttacccggcaaggaattgcttccgtccatctcgcagctcaggaagggcacgtggacatggtgtcgctgctcctcggtagaaatgcgaatgtgaacctgagcaataagagcggcctgaccccactccatttggctgctcaagaagatcgagtgaatgtggcagaagtcctcgtaaaccaaggggctcatgtggacgcccagacaaagatgggatacacaccactgcatgtgggctgccactatggaaatatcaagattgttaatttcctgctccagcattctgcaaaagttaatgccaaaacaaagaatgggtatacgccattacatcaagcagcacagcaggggcatacgcatataataaatgtcttacttcagaacaacgcctcccccaatgaactcactgtgaatgggaatactgcccttggcattgcccggcgcctcggctacatctcagtagtggacaccctgaagatagtgaccgaagaaaccatgaccacaactactgtcacagagaagcacaaaatgaatgttccagaaacgatgaatgaagttcttgatatgtctgatgatgaagttcgtaaagccaatgcccctgaaatgctcagtgatggcgaatatatctcagatgttgaagaaggtgaagatgcaatgaccggggacacagacaaatatcttgggccacaggaccttaaggaattgggtgatgattccctgcctgcagagggttacatgggctttagtctcggagcgcgttctgccagcctccgctccttcagttcggataggtcttacaccttgaacagaagctcctatgcacgggacagcatgatgattgaagaactccttgtgccatccaaagagcagcatctaacattcacaagggaatttgattcagattctcttagacattacagctgggctgcagacaccttagacaatgtcaatcttgtttcaagccccattcattctgggtttctggttagctttatggtggacgcgagagggggctccatgagaggaagccgtcatcacgggatgagaatcatcattcctccacgcaagtgtacggcccccactcgaatcacctgccgtttggtaaagagacataaactggccaacccacccccacatggtgaaaggagagggattagcagtaggctggtagaaatgggtcctgcaggggcacaatttttaggccctgtcatagtggaaatccctcactttgggtccatgagaggaaaagagagagaactcattgttcttcgaagtgaaaatggtgaaacttggaaggagcatcagtttgacagcaaaaatgaagatttaaccgagttacttaatggcatggatgaagaacttgatagcccagaagagttagggaaaaagcgtatctgcaggattatcacgaaagatttcccccagtattttgcagtggtttcccggattaagcaggaaagcaaccagattggtcctgaaggtggaattctgagcagcaccacagtgccccttgttcaagcatctttcccagagggtgccctaactaaaagaattcgagtgggcctccaggcccagcctgttccagatgaaattgtgaaaaagatccttggaaacaaagcaacttttagcccaattgtcactgtggaaccaagaagacggaaattccataaaccaatcacaatgaccattccggtgcccccgccctcaggagaaggtgtatccaatggatacaaaggggacactacacccaatctgcgtcttctctgtagcattacagggggcacttcgcctgctcagtgggaagacatcacaggaacaactcctttgacgtttataaaagattgtgtctcctttacaaccaatgtttcagccagattttggcttgcagactgccatcaagttttagaaactgtggggttagccacgcaactgtacagagaattgatatgtgttccatatatggccaagtttgttgtttttgccaaaatgaatgatcccgtagaatcttccttgcgatgtttctgcatgacagatgacaaagtggacaaaactttagagcaacaagagaattttgaggaagtcgcaagaagcaaagatattgaggttctggaaggaaaacctatttatgttgattgttatggaaatttggccccacttaccaaaggaggacagcaacttgtttttaacttttattctttcaaagaaaatagactgccattttccatcaagattagagacaccagccaagagccctgtggtcgtctgtcttttctgaaagaacgaaagacaacaaaaggactgcctcaaacagcggtttgcaacttaaatatcactctgccagcacataaaaaggagacagagtcagatcaagatgatgagattgagaaaacagatagacgacagagcttcgcatccttagctttacgtaagcgctacagctacttgactgagcctggaatgaaaacagttgaacggagtacaggagcaacaagatccctccccaccacttactcatacaagccattcttttctacaagaccataccagtcctggacaacagctccgattacagtgcctgggccagccaagtcaggcttcacttccttatcaagttcttcctctaatacgccatcagcttctccgttaaaatcaatatggtctgtttcgacaccttctccaatcaaatccacattaggcgcgtcaactacatcttcagttaaatccattagtgacgtggcatctccaattagatccttacggacaatgtcttcgccgataaaaactgtggtgtcacaatctccatacaatatccaggtttcctctggtaccctggctagagctccagcagtcacggaagctacgcccttaaaagggctggcatccaattctacgttttcctctcgaacctctccagtgactacagcagggtctcttttggagaggtcatcaattactatgacaccccctgcctcccccaaatcaaacattaatatgtattcctcaagtttgccatttaagtcaattattacatcagcagcaccgctaatatcttcacctttaaagtcagtggtgtctccagttaaatcacgagttgatgtcatttcatcagccaaaattacaatggcatcttctctctcatcacctgtgaagcagatgcctggacatgcagaggtagcattagtcaatggatctatttcccctctaaaatatgcatcatcctcaactttaattaatggatgcaaagccactgccacgttacaggaaaaaatttcttctgctacaaactctgtgagctctgtggtcagtgcagccactgacacagttgagaaagtgttttctaccacgactgcaatgccattttccccactcaggtcatatgtttctgcagcaccatcagcttttcagtctctaagaactccttccgcaagtgcactctatacatcccttgggtcgtcaatatctgcaactacctcatctgtaacttcatcaattataacagtgccagtatactctgtagtcaatgttttgccagaaccagcattaaagaaacttccagactctaattcatttacaaaatcagcagcagccttgctgtcacccattaaaacattgactacggagacacatcctcagcctcacttcagtcgaacttcatctccagttaagtcatctttgttccttgcaccctctgcccttaagttgtctacaccatcttctttatcttccagtcaggagatactaaaagatgtagctgaaatgaaagaggacctaatgcggatgaccgcaatactacagacagatgtgcctgaggagaagccattccaacctgaactcccaaaggaagggagaatagatgatgaagaacctttcaaaattgtagagaaagtaaaggaagacttagtgaaagttagtgaaatccttaaaaaggatgtatgtgtagataataaaggatcacccaaatcaccaaagagtgacaaaggacactctcctgaagatgactggatagaatttagttcggaagaaatccgggaagccagacaacaagctgctgcgagccagtctccatctctgccagagagagtgcaagtaaaagcaaaagccgcctccgaaaaggattataacttgaccaaagttattgattacctaacaaatgatattgggagtagttcactgacaaacttaaaatacaagtttgaggatgcaaagaaggatggtgagggaggacagaaaagagttttaaaaccagcaattgctttgcaggaacacaaactcaaaatgcctccagcctccatgaggacttccacctctgagaaagaattgtgtaaaatggctgattccttttttggaacagatactattttagagtctcctgatgacttttctcaacacgaccaagataaaagtcccttgtctgacagtggctttgaaacaagaagtgaaaagacaccttcagccccacaaagcgctgaaacgactggtcctaaaccactttttcatgaagttcccatccctcctgttattacagaaacaagaactgaagtggttcatgttatcaggagctatgatccctcagctggggatgttccccagacccaaccagaggagcctgtgtcacctaaaccttcacctacttttatggaattggaaccaaagcccaccacctctagtattaaagaaaaggttaaagcatttcaaatgaaagccagtagtgaagaagatgaccacaatcgggttttaagcaaaggcatgcgtgttaaagaagagactcacataaccacaaccaccagaatggtttatcattctccaccaggcggtgaaggtgcatctgaaagaattgaagaaaccatgtcagtccatgacatcatgaaggcctttcagtccgggcgggatccttccaaagaactggcaggtctgtttgaacataagtcggcagtgtctccagatgttcacaagtctgctgctgaaacctcagcccagcatgcagagaaggacaaccaaatgaaacccaaactggagcgtataatagaagtccacatcgaaaaaggtaaccaagctgagcccactgaagtcattattagagaaaccaaaaagcatccagaaaaagaaatgtatgtatatcagaaagacttatcccggggagatattaacctaaaagattttctgccagaaaaacacgatgcttttccttgttcagaggaacagggtcagcaagaagaagaagaacttactgctgaagagtcattgccttcttatctggagtcttccagagtaaacactcctgtgtcccaagaagaagatagccgccctagttctgctcaactcatatctgatgactcttataaaacattgaagcttttgagtcaacactcaatagaataccatgacgatgagttgtcagaactaagaggggagtcttacaggtttgctgagaaaatgcttctgtcagaaaagctagatgtgtctcattctgatactgaggaatcggttacagaccatgcaggaccccctagctcagagttacaggggtctgataagcggtccagagaaaaaatagccactgcccccaaaaaagaaattctctccaaaatctataaagatgtttctgaaaatggtgtaggtaaagtgtctaaagatgagcattttgataaagtgacagtgttgcactattctggcaatgttagtagtccaaaacatgccatgtggatgcgctttactgaggacagattagacagaggtagagagaagttgatatatgaagatagggtggacaggactgtgaaggaggctgaagaaaaactgactgaagtgtcacagttttttcgtgacaaaactgaaaagctaaatgatgaactgcagtccccagagaaaaaggcacgccctaaaaatggcaaagaatattcttctcaaagccctaccagtagcagccctgagaaagtgctactgacagaactgctggcatccaatgatgagtgggttaaggcaagacagcatggccctgatggacaaggcttccccaaggccgaggagaaggcacccagtctgcccagcagcccagagaagatggttctctcccaacagactgaggacagcaagtccacagtggaagccaaaggaagtatttcacagagcaaagcaccagatgggccccagtctggattccagctcaaacaatctaaactcagttccattagattaaaatttgaacaaggcacacacgcaaaaagtaaggacatgtctcaagaagacagaaagtcagatggccagtccagaatcccagttaaaaaaatacaggagagcaagctacccgtctaccaagtttttgctagagaaaaacagcagaaggccatagacctcccagatgaaagtgtatctgtgcaaaaagattttatggtattaaaaaccaaagatgagcatgcccaaagcaacgaaattgttgtaaatgattctggctctgataatgtgaaaaaacagagaactgaaatgtcaagtaaagcaatgcctgactctttttctgagcagcaggctaaagacttggcatgtcatataacctcagatttagcaactaggggaccatgggacaaaaaggtctttagaacatgggagagttcgggagccactaacaataagtctcagaaagaaaaactttcgcatgtacttgttcatgatgtaagagagaatcacattggtcaccctgagagtaaaagtgttgatcaaaagaatgaatttatgtctgtgactgagagagaacgcaaattgttaacaaacggctctctctcagaaattaaagaaatgactgtaaaatctccctccaaaaaagtcttatatagggaatatgttgtgaaagaaggggaccatccaggcggattgcttgatcagccttccaggaggagcgagagctcagcagtgtcacacattcccgtcagagttgctgatgagaggagaatgctgtcttctaatattcccgatggtttttgtgaacagtcggcatttccaaaacatgaactatcacaaaaattgtcccagtcaagcatgagtaaagagacagttgagacacagcactttaattctatagaagatgaaaaagttacctattcagaaatcagcaaagtttccaaacaccagagttatgtaggtttatgcccacctctcgaggaaaccgaaacctcccccaccaaatctcctgattctttagagtttagcccaggaaaggaatctccctctagtgatgtattcgaccacagtcccattgatggattggaaaaactcgcaccactagcccagacagagggagggaaagagataaaaactttacccgtttatgtcagttttgtacaagtggggaagcaatatgaaaaggagatacaacaaggaggtgtaaaaaaaatcataagtcaggaatgtaagacagtacaagaaaccagggggaccttttatacaactagacagcaaaagcaacctccttctccccaaggtagtccagaagatgatactctagagcaagtatcctttctagacagctctgggaaaagccctttaaccccagaaacacccagttcagaggaagtgagttatgaatttacatctaagacacctgactcgctcatagcttatataccaggcaaacccagcccaattcccgaggtttctgaggagtcagaggaggaggaacaggccaagtcaacctcccttaagcagactacagtggaggaaacagcagttgagcgtgaaatgcctaatgacgtgagcaaagactctaaccaaagacccaaaaataacagagttgcctatattgaatttccccctcctccaccactggatgcggaccagattgagtcagataagaagcatcattatctcccagaaaaagaggttgacatgattgaagtcaatctgcaagatgagcatgacaagtaccagctggctgaacctgtcattagagtgcagccaccttcaccagttcctcccggggcagacgtcagtgattcaagcgatgacgaatctatttatcagccagtcccagttaaaaaatataccttcaaattaaaggaagtggacgatgaacaaaaagaaaaacccaaagcttctgctgaaaaggcttccaaccagaaagaactggaaagtaatggatctggaaaagataatgaatttggccttggccttgattcacctcagaatgaaattgcccagaatgggaacaacgaccagtccatcacagagtgttccattgccaccacagcagagttttctcatgacacggatgccacagagatcgactctctggatggctatgacctgcaagatgaagatgatggcttgacagagagtgattctaaactcccaattcaagccatggaaattaagaaagatatctggaacacagagggcattctgaagccagctgaccgctcttttagccaaagtaaacttgaagttatcgaggaggagggaaaggtgggaccagatgaggacaagccaccttctaaaagttcttcatctgaaaagactcctgataagactgatcagaagtcaggggcccagttcttcacactggaaggcagacatcctgacagatcagtgtttcctgatacttacttcagttacaaagtagatgaagaatttgccactccttttaaaacagtagctaccaaaggtctagattttgacccttggtctaataaccgaggggatgatgaagtttttgacagtaaatcacgggaagatgaaactaagccatttgggctggcggtagaagaccgctctccagcaacaacccctgatacaacgccagccagaacgccaactgatgaaagtaccccaactagtgagcctaaccccttcccatttcatgaaggaaaaatgtttgagatgactcgcagtggtgcaattgacatgagcaagagggattttgttgaagagaggctccaatttttccagattggtgagcatacttctgaagggaagtcaggggaccagggggaaggggataaaagtatggtcactgccacaccacagccacagtcaggggacaccactgtagaaaccaatctagagagaaatgtagagacacctacagtggaacctaaccccagcatcccgaccagcggagagtgtcaggaaggcacatccagtagtggctccctggagaaatcagcagcagccactaacacctctaaagttgaccccaagttgcgcacgcctataaaaatgggaatttctgcatccaccatgaccatgaagaaagaaggccctggagaaataacagataagatagaagcggtgatgaccagttgtcagggattagaaaatgaaactataacaatgatttcaaatacagccaatagccagatgggcgttaggccccatgaaaaacatgattttcaaaaagataactttaataacaacaacaatttggattcttccactatacagacagataacattatgagtaatatagttctgacagaacattctgcacccacttgtaccacagagaaagataacccagtgaaagtctcatcaggaaaaaagacaggggtactacaaggacactgtgtaagagataagcagaaagttcttggagaacagcaaaaaacaaaggaattgatagggattaggcaaaaatccaaacttcccataaaggccacttcaccaaaagataccttcccaccgaaccatatgtcaaacactaaagcaagtaaaatgaagcaggttagtcaatccgagaaaaccaaagcccttactacttcttcatgtgtagatgtaaagtccagaattccagtgaaaaacacacccagggataacataattgcagttagaaaagcatgtgccacacaaaagcaagggcagccagagaaaggcaaggccaaacagcttccatccaagttgccagtaaaggtaagatccacctgtgtcactaccaccaccaccactgccaccaccaccaccactaccaccactaccaccaccaccagctgcacagttaaagttaggaaaagtcagctcaaggaagtatgtaaacattccattgaatattttaagggaattagtggtgagaccttaaagcttgtggaccgcctctctgaagaagaaaaaaagatgcagtccgagttgtccgatgaggaagaaagtacctcaagaaacacgtcgttgtccgagacttcccggggtggccagccttcggttacaacgaagtctgctagagataagaaaacagaggcagcacctttaaaatcaaagagtgaaaaggccggcagtgagaaaaggagcagtagaaggactggtccacagagtccatgtgaacggacagatatcaggatggcaatagtagccgatcacctgggacttagttggacagaactggcaagggaactgaatttttcagtggatgaaatcaatcaaatacgtgtggaaaatccaaattctttaatttctcagagcttcatgttattaaaaaaatgggttaccagagacggaaaaaatgccacaactgatgccttaacttcggtcttgacaaaaattaatcgaatagatatagtgacactgctagaaggaccaatatttgattatggaaatatttcaggcaccagaagttttgcagatgagaacaatgttttccatgaccctgttgatggttggcagaatgagacatcaagtggaaacctagagtcctgcgctcaagctcgaagagtaactggtgggttactagatcgactggatgacagccctgaccagtgtagagattccattacctcatatctcaaaggagaagctggcaaatttgaagcaaatggaagccatacagaaatcactccagaagcaaagacaaaatcttactttccagaatcccaaaatgatgtaggaaaacagagtaccaaggaaactctgaaaccaaaaatacatggatctggtcatgttgaagaaccagcatcaccactagcagcatatcagaaatctctagaagaaaccagcaagcttataatagaagagactaaaccctgtgtgcctgtcagtatgaaaaagatgagtaggacttctccagcagatggcaagccaaggcttagcctccatgaagaagaggggtccagtgggtctgagcaaaagcagggagaaggttttaaggtgaaaacgaagaaagaaatccggcatgtggaaaagaagagccactcg

SEQ ID NO: 7367 - DNA, 1020 bp, Homo sapiens
  SIMILAR (128)..(940): 701254mologous to Homo sapiens ankyrin G,accession number U13616,Smith-Waterman Score=839.
tcaaatgatgtcattagaacctagccactttctctcttctcctcctctgccctcttttccatctctcagttctactttcctatgcgctggccttattcccaggcaagccttctgcatctggtggtttccagcacctccaggcttatgtcctgcaatttcaataatatcatacaagccattcttttctacaagaccataccagtcctggacaacagctccgattacagtgcctgggccagccaagtcaggcttcacttccttatcaagttcttcctctaatacgccatcagcttctccgttaaaatcaatatggtctgtttcgacaccttctccaatcaaatccacattaggcgcgtcaactacatccggcctgcgaccgaagtcgcctacgcgacaagttctacgggacttccccatgtgttccgcggcagccacaactgcgttcatgttttcctctcgaacctctccagtgactacagcagggtctcttttggagaggtcatcaattactatgacaccccctgcctcccccaaatcaaacattaatatgtattcctcaagtttgccatttaagtcaattattacatcagcagcaccgctaatatcttcacctttaaagtcagtggtgtctccagttaaatcagcagttgatgtcatttcatcagccaaaattacaatggcatcttctctctcatcacctgtgaagcagatgcctggacatgcagaggtagcattagtcaatggatctatttcccctctaaaatatccatcatcctcaactttaattaatggatgcaaagccactgccacgttacaggaaaaaatttcttctgctacaaactctgtgagctctgtggtcagtgcagccactgacacagttgagaaagtgttttctaccacgactgcaatgccattttccccactcaggtcatatgtttctggataatttttgtgttgttgttgttgttgttgttgttgttgttgttgttgctgtgtgtatggagaccggggttttgccat

SEQ ID NO: 7368 - DNA, 936 bp, Homo sapiens
  SIMILAR (520)..(933): 511254mologous to Homo sapiens Gag-Pro-Pol protein,accession number AF164615,Smith-Waterman Score=377.
atggaagataaagcagcaatttactatgggcatcaaacagatacgtcgaatgacattgagggtttcactgaagaccagtggtctgatcacctcaacattcctggctgcccaatgtggggtgacaaagaccctggtgaaggaacgccagagcatgtgaaagctgaggatgcattgtcaaagggcacccgaggacatctaaaagaagctgagcctgggaagaaccaggccgcaggcctcggggccgctgctgctgatggattgaagccgccccacaagctcaggaggtgcagggagatggcctctggctcccgtgtggggctgcaggagcaggcgggctgcaaagtgcccgaagctatggcactgtgggagaggccagtgtggctgagcacccatgggtgctcctggagggtgcatggctggctgtggcagtctggctgctgctgcctcgcctggcctggtgcctggtcaccttccccgcctactgcagcccccagccatccccacagagcttctcttcgggtggcgcttctctccggacagtggggcctgacctgtgggcagctgctggcgtcagcacccttgctccagtcgtgggcctgggacaccaggcttctcatgtgcaggcgtctgagctgctccagtgaggagggagaaagaattgctcagttgttgctgttaccttacctaaaactaggaagcagcacagtgaaaagaacaggaggctttggtaatactaatccagcaggaaaggctgtgtattgggttaatcaggtgtcggacaaaagacctatttgcacagtagctattcagggaaaagattttgaaggactagtagatactgaagctgatgtctctattattgctataaatcaatggccccagcactggcctaagcaaaaggcatccattggtattgttggagtaggagctgcctag

SEQ ID NO: 7369 - DNA, 2388 bp, Homo sapiens
  SIMILAR (1267)..(1665): 621254mologous to Homo sapiens Gag-Pro-Pol protein,accession number AF164614,Smith-Waterman Score=464.
ggctgggtgccgtttcgcggcgaggatcgttctgtgtttggctgcctttcgtgagttcaaggggtgatcagaactccgttaaagattggttagcgcaacgctggaacagcagagccaggggggaaattggtcgcgtcttccatggagggtagtccgtttgaagggacttagcccgggcgctttttgagatgtggctgcctaggcctccacgtcccggtatttaagatcgctaatccccggcccctatgtagtttaaaccattgcggctgtaaatcatgtgcttaaggcaatgtgtcctttccacttccacattatcaccacttgtttctttgttggattcccaataaatagcatgggctgccagagctcagggccttcacagcctccacaatggtgatggccccctggtatcccacctttctctctcaaactgtgtacttctcaatcctttggctccgtcggactttgtcacccccaagacctggtgttgggtttgatcaccccaacattcctggctgctcaatgtggggcgacaaagaccccactgaaggaacgctagagtgtgtgaaagcagaggatgcatcgtcaaaggacacctgaggatgtctaaaagaagctcagtaggaaagttgagcacttggaagaaccagggtaacaatgagacaaagtgaaagcagacattctgcttatcgaaatttcttaaggcatttattatgaagatggagagtgaaagttagtcctcagaatttgttatcactcactcttcagtgcagtaaagcagttttgcccatggttcccagaacaagggactatagagttggaggaatgggagagaattgcccgagattttttaaaaagcatataaagatggagcaaaaattccagtctcagttttggtcaatgtgggtgctaataaaagcagctcttgagccatttcaaacagatgatgaggcagattcagatgcggaagaggaggatgggtgtaaagaactaaattcagattctgaatgtgaggaacaggaaatggaggaaattaaagaaaagaaagggaaactgaacaaaggacctaaagaatcatatattgattttattgcttggctccaagaggttgtgtataaagccataactgataaaacagctcaagatgttgtaatacagcttctcacatatgataatgctaatgcagagtgtcaaactgctattagacccctgagagggaagtctcatttagctgaatatattaaggcttgcaatggcactggaggagaaagaattgctcagttgttgctgttaccttacataaaactagggagcagcacagtgaaaagagcaggaggctttggtagtactaatccagcaagaaaggctgtatattgggttaatcaagtgtctgacaaaagacctatttgcacagtaactattcagggaaaagattttgaaggacgagtagataccggagctgatgtctctattattgctataaatcaatggccccagcattggcctaagcaaaaggcacccattggtattgctggagtaggagctgcctcagaaatttttcacagttccttgattttaccatgtcaagggttggatggccaggaagagacaattcagcctattattatacctattcctgttaatttatgggctgaatcttggggtgacagaggctcctttgtggccatcatcattataactttgatgggtcatacctgtggccagcacagtacctcagccaaggcctgctgtaaccactactgcacacggatgcccaaggactactacccatggtttctaaaggggacctacaatcagcagcctcaggacttggtgctctgcgtctcagccactccagccatggctaaagggggccatggtacagctcaggccattgcttcagagggtgaaagccccaagctttggcagtttccatctaatgttggtcctacaggtgtgcagaagacaaaaactgagatttgtgaggacagcacttgcgtctttgaagagccctgtaattgctcttctctgtatgtcagatctaacggtgggagccatagtcagtcaattacaaaatttaattacaacggaataattggatcccgaggtggcgagggccaagtggtagcactcagccatcaaaggcaaggggatccaaaatgtcactgtggtcctccacttaaagtaggggcttatggaggacaggtaactgtggcaaccattaaatatcggcagtcaggaaactttgggccagatgagcgcacagttgtacccatggtgcaatgcacaaattggctgagagatgacaatgtgtggatggaacaaaagctagcacttatgacggaacaactgaatgagcaacatggagcatctctactccatggctag

SEQ ID NO: 7370 - DNA, 387 bp, Homo sapiens
  SIMILAR (1)..(150): 1001254mologous to Escherichia coli Protein AraJ precursor,accession number D90795,Smith-Waterman Score=245.
ctacgggtcgttacgctggcagtcgccgccttcatcttcaacaccaccgaatttgtccctgttggcctgctctctgacattgcgcaaagttttcacatgcaaaccgctcaggtcggcatcatgttgaccatttacgcatgggtagtagcgcaacctcccctcacgaggggggggaaggcctagttccccactgcgtttagagaaacagggctcggacaagacagttcggatgttgtcgaagacttctcgtgggtgatgtcgtagaccagcatgatgccatgtgggggccaccctctgacggtctgtgtggttctcgatgtccttgtggagtgcccacagcgggccagcctgcagtgccatcacaagtccccctttgttgccgggcat

SEQ ID NO: 7371 - DNA, 1716 bp, Homo sapiens
  SIMILAR (865)..(1362): 901254mologous to Escherichia coli yeiH,accession number U00007,Smith-Waterman Score=751.
atgacctgggcctactctccaagctatggcaaaccgctctctgtaccacaaggcatcatcggtctgatgactcgcttcggtatggatgtcaccctggcccatccggaaggctacgacctgatcccggatgtggttgaagtggcgaaaaacaatgctaaagcctccggtggtagcttccgtcaggtcaccagcatggaagaagccttcaaagacgcagacatcgtttatccgaagtcatgggcaccttacaaagtgatggaagagcgtactgaattgctgcgtgcgaacgatcacgaaggcgtaaaacgcaccggaaaaacactgtctaggcacagaacgcgcaacacaaacgactggcaccagcatcgaagagatgatggaaccgatcccgtgagggcgaagcccagaacaagcacggccgaccagactgagatcaacggcgcatcctgtaaagaagggcgaagtgaccagaaggcgtatgacgagaaatcacgcccagatgagatgccgatagatgacaacgtcgtgcttaacaaaggtgacgttttacaagtcagcggcgatgcccgccgcgtaaaaaccatcgccgatcgcatcggctttatctcgattcacagccaggtcactgacctgctggcattctgcgccttctttgttattgggctgatgatcgggatgatcaccttccagttcagcacattcagtttcggcatggggaacgctgccgggttgttattcgccggaattatgctgggctttatgcgtgctaaccacccgaccttcggttacattccgcagggtgcattaagcatggtgaaagagttcggcttgatggtgtttatggcaggcgaaatccaggttgatggcaacaccatctatccgcacatctggaaaagctgtgacggtggtgtgctgtttgccaagcaatatttattacgtctgggtatcattctttatggcttccgtctgacgttctcgcaaattgccgatgtcggtatcagtgggatcatcattgacgtgttgacgctgtccagtaccttcctgctggcttgcttcctggggcagaaagtgtttggtctggataagcacaccagctggttgatcggtgccggtagcagtatctgtggtgctgccgcggtactggcgactgagccggtagtgaaagcggaagccagtaaagtaaccgtggctgttgcaaccgttgttatcttcgggaccgtcgcgattttcctctacccggcgatatatccgctgatgtctcaatggtttagtccggaaactttcggtatctacattggttccgttattgaagtcggcgttgatgtgcctaacgccagtctgatgattatcgaaaacccggagcgtctgggtctggcgcagttacaccagctgcgcgggcgcgtaggtcgtggcgcggggcttctcactgcgtgctgctctacaaaacgccgctttctaaaagccgctccggaggtgacacggaccggcctagcagatgaccgtagctcaggacttccacttcaaactggttacgagctggcatccatgcagggcctggttgatgtggtccgcctgtcaccgcagggtactgacactttcgcgatgctcgacgccttccgcgctaatgaaaatggcgctgcaccactgccgttgacggcgaacagcgactgtaacggctactggcggcggctggcaggactggagctgcaagcctaa

SEQ ID NO: 7372 - DNA, 777 bp, Homo sapiens
  SIMILAR (223)..(774): 871254mologous to Escherichia coli K12 putative transport protein,accession number AE000187,Smith-Waterman Score=832.
atgcatcttaacgaaaacctcgacgataacggcgaaatgcatgatatcaacgtgacgccgtttatcgacgtgatgttggttctgctgattatctctatggtggcggcaccgttagcgacggtagatgtgaaggtgaacttgcctgcttctaccagcacgccgcagccgcgcccggaaaaaccggtttatctgtcggtgaaggcagacaactccgacacgagcaggcctcagccggaccacctcatgttactggacgacggcaaaaacctgcgtgtactgggtatttatcgacaaaccggctgctacattgaacgtattcgacgtaacgggattctggcaaatccagacggtgatgccgtgctacaaatgggcgatgaaatagccttccgtaacggtaaagaagttttcgatcgtgaccttctcgacatgcgtatcgtcactgaagaagtggtcgttaaaaaccataacgctgtaggtaaacgtctcgcacaactgaagttgaccgatcacggttgcttccttaaccgcgtcattcgtagccagattgagatgccgatagatgacaacgtcgtgcttaacaaaggtgacgtcttacaagtcagcggcgatgcccgccgcgtaaaaaccatcgccgatcgcatcggctttatctcgattcacagacaggtcactgacctgctggcattctgcgccttcttggttattgggctgatgatcgggatgatcaccttccagttcagcacattcagtttcggcatggggaacgctgccgggtag

SEQ ID NO: 7373 - DNA, 158 bp, Homo sapiens
  SIMILAR (2)..(157): 1001254mologous to Escherichia coli heat shock regulatory protein,accession number K02177,Smith-Waterman Score=267.
gtctcacctgcggtttgttgttcatattgctcgtaattatgcgggctatggcctgccacaggcggatttgattcaggaaggtaacatcggcctgatgaaagcagtgcgccgtttcaacccggaagtgggtgtgcgcctggtctccttcgccgttcact

SEQ ID NO: 7374 - DNA, 177 bp, Homo sapiens
  SIMILAR (1)..(147): 1001254mologous to Escherichia coli Flagellar hook protein,accession number D90743,Smith-Waterman Score=241.
atggccttttctcaagcggttagcggattaaacgctgccgccaccaacctcgatgttattggcaacaatatcgccaactccgccacctacggctttaaatcaggcacggcctcttttgccgatatgtttgccggttcgaaagtgggaggatgttggaaatttgtggagaagttttag

SEQ ID NO: 7375 - DNA, 1248 bp, Homo sapiens
  SIMILAR (634)..(1245): 971254mologous to Cloning vector pZC320 SopA,accession number U26464,Smith-Waterman Score=1025.
atggcggaaacagcggttatcaatcacaagaaacgtaaaaatagcccgcgaatcgtccagtcaaacgacctcactgaggcggcatatagtctctcccgggatcaaaaacgtatgctgtatctgttcgttgaccagatcagaaaatctgatggcaccctacaggaacatgacggtatctgcgagatccatgttgctaaatatgctgaaatattcggattgacctctgcggaagccaaggcgggaatttgtgagaactgggagagtgtggctgtcggcaggggtccgtatcacactgtgggcgggggtcccgacccctgctgcctcgggtacggggtaagcggcatctgccacgcgcccgcctcgcgcgctgtcaggaggcgctgtccccgtggggattttgccgatttcggaaccaccatcaaacaggattttcgcttgctggggcaaaccagcgtggaccgcttgctgcaactctctcagggccaggcggtgaagggcaatcagctgttgcccgtctcatgggtgaaaagaaaaaccaccctggcgcccaatacgcaacccgcctctccccgcgcgttggccgattcattaatgcagctggcacgacaggtttcccgactggaaagcgggcacccacttgctggcccggggctgacaattatcccttcctgtctggctctgccccgtattgaaactgagttaatgggcaaatttgatgaaggtaaactgcccaccgatccacacttgatgctcggactggccattgaaactgttgctcatgactatgatgtcatagttattgacagcgcgcctaacctgggtatcggcacgattaatgtcgtatgtgctgctgatgtgctgattgttcccacgcctgctgagttgtttgactacacctccgcactgcagtttttcgatatgcttcgtgatctgctcaagaacgttgatcttaaagggttcgagcctgatgtacgtattttgcttaccaaatacagcaatagtaatggctctcagtccccgtggatggaggagcaaattcgggatgcctggggaagcatggttctaaaaaatgttgtacgtgaaacggatgaagttggtaaaggtcagatccggatgagaactgtttttgaacaggccattgatcaacgctcttcaactggtgcctggagaaatgctctttctatttgggaacctgtctgcaatgaaattttcgatcgtctgattaaaccacgctgggagattagataa

SEQ ID NO: 7376 - DNA, 1116 bp, Homo sapiens
  SIMILAR (1)..(852): 951254mologous to Cloning vector pZC320 SopA,accession number U26464,Smith-Waterman Score=1388.
  misc_feature (1)...(1116): n = a,t,c or g
atggaaattcgaggacgggttgagcaacgtgttggttatacaattgaacaaattaatcatatgcgtgatgtgtttggtacgcgattgcgacgtgctgaagacgtatttccaccggtgatcggggttgctgcccataaaggtggcgtttacaaaacctcagtttctgttcatcttgctcaggatctggctctgaaggggctacgtgttttgctcgtggaaggtaacgacccccagggaacagcctcaatgtatcacggatgggtaccagatcttcatattcatgcagaagacactctcctgcctttctatcttggggaaaaggacgatgtcacttatgcaataaagcccacttgctggccggggcttgacattattccttcctgtctggctctgcaccgtattgaaactgagttaatgggcaaatttgatgaagnagaatccccaactgagttaatgggcaaatttgatgaaggtaaactgcccaccgatccacacctgatgctccgactggccattgaaactgttgctcatgactatgatgtcatagttattgacagcgcgcctaacctgggtatcggcacgattaatgtcgtatgtgctgctgatgtgctgattgttcccacgcctgctgagttgtttgactacacctccgcactgcagtttttcgatatgcttcgtgatctgctcaagaacgttgatcttaaagggttcgagcctgatgtacgtattttgcttaccaaatacagcaatagtaatggctctcagtccccgtggatggaggagcaaattcgggatgcctggggaagcatggttctaaaaaatgttgtacgtgaaacggatgaagttggtaaagaggaaacagctctgtgtcagtatcgtaagccggatggctcaggcatcgtctctctgaacatcgactggatcatagagcgttaccagctgcctcaaagttaccagactaggcctgacttccgccgccgcttcctgcaggtctgtgttaatgagatcaacagcagaactccaatgcgcctctcatacattgagaaaaagaaaggccgccagacgactcatatcgtattttccttccgcgatatcacttccatgacgacaggatag

SEQ ID NO: 7377 - DNA, 1234 bp, Homo sapiens
  SIMILAR (368)..(1204): 851254mologous to Cloning vector pZC320 SopA,accession number U26464,Smith-Waterman Score=1222.
actaataatcagaccgacgatacgagtgggaccatggtccagcactaataatcagaccgacgatacgagtgggaccgtggtcagatctgattatcagaccgacgatacgagtgggaccgtggtcagtactaataatcagaccgacgatacgagtgggaccgtggtcagatctaataatcagaccgacgatacgagtgggaccgtgtgtgacaatctaaaaacttgtcacacttcacatggatctgtcatggcggaaacagcggttatcaatcacaagaaacgtaaaaatagcccgcgaatcgtccagtcaaacgacctcactgaggcggcatatagtctctcccgggatcaaaaacgtatgctgtatctgttcgttgaccagatcagaaaatctgatggcaccctacaggaacatgacggtatctgcgagatccatgttgctaaatatgctgaaatattcggattgacctctgcggaagcagatctggctctgaaggggctacgtgttttgctcgtggaaggtaacgacccccagggaacagcctcaatgcatcacggatgggtatcagatcttcatattcatgcagaagacactctcctgcctttctatcttggggaaaaggacgatgtcacttatgcaataaagcccacttgctggccggggcttgacattattccttcctgtctggctctgcaccgtattgaaactgagttaatgggcaaatttgatgaaggtagactgcccaccgatccacacctgatgctccgactggccattgaaactgttgcgcatgactatgatgtcatagttattgacagcgcgcctaacctgggtatcggcacgattaatgtcgtatgtgctgctgatgtgctgattgttcccacgcctgctgagttgtttgactacacctccgcactgcagtttctcgatatgcttcgtgatctgctcaagaacgttgatcttaaagggttcgagcctgatgtacgtattttgcttaccaaatacagcaatagtaatggctctcagtccccgtggatggaggagcaaattcgggatgccttgggaagcatggttctacaaaatgttgtacgtgaaacggatgaagttggtaaaggtcacatccggatgagaactgtctttgagcaggccattgatcaacgctcttcaactggtgactggagaaatgctctttctatctgggaactgtctgcaatgacattctcgatcgtctga

SEQ ID NO: 7378 - DNA, 1215 bp, Homo sapiens
  SIMILAR (777)..(43): 851254mologous to Cloning vector pSacBII SacB,accession number U09128,Smith-Waterman Score=1139.
  misc_feature (1)...(1215): n = a,t,c or g
ctaggacttgacagccctgctttgtgcgactctaaaggacccccataaagattcttcgccttggtatccgttttctgttcccgtgttggcttcgaatacaaggtatttatggcctttgtcttcaacgtagtgagggtctctcagcgtatggttgtcgccggatgtataattgccttcatcgataaactgctgaacgttctgatatgtttttccgtctccgtcaaaaatcgttttgtgatcttccactccgttgattttgagtgtgtcatcagattttgacacatttacctgcgcggaatagtcagtgtagaataaacggatttttccgtcagatgtaaaggttgcagaaccggaccattcttgcgtctgatctttcaggatcggatcgttggcgtcgaacttatcgctgtctttaaagacacggcccgcgtttttccagctgtcgattgagttgtcgccgaccttttgataaaacatgtagattgatgtgtcatcagcgtctttcgggcttcccgcaagagcaaacacaacgtgatagccgttgtattcagctactgttccgtcagcgttttgcagcggccagctgtcccacacatcaagtccttttgcagactcaatatttttaatcgttgattgatcgaattgaggcacttggtatttttcgntttgctgctgtttagggatctgggtatcggcacgattaatgtcgtatgtgctgctgatgtgctgattgttcccacgcctgctgagttgtttgactacacctccgcactgcagtttttcgatatgcttcgtgatctgctcaagaacgttgatcttaaagggttcgagcctgatgtacgtattttgcttaccaaatacagcaatagtaatggctctcagtccccgtgggatggaggagcaaattcgggatgctgcccgctttccagtcgggaaacctgtcgtgccagctgcattaatgaatcggccaacgcgccggggagaggcggtttgcgtattgggcgccagggtggtttttcttttcaccagtgagacgggcaacagctgattgcccttcaccgcctggccctgagagagttgcagcaagcggtccacgctggtttgccccagcaggcgaaaatcctgtttgatggtggttccgaaatcggcaaaatcccacttcaagccactgagattcagttcctccaggaacagctcctctggtaccacacccat

SEQ ID NO: 7379 - DNA, 1431 bp, Homo sapiens
  SIMILAR (793)..(1428): 1001254mologous to Cloning vector pZC320 SopA,accession number U26464,Smith-Waterman Score=1118.
atgggcaaatttgatgaaggtaaactgcccaccgatccacacctgatgctccgactggccattgaaactgttgctcatgactatgatgtcatagttattgacagcgcgcctaacctgggtatcggcacgattaatgtcgtatgtgctgctgatgtgctgattgttcccacgcctgctgagttgtttgactacacctccgcactgcagtttttcgatatgcttcgtgatctgctcaagaacgttgatcttaaagggttcgagcctgatgtacgtattttgcttaccaaatacagcaatagtaatggctctcagtccccgtggatggaggagcaaattcgggatgcctggggaagcatggttctaaaaaatgttgtacgtgaaacggatgaagttggtaaagtttctgttcatcttgctcaggatctggctctgaaggggctacgtgttttgctcgtggaaggtaacgacccccagggaacagcctcaatgtatcacggatgggtaccagatcttcatattcatgcagaagacactctcctgcctttctatcttggggaaaaggacgatgtcacttatgcaataaagcccacttgctggccggggcttgacattattccttcctgtctggctctgcaccgtattgaaactgagttaatgggcaaatttgatgaaggtaaactgcccaccgatccacacctgatgctccgactggccattgaaactgttgctcatgactatgatgtcatagttattgacagcgcgcctaacctgggtatcggcacgattaatgtcgacgatgtcacttatgcaataaagcccacttgctggccggggcttgacattattccttcctgtctggctctgcaccgtattgaaactgagttaatgggcaaatttgatgaaggtaaactgcccaccgatccacacctgatgctccgactggccattgaaactgttgctcatgactatgatgtcatagttattgacagcgcgcctaacctgggtatcggcacgattaatgtcgtatgtgctgctgatgtgctgattgttcccacgcctgctgagttgtttgactacacctccgcactgcagtttttcgatatgcttcgtgatctgctcaagaacgttgatcttaaagggttcgagcctgatgtacgtattttgcttaccaaatacagcaatagtaatggctctcagtccccgtggatggaggagcaaattcgggatgcctggggaagcatggttctaaaaaatgttgtacgtgaaacggatgaagttggtaaaggtcagatccggatgagaactgtttttgaacaggccattgatcaacgctcttcaactggtgcctggagaaatgctctttctatttgggaacctgtctgcaatgaaattttcgatcgtctgattaaaccacgctgggagattagataa

SEQ ID NO: 7380 - DNA, 1128 bp, Homo sapiens
  SIMILAR (235)..(843): 991254mologous to Cloning vector pZC320 SopA,accession number U26464,Smith-Waterman Score=1055.
atggcggtctgcaggtcccgagccctgccccgcgggaaggcagctaaggccccacgagaaatcgagcacagcgcagccacccagctttggcccttatgctatcgtctgaaacctgtcggcgccgacacagaaaaccagtctccacagcaatcagttattccaagacaccgatttgagtgcgggtctcgtcctgggtcaaggtccccaacccaaccaaggctcctattaaagccaaaggatctggctctgaaggggttacgtgttttgctcgtggaaggtaacgacccccagggaacagcttcaatgtatcacggatgggtaccagatcttcatattcatgcagaagacactctcctgcctttctatcttggggaaaaggacgatgtcacttatgcaataaagcccacttgctggccggggcttgacattattccttcctgtctggctctgcaccgtattgaaactgagttaatgggcaaatttgatgaaggtaaactgcccaccgatccacacctgatgctccgactggccattgaaactgttgctcatgactatgatgtcatagttattgacagcgcgcctaacctgggtatcggcacgattaatgtcgtatgtgctgctgatgtgctgattgttcccacgcctgctgagttgtttgactacacctccgcactgcagtttttcgatatgcttcgtgatctgctcaagaacgttgatcttaaagggttcgagcctgatgtacgtattttgcttaccaaatacagcaatagtaatggctctcagtccccccccatggaggagcaaattcgggatgcctggggaagcatggttctaaaaaatgttaaatgccgatggagtcgccgtgtaaagtgtgcactacgaaagtattatcgtgttctggttgcgagtgcacaccacagatggtgcattatccagattgggacgattatcgcccacaaggcttatgaacgtgggccaggcgttaagggccaatcacttgttgtccgtttcactggtgaaagaaaacccgccctggcgctcaatacgcaaaccgcctctccccgcgtgtgggccgattcattaatgcagctggcacgacaggtttcccgactggaaagcggacagtga

SEQ ID NO: 7381 - DNA, 1437 bp, Homo sapiens
  SIMILAR (126)..(353): 891254mologous to Cloning vector pZC320 SopA,accession number U26464,Smith-Waterman Score=356.
  misc_feature (1)...(1437): n = a,t,c or g
tcagaccgacgatacgagtgggaccgtggtcccagtctgattatcagaccgacgatacgagtgggaccgtggtcccagactaataatcagaccgacgatacgagtgggaccgtggtcccagaccctttccaccggtgatcggggttgttttccataaaggtggcgtttacaaaacctcagtttctgttcatcttgctcaggatctggctctgaaggggctacgtgttttgctcgtggaaggtaacgacccccagggaacagcctcaatgtatcacggatgggtaccagatcttcatattcatgcagaagacactctcctgcctttctatcgatccacacctgatgctccgactggccattgaaactgttgctcatgactatgatgtcatagttattgacagcgcgcctaacctgggtatcggcacgattaatgtcgtatgtgctgctgatgtgctgattgttcccacgcctgctgagttgtttgactacacctccgcactgcagtttttcgatatgcttcgtgatctgctcaagaacgttgatcttaaagggttcgagcctgatgtacgtattttgcttaccaaatacagcaatagtaatggctctcaatccccgtggatggaagagcaaatatcggatgccctccgcatcagccagcgcagaaatatttccagcaaattcattctgcaatccgcttgcataacgctgaccacgttcataagcacttgttgggcgataatcgttacccaatctggataatgcagccatctgctcatcatccagctcgccaaccagaacacgataatcactttcggtaagtgcagcagctttacgacggcgactcccatcggcaattttcnttcgaccgaacgccggtgtctgttgaccagtcagtagaaaagaagggatgagatcatccagtgcgtcctcagtaagcagctcctggtcacgttcattacctgaccatacccgagaggtcttctcaacactatcaccccggagcacttcaagagtaaacttcacatcccgaccacatacaggcaaagtaatggcattaccgcgagccattactcctacgcgcgcaattaacgaatccaccatcggggcagctggtgtcgataacgaagtatcgacgatgcgagtgggaccgagggcccagtactgattatcagaccgaccatacgagtgggaccgtggtcccagactaataatcataccgtctatacgagtgggaccgtgtgtcccagactggttacccaggccgtgccggcacgttaaccgggctgcatccgatgcaagtgtgtcgctgtcgacggtgacccgtgtatgaaatctaacaatgcgctcatcgtcatcctcggcaccgtcaccctggatgctgtaggcataggcttggttatgccggtactgccgggcctcttgcgggatatcgtccat

SEQ ID NO: 7382 - DNA, 1332 bp, Homo sapiens
  SIMILAR (283)..(804): 1001254mologous to Cloning vector pZC320 SopA,accession number U26464,Smith-Waterman Score=919.
atgaaactcatggaaacacttaaccagtgcataaacgctggtcatgaaatgacgaaggctatcgccattgcacagtttaatgatgacagcccggaagcgaggaaaataacccggcgctggagaataggtgaagcagcggatttagttggggtttcttctcaggctatcagagatgccgagaaagcagggcgactaccgcacccggatatggaaattcgaggacgggttgagcaacgtgttggttatacaattgaacaaattaatcatatgcgtgatgtgtttgtttctgttcatcttgctcaggatctggctctgaaggggctacgtgttttgctcgtggaaggtaacgacccccagggaacagcctcaatgtatcacggatgggtaccagatcttcatattcatgcagaagacactctcctgcctttctatcttggggaaaaggacgatgtcacttatgcaataaagcccacttgctggccggggcttgacattattccttcctgtctggctctgcaccgtattgaaactgagttaatgggcaaatttgatgaaggtaaactgcccaccgatccacacctgatgctccgactggccattgaaactgttgctcatgactatgatgtcatagttattgacagcgcgcctaacctgggtatcggcacgattaatgtcgtatgtgctgctgatgtgctgattgttcccacgcctgctgagttgtttgactacacctccgcactgcagtttttcgatatgcttcgtgatctgctcaagaacgttgatcttaaagggttcgagcctgatgatctggctctgaaggggctacgtgttttgctcgtggaagatcttcatattcatgcagaagacactctcctgcctttctatcttggggaaaaggacgatgtcacttatgcaataaagcccacttgctggccggggcttgacattattccttcctgtctggctctgcaccgtattgaaactgagttaatgggcaaatttgatgaaggtaaactgcccaccgatccacacctgatgctccgactggccattgaaactgttgctcatgactatgatgtcatagttattgacagcgcgcctaacctgggtatcggcacgattaatgtcgtatgtgctgctgatgtgctgattgttcccacgcctgctgagttgtttgactacacctccgcactgcagtttttcgatatgcttcgtgatctgctcaagaacgttgatcttaaagggttcgagcctgatgtacgtattttgcttaccaaatacagcaatagtaaggggggatctctagagtcgcacagcaggctgcaagcataa

SEQ ID NO: 7383 - DNA, 1188 bp, Homo sapiens
  SIMILAR (346)..(999): 961254mologous to Cloning vector pZC320 SopA,accession number U26464,Smith-Waterman Score=1121.
atgggcaaggacttcatctctaagacaccaaaagcaatggcaacaaaagccaaaattgacaaacgggatctaattaaattaaagagcttctgcacagcaaaggaaactaccatcagagaacgcagctcttcaccagcaacagaacaaagctggacggagaatgactttgacgagttgagagaagaaggcttcagacgatcaaactactccgagctacaggaggaaattctaaccaaaggcaaagaagctgaaaactttgaaaaaaatttagacgaacgtataactagaataaccaatacagagaagtgcttaaaggagctgatggagctgaaagccaaggctcgagaagatctggctctgaaggggctacgtgttttgctcgtggaaggtaacgacccccagggaacagcctcaatgtatcacggatgggtaccagatcttcatattcatgcagaagacactctcctgcctttctatcttggggaaaaggacgatgtcacttatgcaataaagcccacttgctggccggggcttgacattattccttcctgtctggctctgcaccgtattgaaactgagttaatgggcaaatttgatgaaggtaaactgcccaccgatccacacctgatgctccgactggccattgaaactgttgctcatgactatgatgtcatagttattgacagcgcgcctaacctgggtatcggcacgattaatgtcgtatgtgctgctgatgtgctgattgttcccacgcctgctgagttgtttgactacacctccgcactgcagtttttcgatatgcttcgtgatctgctcaagaacgttgatcttaaagggttcgagcctgatgtacgtattttgcttaccaaatacagcaatagtaatggctctcagtccccgtggatggaggagcaaattcgggatgcctggggaagcatggttctaaaaaatgttgtacgtgaaacggatgaagttggtaaagctgaactggtactgaagctgcaaagcaaagtcccttttactcttagatctactttcctcaaacaggaggagtctctccctatagccaccatagctggcatgtgtggggttacacctgaagccagcataatactgattctcaccccatgctgtggcaagtactacctggctaccactgctgattattcaggtccaagggctctttag

SEQ ID NO: 7384 - DNA, 1068 bp, Homo sapiens
  SIMILAR (49)..(1053): 741254mologous to Cloning vector pZC320 SopA,accession number U26464,Smith-Waterman Score=1243.
atggcggaaacagcggttatcaatcacaagaaacgtaaaaatagcccgcgaatcgtccagtcaaacgacctcactgaggcggcatatagtctctcccgggatcaaaaacgtatgctgtatctgttcgttgaccagatcagaaaatctgatggcaccctacaggaacatgacggtatctgcgagatccatgttgctaaatatgctgaaatattcggattgacctctgcggaagccagtaaggatatacggcaggcattgaagagtttcgcggggaaggaagtggttttttatcgccctgaagaggatgccggcgatgaaaaaggctatgaatcttttccttggtttatcaaacgtaacgacccccagggaacagcctcaatgtatcacggatgggtaccagatcttcatattcatgcagaagacactctcctgcctttctatcttggggaaaaggacgatgtcacttatgcaataaagcccacttgctggccggggcttgacattattccttcctgtctggctctgcaccgtattgaaactgagttaatgggcaaatttgatgaaggtaaactgcccaccgatccacacctgatgctccgactggccattgaaactgttgctcatgactatgatgtcatagttattgacagcgcgcctaacctgggtatcggcacgattaatgtcgtatgtgctgctgatgtgctgattgttcccacgcctgctgagttgtttgactacacctccgcactgcagtttttcgatatgcttcgtgatctgctcaagaacgttgatcttaaagggttcgagcctgatgtacgtattttgcttaccaaatacagcaatagtaatggctctcagtccccgtggatggaggagcaaattcgggatgcctggggaagcatggttctaaaaaatgttgtacgtgaaacggatgaagttggtaaaggtcagatccggatgagaactgtttttgaacaggccattgatcaacgctcttcaactggtgcctggagaaatgctctttctatttgggaacctgtctgcaatgaaatttcggggggtctttag

SEQ ID NO: 7385 - DNA, 1062 bp, Homo sapiens
  SIMILAR (1)..(501): 1001254mologous to Cloning vector pZC320 SopA,accession number U26464,Smith-Waterman Score=886.
  misc_feature (1)...(1062): n = a,t,c or g
gatctggctctgaaggggctacgtgttttgctcgtggaaggtaacgacccccagggaacagcctcaatgtatcacggatgggtaccagatcttcatattcatgcagaagacactctcctgcctttctatcttggggaaaaggacgatgtcacttatgcaataaagcccacttgctggccggggcttgacattattccttcctgtctggctctgcaccgtattgaaactgagttaatgggcaaatttgatgaaggtaaactgcccaccgatccacacctgatgctccgactggccattgaaactgttgctcatgactatgatgtcatagttattgacagcgcgcctaacctgggtatcggcacgattaatgtcgtatgtgctgctgatgtgctgattgttcccacgcctgctgagttgtttgactacacctccgcactgcagtttttcgatatgcttcgtgatctgctcaagaacgttgatcttaaagggttcgagcctgataggcccttttcctgctcttctttctggggaaaaaggaggatgttcacttatgcaataaagcccccctggctggccgggggcttgacattattcccttctggtcgggtctggcccggtattgaaactgagttaatgggcaaatttgatgaaggtaactgccccaccgatccacacctgatgctccgactggccattgaaactgttgctcatgactatgatgtcatagttattgacagcgcgcctaacctgggtatcggcacgattaatgtcgtatgtgctgctgatgtgctgattgttcccacgcctgctgagttgtttgactacacctccgcactgcagtttttcgatatgcttcgtgatctgctcaagaacgttgatcttaaagggttcgagcctgatgtacgtattttgcttaccaaatacagcaatagtaatggctctcagtccccgtggatggaggagcaaattcgggatgcctggggaagcatggttctaaaaaatgttgtacgtgaaacggatgaagttggtaaaggtcagatccggatgagaactgtnttttga

SEQ ID NO: 7386 - DNA, 1192 bp, Homo sapiens
  SIMILAR (1)..(678): 1001254mologous to Cloning vector pZC320 SopA,accession number U26464,Smith-Waterman Score=1188.
gatctggctctgaaggggctacgtgttttgctcgtggaaggtaacgacccccagggaacagcctcaatgtatcacggatgggtaccagatcttcatattcatgcagaagacactctcctgcctttctatcttggggaaaaggacgatgtcacttatgcaataaagcccacttgctggccggggcttgacattattccttcctgtctggctctgcaccgtattgaaactgagttaatgggcaaatttgatgaaggtaaactgcccaccgatccacacctgatgctccgactggccattgaaactgttgctcatgactatgatgtcatagttattgacagcgcgcctaacctgggtatcggcacgattaatgtcgtatgtgctgctgatgtgctgattgttcccacgcctgctgagttgtttgactacacctccgcactgcagtttttcgatatgcttcgtgatctgctcaagaacgttgatcttaaagggttcgagcctgatgtacgtattttgcttaccaaatacagcaatagtaatggctctcagtccccgtggatggaggagcaaattcgggatgcctggggaagcatggttctaaaaaatgttgtacgtgaaacggatgaagttggtaaaggtcagatccggatgagaactgtttttgaacaggccattgatcaggggggagaggatccgcggaattatacatccggcgacaaccatacgctgagagaccctcactacgttgaagacaaaggccataaataccttgtattcgaagccaacacgggaacagaaaacggataccaaggcgaagaatctttatttaacaaagcgtactacggcggcggcacgaacttcttccgtaaagaaagccagaagcttcagcagagcgctaaaaaacgcgatgctgagttagcgaacggcgccctcggtatcatagagttaaataatgattacacattgaaaaaagtaatgaagccgctgatcacttcaaacacggtaactgatgaaatcgagcgcgcgaatgttttcaaaatgaacggcaaatggtacttgttcactgattcacgcggttcaaaaatgacgatcgatggtattaactcaaacgatatttacatgcttggttatgtatcaaactctttaaccggcccttacaagccgctgaacaaaacagggcttgtgctgcaaatgg

SEQ ID NO: 7387 - DNA, 1416 bp, Homo sapiens
  SIMILAR (643)..(1278): 991254mologous to Cloning vector pZC320 SopA,accession number U26464,Smith-Waterman Score=1111.
gtgctccggggtgatagtgttgaaaagacctctcgggtaaggtcaggtaatgaacgtgaccaggagctgctactggaggacgcactggatgatttcatcccttcttttctactgactggtcaacagacaccggcgttcggtcgaagagtatctggtgtcatagaaattgccgatgggagtcgccgtcgtaaagctgctgcacttaccgaaagtgattatcgtgttctggttggcgagctggatgatgagcagatggctgcattatccagattgggtaacgattatcgcccaacaagtgcttatgaacgtggtcagcgttatgcaagccgattgcagaatgaatttgctggaaatatttctgcgctggctgatgcggaaaatatttcacgtaagattattacccgctgtatcaaccccgccaaattgcctaaatcagttgttgctcttttttctcaccccggtgaactatctgcccggtcaggtgatgcacttcaaaaagcctttacagataaagaggaattacttaagcagcaggcatctaaccttcatgagcagaaaaaagctggggtgatatttgaagctgaagaagttatcactcttttaacttctgtgcttaaaacgtcaacgcatcaagaactagttaaggacgatgtcacttatgcaataaagcccacttgctggccggggcttgacattattccttcctgtctggctctgcaccgtattgaaactgagttaatgggcaaatttgatgaaggtaaactgcccaccgatccacacctgatgctccgactggccattgaaactgttgctcatgactatgatgtcatagttattgacagcgcgcctaacctgggtatcggcacgattaatgtcgtatgtgctgctgatgtgctgattgttcccacgcctgctgagttgtttgactacacctccgcactgcagtttttcgatatgcttcgtgatctgctcaagaacgttgatcttaaagggttcgagcctgatgtacgtattttgcttaccaaatacagcaatagtaatggctctcagtccccgtggatggaggagcaaattcgggatgcctggggaagcatggttctaaaaaatgttgtacgtgaaacggatgaagttggtaaaggtcagatccggatgagaactgtttttgaacaggccattgatcaacgctcttcaactggtgcctggagaaatgctctttctatttgggaacctgtctgcaatgaaattttcgatcgtctgattaaaccacgctggagattagatgagtgtatcctctacagtaaagcctggttgtcatgcacgctatttcgcctctcatacattgagaaaaagaaaggccgccagacgactcatatcgtattttccttccgcgatatcacttccatgacgacaggatag

SEQ ID NO: 7388 - DNA, 1179 bp, Homo sapiens
  SIMILAR (1)..(897): 991254mologous to Cloning vector pZC320 SopA,accession number U26464,Smith-Waterman Score=1555.
atgaaactcatggaaacacttaaccagtgcataaacgctggtcatgaaatgacgaaggctatcgccattgcacagtttaatgatgacagcccggaagcgaggaaaataacccggcgctggagaataggtgaagcagcggatttagttggggtttcttctcaggctatcagagatgccgagaaagcagggcgactaccgcacccggatatggaaattcgaggacgggttgagcaacgtgttggttatacaattgaacaaattaatcatatgcgtgatgtgtttggtacgcgattgcgacgtgctgaagacgtatttccaccggtgatcggggttgctgcccataaaggtggcgtttacaaaacctcagtttctgttcatcttgctcaggatctggctctgaaggggctacgtgttttgctcgtggaaggtaacgacccccagggaacagcctcaatgtatcacggatgggtaccagatcttcatattcatgcagaagacactctcctgcctttctatcttggggaaaaggacgatgtcacttatgcaataaagcccacttgctggccggggcttgacattattccttcctgtctggctctgcaccgtattgaaactgagttaatgggcaaatttgatgaaggtaaactgcccaccgatccacacctgatgctccgactggccattgaaactgttgctcatgactatgatgtcatagttattgacagcgcgcctaacctgggtatcggcacgattaatgtcgtatgtgctgctgatgtgctgattgttcccacgcctgctgagttgtttgactacacctccgcactgcagtttttcgatatgcttcgtgatctgctcaagaacgttgatcttaaagggttcgagcctgatgtaaatgtgtcaaaatctgatgacacactcaaaatcaacggagtggaagatcacaaaacgatttttgacggagacggaaaaacatatcagaacgttcagcagtttatcgatgaaggcaattatacatccggcgacaaccatacgctgagagaccctcactacgttgaagacaaaggccataaatactttgtattcgaagccaacacgggaacagaaaacggataccaaggcgaagaatctttatttggtttattgggggaaggaataaacacctgtgagagagtgagataa

SEQ ID NO: 7389 - DNA, 1305 bp, Homo sapiens
  SIMILAR (1)..(678): 911254mologous to Cloning vector pZC320 SopB,accession number U26464,Smith-Waterman Score=999.
atgaagcgtgcgcctgttattccaaacatacgctcaatactcaaccggtatgaagatacttcgttatcgacaccagctgccccgatggtggattcgttaattgcgcgcgtaggagtaatggctcgcggtaatgccattactttgcctgtatgtggtcgggatgtgaagtttactcttgaagtgctccggggtgatagtgttgagaagacctctcgggtatggtcaggtaatgaacgtgaccaggagctgcttactgaggacgcactggatgatctcatcccttcttttctactgactggtcaacagacaccggcgttcggtcgaagagtatctggtgtcatagaaattgccgatgggagtcgccgtcgtaaagctgctgcacttaccgaaagtgattatcgtgttctggttggcgagctggatgatgagcagatggctgcattatccagattgggtaacgattatcgcccaacaagtgcttatgaacgtggtcagcgttatgcaagccgattgcagaatgaatttgctggaaatatttctgcgctggctgatgcggaaaatatttcacgtaaaattattacccgctgtatcaacaccgccaaattgcctaaatcagttgttgctcttttttctacgccggtgaactatctgtccggtcagtttttcgatatgcttcgtgatctgctcaagaacgttgatcttaaagggttcgagcctgatgtacgtattttgcttaccaaatacagcaatagtaatggctctcagtccccgtggatggaggagcaaattcgggatgcctggggaagcatggttctaaaaaatgttgtacgtgaaacggatgaagttggtaaagttattgacagcgcgcctaacctgggtatcggcacgattaatgtcgtatgtgctgctgatgtgctgattgttcccacgcctgctgagttgtttgactacacctccgcactgcagtttttcgatatgcttcgtgatctgctcaagaacgttgatcttaaagggttcgagcctgatgtacgtattttgcttaccaaatacagcaatagtaatggctctcagtccccgtggatggaggagcaaattcgggatgcctggggaagcatggttctaaaaaatgttgtacgtgaaacggatgaagttggtaaaggtcagatccggatgagaactgtttttgaacaggccattgatcaacgctcttcaactggtgcctggagaaatgctctttctatttgggaacctgtctgcaatgaaattttcgatcgtctgattaaaccacgctgggagattagataa

SEQ ID NO: 7390 - DNA, 3356 bp, Homo sapiens
  SIMILAR (1317)..(2060): 991254mologous to Cloning vector pSacBII SacB,accession number U09128,Smith-Waterman Score=1324.
  misc_feature (1)...(3356): n = a,t,c or g
attaattgcgttgcgctcactgcccgctttccagtcgggaaacctgtcgtgccagctgcattaatgaatcggccaacgcgcggggagaggcggtttgcgtattgggcgccagggtggtttttcttttcaccagtgagacgggcaacagctgattgcccttcaccgcctggccctgagagagttgcagcaagcggtccacgctgggtttgccccagcaggcgaaaatcctgtttgatggtggttccggaatcggcaaaatccattaattgcgttgcgctcactgcccgctttccagtcgggaaacctgtcgtgccagctgcattaatgaatcggccaacgcgcggggagaggcggtttgcgtattgggcgccagggtggtttttcttttcaccagtgagacgggcaacagctgattgcccttcaccgcctggccctgagagagttgcagcaagcggtccacgctggtttgccccagcaggcgaaaatcctgtttgatggtggttccgaaatcggcaaaatcccttataaatcaaaagaatagcccgagatagggttgagtgttgttccagtttggaacaagagtccactgaccatacccgagaggtcttctcaacactatcaccccggagcacttcaagagtaaacttcacatcccgaccacatacaggcaaagtaatggcattaccgcgagccattactcctacgcgcgcaattaacgaatccaccatcggggcagctggtgtcgataacgaagtatcagttgaagagcgttgatcaatggcctgttcaaaaacagttctcatccggatctgacctttaccaacttcatccgtttcacgtacaacattttttagaaccatgcttccccaggcatcccgaatttgctcctccatccacggggactgagagccattactattgctgtatttggtaagcaaaatacgtacatcaggctcgaaccctttaagatcaacgttcttgagcagatcacgaagcatatcgaaaaactgcagtgcggaggtgtagtcaaacaactcagcaggcgtgggaacaatcagcacatcagcagcacatacgacattaatcgtgccgatacccaggttaggcgcgctgtcaataactatgacatcatagtcatgagcaacagtttcaatggccagtcggagcatcagnatgggcggaaaactgtcctcctggctgatgtgaaagatctgggccccttcccgggttcgttgaaggctgttacctgggggggaggaccttacaaaaaaaaaacgcttgaggtgctgacccgcggttcgactctagaggatccccttctgacttttacgactgcacttctggcaggaggagcgactcaagccttcgcgaaagaaaataaccaaaaagcatacaaagaaacgtacggcgtctctcatattacacgccatgatatgctgcagatccctaaacagcagcaaaacgaaaaataccaagtgcctcaattcgatcaatcaacgattaaaaatattgagtctgcaaaaggacttgatgtgtgggacagctggccgctgcaaaacgctgacggaacagtagctgaatacaacggctatcacgttgtgtttgctcttgcgggaagcccgaaagacgctgatgacacatcaatctacatgttttatcaaaaggtcggcgacaactcaatcgacagctggaaaaacgcgggccgtgtctttaaagacagcgataagttcgacgccaacgatccgatcctgaaagatcagacgcaagaatggtccggttctgcaacctttacatctgacggaaaaatccgtttattctacactgactattccggtaaacattacggcaaacaaagcctgacaacagcgcaggtaaatgtgtcaaaatctgatgacacactcaaaatcaacggagtggaagatcacaaaacgatttttgacggagacggaaaaacatatcagaacgttcagcagtttatcgatgaaggcaattatacatccggcgacaaccatacgctgagagaccctcactacgttgaagacaaaggccataaataccttggcgaggactacatcttgtggggtgaatggaggcatcaggctagctcccgtatcacagcccatgtattcagcgcgcctaacctgggtatcggcacgattaatgtcgtatgtgctgctgatgtgctgattgttcccacgcctgctgagttgtttgactacacctccgcactgcagtttttcgatatgcttcgtgatctgctcaagaacgttgatcttaaagggttcgagcctgatgtacgtattttgcttaccaaatacagcaatagtaatggctctcagtccccgtggatggaggagcaaattcgggatgcctggggaagcatggttctaaaaaatgttgtacgtgaaacggatgaagttggtaaaggtcagatccggatgagaactgtttttgaacaggccattgatcaacgctcttcaactgaaagcattatccctaatgatggtaagaaattgtcattttctgtgtcaggaaaaatgaggaaagggcactacttttcgtctgaagagagtcatgttagaacagacatcctggcggatacaaaaatgcaatctgcaaacggacttgatgtgtgggacagctggccgctgcaaaacgctgacggaacagtagctgaatacaacggctatcacgttgtgtttgctcttgcgggaagcccgaaagacgctgatgacacatcaatctacatgttttatcaaatggtcggcgacaactcaatcgacagctggaaaaacgcgggccgtgtctttaaagacagcgataagttcgacgcccacgatccgatcctgaaagatcagacgcaagaatggtccggttctgcaacctttacatctgacggaaaaatccgtttattctacactgactattccggtaaacattacggcaaacaaagcctgacaacagcgcaggtaaatgtgtcaaaatctgatgacacactcaaaatcaacggagtggaagatcacaaaacgatttttgacggagacggaaaaacatatcagaacgttcagcagtttatcgatgaaggcaattatacatccggcgacaaccatacgctgagagaccctcactacgttgaagacaaaggccataaataccttgtattcgaagccaacacgggaacagaaaacggataccaaagcgaagaatctttatttaacaaagcgtactacggcggcggcacgaacttcttccgtaaagaaagccagaagcttcagcagagcgctaaaaaacgcgatgctgaattaacgaacggcgccccttcgtatcatagagttaaattattgattacccattga

SEQ ID NO: 7391 - DNA, 3976 bp, Homo sapiens
  SIMILAR (1691)..(2425): 1001254mologous to Cloning vector pZC320 SopA,accession number U26464,Smith-Waterman Score=1287.
tgtgacaatctaaaaacttgtcacacttcacatggatctgtcatggcggaaacagcggttatcaatgcacaagaaacgtaaaaatagcccgcgaatcgtccagtcaaacgacctcactgaggcggcatatagtctctcccgggatcaaaaacgtatgctgtatctgttcgttgaccagatcagaaaatctgatggcaccctacaggaacatgacggtatctgcgagatccatgttgctaaatatgctgaaatattcggattgacctctgcggaagccagtaaggatatacggcaggcattgaagagtttcgcggggaaggaagtggttttttatcgccctgaagaggatgccggcgatgaaaaaggctatgaatcttttccttggtttatcaaacgtgcgcacagtccatccagagggctttacagtgtacatatcaacccatatctcattcccttctttatcgggttacagaaccggtttacgcagtttcggcttagtgaaacaaaagaaatcaccaatccgtatgccatgcgtttatacgaatccctgtgtcagtatcgtaagccggatggctcatgcattgtctctctgaaaatcgactggatcatagaagcgtaccagctgcctcaaagttaccagcgtatgcctgacttccgccgccgcttcctgcaggtctgtgttaatgagatcaacagcagaactccaatgcgcctctcatacattgagaaaaagaaaggccgccagacgactcatatcgatctggctctgaaggggctacgtgttttgctcgtggaaggtaacgacccccagggaacagcctcaatgtatcacggatgggtaccagatcttcatattcatgcagaagacactctcctgcctttctatcttggggaaaaggacgatgtcacttatgcaataaagcccacttgctggccggggcttgacattattccttcctgtctggctctgcaccgtattgaaactgagttaatgggcaaatttgatgaaggtaaactgcccaccgatccacacctgatgctccgactggccattgaaactgttgctcatgactatgatgtcatagttattgacagcgcgcctaacctgggtatcggcacgattaatgtcgtatgtgctgctgatgtgctgattgttcccacgcctgctgagttgtttgactacacctccgcactgcagtttttcgatatgcttcgtgatctgctcaagaacgttgatcttaaagggttcgagcctgatgtacgtattttgcttaccaaatacagcaatagtaatggctctcagtccccgtggatggaggagcaaattcgggatgcctggggaagcatggttctaaaaaatgttgtacgtgaaacggatgaagttggtaaaggcatcccgaatttgctcctccatccacggggactgagagccattactattgctgtatttggtaagcaaaatacgtacatcaggctcgaaccctttaagatcaacgttcttgagcagatcacgaagcatatcgaaaaactgcagtgcggaggtgtagtcaaacaactcagcaggcgtgggaacaatcagcacatcagcagcacatacgacattaatcgtgccgatacccaggttaggcgcgctgtcaataactatgacatcatagtcatgagcaacagtttcaatggccagtcggagcatcaggctatcagagatgccgagaaagcagggcgactaccgcacccggatatggaaattcgaggacgggttgagcaacgtgttggttatacaattgaacaaattaatcatatgcgtgatgtgtttggtacgcgattgcgacgtgctgaagacgtatttccaccggtgatcggggttgctgcccataaaggtggcgtttacaaaacctcagtttctgttcatcttgctcaggatctggctctgaaggggctacgtgttttgctcgtggaaggtaacgacccccagggaacagcctcaatgtatcacggatgggtaccagatcttcatattcatgcagaagacactctcctgcctttctatcttggggaaaaggacgatgtcacttatgcaataaagcccacttgctggccggggcttgacattattccttcctgtctggctctgcaccgtattgaaactgagttaatgggcaaatttgatgaaggtaaactgcccaccgatccacacctgatgctccgactggccattgaaactgttgctcatgactatgatgtcatagttattgacagcgcgcctaacctgggtatcggcacgattaatgtcgtatgtgctgctgatgtgctgattgttcccacgcctgctgagttgtttgactacacctccgcactgcagtttttcgatatgcttcgtgatctgctcaagaacgttgatcttaaagggttcgagcctgatgtacgctccagagggaaatgcattgatgctggcagggttgggcaggatgaattagcccccagacccccagatgatgtgtgggagcactggcagattggatgggcccctcttcagacttcctggaaatgtgcacagtcaccggtgatgtggacagagcaaggtgatccccaggcccccattggcacatgggcactggcaggcgcagcaccaggtaatgaacgtgaccaggagctgcttactgaggacgcactggatgatctcatcccttcttttctactgactggtcaacagacaccggcgttcggtcgaagagtatctggtgtcatagaaattgccgatgggagtcgccgtcgtaaagctgctgcacttaccgaaagtgattatcgtgttctggttggcgagctggatgatgagcagatggctgcattatccagattgggtaacgattatcgcccaacaagtgcttatgaacgtggtcagcgttatgcaagccgattgcagaatgaatttgctggaaatatttctgcgctggctgatgcggaaaatatttcacgtaagattattacccgctgtatcaacaccgccaaattgcctaaatcagttgttgctcttttttctcaccccggtgaactatctgcccggtcaggtgatgcacttcaaaaagcctttacagataaagaggaattacttaagcagcaggcatctaaccttcatgagcagaaaaaagctggggtgatatttgaagctgaagaagttatcactcttttaacttctgtgcttaaaacgtcatctgcatcaagaactagtttaagctcacgacatcagtttgctcctggagcgacagtattgtataagggcgataaaatggtgcttaacctggacagaagacactctcctgctttctatctgggggaaaaggacgatgtcacttatgcaataaagcccacttgctggcgggggcttgacattactccttcctgtctggctgtgcaccgtattgaaactgagttaatgggcaaatttgatgaaggtaaagtgcccaccgatccacacctgatgctccgactggccattgaaactgttgctcatgactatgatgtcatagttattgacagcgcgcctaacctgggtatcggcacgattaatgtcgtatgtgctgctgatgtgctgattgttcccacgcctgctgagttgtttgactacacctccgcactgcagtttttcgatatgcttcgtgatctgctcaagaacgttgatcttaaagggttcgagcctgatgtacgtattttgcttaccaaatacagcaatagtaatggctctcagtccccgtggatggaggagcaaattcgggatgcctggggaagcatggttctaaaaaatgttgtacgtgaaacggatgaagttggtaaaggtcagatccggatgagaactgtttttgaacaggccattgatcaacgctcttcaactggtgcctggagaaatgctctttctatttgggaacctgtctgcaatgaaattttcgatcgtctgattaaaccacgctgggagattagataa

SEQ ID NO: 7392 - DNA, 1494 bp, Homo sapiens
  SIMILAR (516)..(151): 1001254mologous to Escherichia coli K12 putative dehydratase,accession number AE000500,Smith-Waterman Score=643.
tcagcatgctgaacaaagcatatttttcactatgtaatgccgataccatttattccatgagccaggaggagccattatggttcgcaaatattgcccggcagcgtaagattgtcgttcagggtaagcgcctgttgaatacgcgcagaagttacgcccgtcacaaggatcggagacgtacacggcatagggcagggcatggttggctttaataacctcggccgccgctttcatctggatgtccagttcgtaatgcccctggtgcaacgccagcgccacgggtttaccgtctgcgccgcgtaagccaccgagtgtactgagcagtaaaataccgtcccgatccagctcgtccggagaccaacccattccggcattcatggtcataccgaacagatccccgctcgggcggttgataagcatctctgcggttaatgggagttcgccgtccgggccatcggcgtgcgttctgacggtgtaaatatcgtggctctcgtcagcaaaaatattgcgaacagacatgagtttctcctcagactggtaaaatgcccggttgatgtccgttgtgaacgtatcggcggcggtacagacgaaattatgatttacgtagcaggtcggcagatcctgaaagacttccagccgtaacggtagattaatcccctgccgcacaccgtgcagatgacgtgctaccgcgtcatcgatatcgacgactcgtccctgtgaaagtaccagcaatgcaccttcgtgcaattcaccaatacgctcacgatcgccgctgccgataattcgcccacgggcatccattacgttgatattggtatcgatgatgcgcatggtacgtgccacgatatcctgcgccattttggtatcaagatgccagccagccataagtcctccgttatgcacggctttcttcaggccgatctgcgcagccggagtgcccgttttcacgttgttcactaccacgccctgatctttgcctttgttgctcatctcagcgccttcaatgccgttgaagatggagctggaatcaacctgattctggctgctctgagcctcgacataggccagccgatggcgcgtcgagagtttgtggaataagcgcgattcaatagggaaaacatgatcaatggtgcgattgtcccagttattcacaaacagggagttagcaaaacgcagcgccaacaggttcagcaccgtttctttaccaagatagtggtcgatacggtaaacctggcactcctcgaagtattcgccaacctgatcattgatttcctgcgaggtcgccagcgacgtccccagcggtttctccatgactacgcgtgccggtttagcattcagttttgcctcgccaagccctttgcaaattgcgccaaaagtgtacacgtccagcagcagacgcgtcggatcttccagcaactctttgatcgttaccaggaagcccacggattcgcgaccatcgatcagacggtgatcgtaggacagcgccaggtacatcat

SEQ ID NO: 7393 - DNA, 2141 bp, Homo sapiens
  SIMILAR (1598)..(1197): 871254mologous to Escherichia coli formylglycineamide ribonucleotide synthetase (EC 6.3.5.3),accession number M19501,Smith-Waterman Score=593.
gtccgtcctcccttattgctaatgattgccggacttcacatccgtgggttgccagcgggcaacgttcgtagaaaaaacagccttgcggcaacgtgcggtttcccggcagatccgttttacgtaatgcccattcttcctccagcggtttatcaatggcggggagggaatccagcaataatcgggtgtatggatgtgcaggtgccgtcagcacctgctgcgcgtcgcccagttctacaatctgcccgagatacatcaccgccacccgatcgctcatatgacgtatcaccgagacattgtgtgaaatcagcacataggtcagcccgtgattttcctgtagcgttaccagtaaattgaggatctgcgcctgaacggagatatccagcgcagaggttggctcatcaagcacaatcacgtcaggctgcgaagagagtgctctggcaatggcgatacgttgccgctgcccgccggagaacgcatgaggcaggcggtgcgggttgccaccggtacaaacatcatccagtgccgcctgcgccagtgccggaatgtcttccttgcgtacaccaacatcacgcaaatgtggcgtggtcgcgctcggaccgtagcatttgcgcgaggtcacatgtgccaccagctcagcgggcgtggcatcctgcaactctgcggtagaagcgttaccggtcgccagacctgcggcttttgccatttccagaatcgttggatgatctttttcgtgaatatcgacgcccagcgcgccgttataggttttgacaccggttgaccaggcggttgctgatgcagccgagtcggtgacagtagccaggtttgccggtttttttattcagcgcatagtgagtgtattgcccggtaagcggtaaggcatctatacctttaaaaaagccgcccgcaccttcggcataattacgtgcggcagtaatttccgagtcccccatcccatcgccaatcagcaaaataatattttttgcaggtttatcgccgttaaacggcgaacaataaccgcgcagctcttcgccgttgtggctgttcactttttcttcataagtacggaagtagccgttcagtgccggacgaccaaattcgttgttaaacgccgcgccgcccagcgggccttcggtcatgatgtccagcgcggtgacaatgcgctcaggcttaccgaaatcttcttcccacggcatcgatacccagtcggcgttaaaaattttgtggcggcagtgctcggagttcgcctgggcaaacatatacagttcgatgtcgttcgggttacgaccaagctttgtgaaagcatcctgcagatagtcaatttcatcttccgccagagccaagccaagacgcaggttagcgtcgatcagcgcctgacggccctgccccagcaaatcaacgctggtaaccggagtcggttgatggtgggcaaacaactgctctgcatcatctaaagcaaaaaagaccgtttccatcatgcggtcgtgcagttcagcggtaacctgctgccattgttcattggtcagcgtaccggctttatgcggatgccattcgttataatgctcgaacgcctctgcaaggttctttgctgccgttaacccgtctggtttgggcatgatactgatgtagtcacgctttatcgttttcacgaagctctctgctattccgttactctccggactccgcaccgccgtgttcttcggttcaagtcccaacatccgggcgaactggcgtgtttcattagcccggtagcatgaaccattatccgtcagccactccacgctcctcatgagctgcgtctgtatgtgcgtgaactgcgtgaccgtagtcgtactgtcgatgagctgaaccgtactatcgatcagctgtgccgtgaaaacgacatcaacattgcctttaaccagcttgaagtgcatctgcacaacgagaagggcgatgaggtgacggaagtaaaacgcgaccgcttcaatctttttggcggcaaaacgcccatggaacaccgctttgccgccgcccgctggcagacgggggtgaccggatgcccgcaactggaagaggctctggtttcgtttgactgccgtatcagccaggtggtgagcgtcggcacccacgacattctgttttgcgccatcgaagcgattcat

SEQ ID NO: 7394 - DNA, 595 bp, Homo sapiens
  SIMILAR (1)..(327): 911254mologous to Escherichia coli K12 putative transport protein,accession number AE000402,Smith-Waterman Score=487.
ttgaaaaattccaaacctcaggtggtgatggctgccgcaggtatcttcctgataatgtgcggtgtctggttagggttcggtggtgtactcgatcccaccaaaagcagcggttatttgatcgtcgatatttataatgaaatcatctgcatgctgtccaaccgcattgccggattggggctgtcgattatggcggtgggcggttatgcccgctacatggagggcacaccggccagtcgcgcgatggtgagcttgttaagccgaccgttaaaactcattcgctcgccgtatattattctgtcggcaacttaggtcatcggccaaatcatgccggcagtttattaccagcgcctccggtctgggtatgttgctgatggtccccttatttccgacgctggtgagtctgggagtaagtcgtctctctgcggtggcagttatcgcaaccacgatgtccattgagtgggggattctggaaacgaactccatttttgctgcccaggtagcgggaatgaaaattgccacattcttctgccacgcccataatccggtcgcctccagggtcattctctcggtggcgatctccgggacgcgagctcga

SEQ ID NO: 7395 - DNA, 981 bp, Homo sapiens
  SIMILAR (1)..(414): 971254mologous to Escherichia coli K12 putative transport protein,accession number AE000402,Smith-Waterman Score=661.
atgggctatgtgatcctgaaaaactacaaacctcaggtggtgctggctgccgcaggtatcttcctgatgatgtgcggtgtctggttagggttcggtggtgtactcgatcccaccaaaagcagcggctacttgatcgtcgatatttataatgaaatcctgcgcatgctgtccaaccgcattgccggattggggctgtcgattatggcgttgggcgtttatgcccgctacatggagcgcataggggccagtcgcgcgatggtgagcttgttaagccgcccgttaaaactcattcgctcgccgtatattattctgtcggcaacttacgtcatcggccaaatcatggcgcagtttattaccagcgcctccggtctgggtatgttgctgatggtcaccttatttccgacgctgcagagcagccagaatcaggttgattccagctccatcttcaacggcattgaaggcgctgagatgagcaacaaaggcaaagatcagggcgtggtagtgaacaacgtgaaaacgggcactccggctgcgcagatcggcctgaagaaaggtgatgtgattattggcgcgaaccagcaggcagtgaaaaacatcgctgaactgcgtaaacaaactgtgaatgccgtcgggccaatgggcggtattacttctgccagtatgccgatgctggtggttgagaacgtgaccgacggcaaccgaaacgcatcagcggtgcgacaccgtcttatccgcggcgcaacactgctggcggccgcgacacccccctactcctgcttctactctttatcctacaagtcacagtttcagaacttaccgcttaccgggcaatacactcactatgcgctgaataaaaaaaccggcaaaccggactacgtcaccgactcggctgcatcagcaaccgcctggtcaaccggtgtcaaaacctataacggcgcgctgggcgtcgatatacgaacagtggggatacgtcggggctaa

SEQ ID NO: 7396 - DNA, 492 bp, Homo sapiens
  SIMILAR (312)..(341): 801254mologous to Homo sapiens reverse transcriptase,accession number L27428,Smith-Waterman Score=42.
  misc_feature (1)...(492): n = a,t,c or g
aaacaaccccatcaaaaagtgggcaaaggacatgaacagacacttctcaaaagaagacatttatgcagccaaaaaacacatgaaaaaatgctcaccatcactggccatcagagaaatgcaaatcaaaaccacaatgagataccatctcacaccagttagaatggcaatcattaaaaagtcaggaaataacagatactggagaggatgtggagaaataggaatgcttttacactgttggtgggagggtaaattagttcaaccattgtggaagacagtggtatgtacccaaaggattatnaaatcattctacttttaaagatacatacacacgtatgtttatttacagcactgtttcacaatagcaaaganttgggaacccaaccccaatggttcntcattgatagactgtttaggcaagacttattaaaggagggaaggngagaagggattcaantcggtgggtattaaaaagtggttaaagggggtgtcacc

SEQ ID NO: 7397 - DNA, 2465 bp, Homo sapiens
  SIMILAR (1087)..(2463): 961254mologous to Homo sapiens unknown,accession number AF148856,Smith-Waterman Score=2334.
atgggagactttaacaccccactgtcaacattagacagatcaatgagacagaaagtcaaaaaggatacccaggaattgaactcagctctgcaccaagcagacctaatagacatctacagaactctccaccccaaatcaacagaatatacatttttttcagcaccacaccacacctattccaaaattgaccacatacttggaagtaaagctctcctcagcaaatgtaaaagaacagaaattataacaaactatctctcagacggcagtgcaatcaaactagaactcaggattaagaatctcactcaaaaccgctcaactacatggaaactgaacaacctgctcctgaatgactactgggtacctaacgaaatgaaggcagaaataaagatgttctttgaaaccaacgagaacaaagacacaacataccagaatctctgggacgcattcaaagcagtgtgtagagggaaatttatagcactaaatgcccacaagagaaagcaggaaagatccaaaattgacaccctaacatcacaattaaaagaactagaaaagcaagagcaaacacattcaaaagctagcagaaggcaagaaataactaaaatcagagcagaactgaaggaaatagagacacaaaaaacccttcaaaaaattaatgaatccaggagctggttttttgaaaggatcaacaaaatagatagaccgctagcaagactaataaagaaaaaaagagagaagaatcaaatagatacaataaaaaatgataaaggggatatcaccaccaatcccacagaaatacaaactaccatcagagaatactacaaacacctctacgcaaataaactagaaaatctagaagaaatggataaattccttgacacatacactctcccaagactaaaccaggaagaagttgaatctctgaatagaccaataacaggatctgaaattgtggcaataatcaatagcttaccaaccaaaaagagtccaggaccagatggattcacagccgaattctaccagaggtacaaggaggaactggtaccattccttctgaaactattccaatcaatagaaaaagagggaatcctcctgttggaagttctggccagggcaattaggcaggagaaggaaataaagggtattcaattaggaaaagaggaagtcaaattttccctgtttgcagacgacatgattgtatatctagaaaaccccattgtctcagcccaaaatctccttaagctgataagcaacttcagcaaagtctcaggatacaaaatcaatgtacaaaaatcacaagcattcttatacaccaacaacagacaaacagagagccaaatcatgagtgaactcccattcacaattgcttcaaagagaataaaatacctaggaatccaacttacaagggatgtgaaggacctcttcaaggagaactacaaaccactgctcaaggaaataaaagaggatacaaacaaatgcaagaacattccatgctcatgggtaggaagaatcaatatcgtgaaaatggccatactgcccaaggtaatttacagattcaatgccatccccatcaagctaccaatgcctttcttcacagaattggaaaaaactactttaaagttcatatggaaccaaaaaagagcccgcatcgccaagtcaatcctgagccaaaagaacaaagctggaggcatcacgctacctgacttcaaaccatactacaaggctacagtaaccaaaacagcatggtactggtaccaaaagagagatatagatcagtggaacagaacagagccctcagaaataacgccgcatatctacaactatctgatctttgacaaacctgagaaaaacaagcaatggggaaaggattccctatttaataaatggtgctgggaaaactggctggccatatgtagaaagctgaaactggatcccttccttacaccttatacaaaaatcaattcaagatggattaaagacttaaacgttagacctaaaaccataaaaaccctagaagaaaacctaggcaataccattcaggacataggcatgggcaaggacttcatgtctaaaacaccaaaagcaatggcaacaaaagacaaaattgacaaatgggatctaattaaacttaagagcttctgtacagcaaaagaaactaccatcagagtgaacaggcaacctacaaaatgggagaaaattttcacaacctactcatctgacaaagggctaatatccagaatctacaatgaactcaaacaaatttacaagaaaaaaacaaacaaccccatcaaaaagtgggcgaaggacatgaacagacacttctcaaaagaagacatttatgcagccaaaaaacacatgaaaaaatgctcatcatcactggccatcagagaaatgcaaatcaaaaccacaatgagataccatctcacaccagttagaatggcgatcattaaaaagtcaggaaacaacag

SEQ ID NO: 7398 - DNA, 1419 bp, Homo sapiens; identical to SEQ ID NO: 5408
  SIMILAR (697)..(1416): 951254mologous to Homo sapiens putative p150,accession number U93572,Smith-Waterman Score=1254.

SEQ ID NO: 7399 - DNA, 2272 bp, Homo sapiens; identical to SEQ ID NO: 5625
  SIMILAR (3)..(1430): 951254mologous to Homo sapiens putative p150,accession number U93563,Smith-Waterman Score=2338.

SEQ ID NO: 7400 - DNA, 3020 bp, Homo sapiens
  SIMILAR (478)..(3018): 931254mologous to Homo sapiens putative p150,accession number U93563,Smith-Waterman Score=4090.
atggagctgaaaaccaaggctcaagaactacgtgaagaatgcagaagcctcaggagccaatgcgatcaactggaagaaagggtatcagcgatggaagatgaaatgaatgaaatgaagcgagaagggaagtttagagaaaaaagaataaaaagaaacgaacaaagcctccaagaaatacgggactatgtgaaaagaccaaatctacgtctgattggtgtacctgaaagtgacagggagaatggaaccaagctggaaaacactctgcagaatattatccaggagaacttccccaatctagcaaggcaggccaacgttcagattcaggaaatacagagaacgccacaaagatactccttgagaagagcaactccaagacacacaattgtcagattcaccaaagttgaaatgaaggaaaaaatgttaagggcagccagagagaaaggtcgggttaccctcaaagggaagcccatcagactaaagcggatctctcggcagaaactctacaagccagaagagatgtgtagagggaaatttacagcactaaatgcccacgagagaaagcaggaaagatccaaaattgacaccctaacatcacaattaaaagaactagaaaagcaagagcaaacacattcaaaagctagcagaaggcaagaaataactaaaatcagagcagaactgaaggaaatagagacacaaaaaacccttcaaaaaattaatgaatccgggagctggttttttgaaaggatcaacaaaattgatagaccgctagcaagactaataaagaaaaaaagagagaagaataaaatagatgcaataaaaaatgataaaggggatatcaccactgatcccacagaaatacaaactaccatcagagaatactacaaacacctctacgcaaataaactagaaaatcgagaagaaatggataaattcctcaacacatacactctcccaagactaaaccaggaaaaagttgaatctctgaatagaccaataacaggagctgaaattgtggcaataatcaatagcttaccaaccaaaaagagtccaggaccagatggattcacagccgaattctaccagaggtacaaggaggaactggtgccattccttctgaaactattccaatcaacagaaaaagagggaatcctccctaactcatttgatgaagccagcatcatcctgataccaaagcccagcagagacacaaccaaaaaagagaattttagaccagtatccttgatgaacattgatgcaaaaagcctcaataaaacactggcaaaccgaatccagcagcacatcaaaaagcttatccaccatgatcaagtgggcttcatccctgggatgcaaggctggttcaatatacacaaatctataaatgtaatccagcatataaacagaaccaaagacaaaaaccacataattatctcaatagatgcagaaaaggcctttgataaaattcaacaacacttcatgctaaaaactctcaataaattaggtattgatgggacgtatctcaaaataataagagctatctatgacaaacccacagccaatatcatactgaatgggcaaaaactggaagcattccctttgaaaactggcacaagacagggatgccctgtctcaccactcctattcaacatagtgttggaacttctggccacggcaattaggcagaaggaaataaagcgtattcaattaggaaaagaggaagtcaaattgtccctgtttgcagacgacatgactgtatatctagaaaaccccactgtctcagcccaaaatctccttaacctgataagcaacttcagcaaagtctcaggatacaaaatcaatgtacaaaaatcacaagcattcttatacaccaataacagacaaacagagagccaaatcatgagtgaactcccattcacaattgcttcaaagagaataaaatacctaggaatccaccttacaagggacgtgaaggacctcttcaaggaaaactataaaccactgctcaatgaaataaaagaggatacaaagaaatggaagaacattccatgctcatgggtaggaagaatcaatatcgtgaaaatggccatactgcccaaggtaatttatagattcaatgccatccccatcaagctgccaatgactttcttcacagaattggaaaaaactactttaaagttcatatggaaccaaaaaagagcccgcatcgccaagtcaatcctaagccaaaagaacaaagctggaggcatcatgctacctgacttcaaactatactacaaggctacagtaaccaaaacagcatggtactggtaccaaaacagagatatagatcaatggaacagaacagagccctcagaaacaacgccatatatctacaactatctgatctttgacaaacctgagaaaaacaagcaatggggaaaggattccctattcaataaatggtgctgggaaaactggctagccatatgtagaaagctgaaactggatcccttccttacaccttatacaaaaatcaattcaagatggattaaagacttaaacgttagacctaaaaccataaaaaccctagaagaaaacctaggctttaccattcaggacataggcatgggcaaggacttcatgtgtaaaacaccaaaagcaatggcaacaaaagccaaaattgacaaatgggatctaatgaaactaaagagcttctgcacagcaaaagaaactaccatcagagtgaacaggcaacccacaaaatgggagaaaattttcacaacctactcatctgacaaagggctaatatccagaatctacaatgaactcaaacaaatttacaagaaaaaaacaaacaaccccatcaaaaagtgggcaaaggacatgaacagacacttctcaaaagaagacatttatgcagccaaaaaacacatgaaaaaatgctcatcatcactggccatcagagaaatgcaaatcaaaaccacaatgagatatcatctcacaccagttagaatggcaatcatgaaaaagtcaggaaacaacag

SEQ ID NO: 7401 - DNA, 3046 bp, Homo sapiens
  SIMILAR (1)..(1821): 851254mologous to Homo sapiens putative p150,accession number U93563,Smith-Waterman Score=2589.
atggtaaagggatcaattcaacaagaagagctaactatcttaaatatatatgcacctaatacaggagcactcagattcataaagcaagtccttagagacctacaaagagacttagactcccacacaataataatgggagattttcacaccccactgtcaacattagacagatcaacaagacagaaggttaacaaggatatccaggaattgaactcagctctgcaccaagaggacctaatagacatctacagaactctccaccccaaatcaacagaatatacatttttttcagcaccacaccacacctattccaaaattgaccacatagttggaagtaaagctctcctcagcaaatgtaaaagaacagaaattataacaaactgtctctcagaccacagtgcaatcaaactagaactcaggattaagaatctcactcaaaaccgctcaactacatggaaactgaacaacctgctcctgaatgactactgggtacataacgaaatgaaggcagaaataaagatgttctttgaaaccaacgagaacaaagacactacataccagaatctctgggacacattcaaagcagtgtgtagagggaaatttatagcactaaatgcccacaagagaaagcaggaaagatctaaaattgacaccctaacatcacaattaaaagaactagagaagcaagagcaaacacattcaaaagctagcagaaggcaagaaataactaaaatcagagcagaactgaaggaaatagagacacaaaaaacccttcaaaacattaatgaatccaggagctggttttttgaaaggatcaacaaaattgatagaccactagcaagactaataaagaaaaaaagagagaagaatcaaatagatgcaataaaaaatgataaaggggatatcaccaccgatcccacagaaatacaaactaccatcagagaatactacaaacacctctatgcaaataaactagaaaatctagaagaaatggataaattcctcaacacatacactctcccaacactaaaccaggaagaagttgaatctctgaatagaccaataacaggagctgaaattgtggcaataatcaatagcttaccaaccaaaaagagtccaggaccagatggattcacagccgaattctaccagaggtacaaggaggaactggtaccattccttctgaaaccattccaatcaatagaaaaagagggaatcctccctaactcattttatgaggccagcatcattctgataccaaagccgggcagagacacaacaaaaaaagagaattttagaccaatatccttgatgaacattgatgcaaaaatcctcaataaaatactggcaaaacgaatccagcagcacatcaaaaatcttatccaccatgatcaagtgggcttcatccctgggatgcaaggctggttcaatatacgcaaatcaataaatgtaatccagcatataaacagagccaaagacaaaaaccacatgattatctcaatagatgcagaaaaagcctttgacaaaattcaacagcccttcatgctaaaaactctcaataaattagacgacatgattgtatatctagaaaaccccatcgtctcagcccaaaatctccttaagctgataagcaacttcagcaaagtctcaggatacaaaatcaatatacaaaaatcacaagcattcttatacaccaacaacagacaaacagagagccaaatcatgagtgaactcccattcacaattgcttcaaagagaataaaatacctaggaatccaacttacaagggatgtgaaggacctcttcaagggagaaccacaaaccactgctcaacgaaataaaagaggatacaaacaaatggaagaacattccatgctcatgggtaggaagaatcaatatcgtgaaaatggccatactgcccaaggtaatttacagatcaatgccatccccatcaagctaccaatgactttcttcacagaattggaaaaaactactttaaagttcatatggaaccaaaaaagagcccgcatcgccaagtcaatcctaagccaaaagaacaaagctggaggcatcacactacctgacttcaaactatactacaaggctacagtaaccaaaacagcatggtactggtaccaaaacagagatatagatcaatggaacagaacagagccctcagaaagaacgccgcatatctacaactatctgatctttgacaaacgtgagaaaaacaagcaatggggaaaggattccctgtttaataaatggtgctgggaaaactggctagccatatgtagaaagctgaaactggatcccttccttacaccttatacaaaaatcaattcaagatggattaaagacttaaacgttagacctaaaaccataaaaaccctagaagaaaacctaggctttaccattcaggacataggcatgggcaaggacttcatatctaaaacaccaaaagcaatggcaacaaaagccaaaattgacaaatgggatctaattaaactaaagagcttctgcacagcaaaagaaactaccatcagagtgaacaggcaacctacaaaatgggagaaaattttcgcaacctactcatctgacaaagggctaatatccagaatctacaatgaactcaaacaaatttacaagaaaaaaacaaacaaccccatcaaaaagtgggcgaaggacatgaacagacacttctcaaaagaagacatttatgcagccaaaaaacacatgaaaaaatgctcaccatcactggccatcagagaaatgcaaatcaaaaccacaatgagataccatctcacaccagttagaatggcaatcattaaaaagtcaggaaacaaccggtgctggagaggctgtggagaaataggaacacttttacactgttggtgggactgtaaactagttcaaccattgtggaaggcagtgtggcgattcctcagggatctagaactggaaataccatttgacccagccatcccattactgggtatatacccaaaggactataaatcatgctgctataaagacacatgcacac

SEQ ID NO: 7402 - DNA, 1932 bp, Homo sapiens; identical to SEQ ID NO: 4393
  SIMILAR (380)..(1930): 751254mologous to Homo sapiens putative p150,accession number U93563,Smith-Waterman Score=1971.

SEQ ID NO: 7403 - DNA, 1965 bp, Homo sapiens
  SIMILAR (676)..(1962): 901254mologous to Homo sapiens putative p150,accession number U93563,Smith-Waterman Score=2117.
atgattatctcaacagatgcagaaaaggccgttaacaaaattcaacaacccttcatgctaaaaactctcaataaatttggtatcgatgggacatatctcaaaagaataagagctatctatgacaaacccacagccaatatcatactgaatgggcaaaaactggaagcattccctttgaaaactggcacaacacagggatgccctctctcaccactcctattcaacatagtgttggaagttctggccagggcaatcaggcaggagaaagaaagaaagggtattcaattaggaaaagaggaagtcaaattgtccctgtttgcagatgacatgattgtatatctagaaaaccccatcgtctcagcccaaaatctccttaagctgataagcaacttcagcaaactctcaggatacaaaatcaatgtgcaaaaatcacaagcattcttctacaccaataacagacaaacagagagccaaatcatgagtgaactcccattcacaattgcttcaaagagaataaaatacctaggaatccaacttacaagggatgtgaaggacctcttcaaggagaactacaaaccgctgctcaacgaaataaaaaaggacacaaacaaatggaagaacattccatgctcattgataggaagaatcaatattgtgaaaatggccataatgcccaagttcatatggaaccaaaaaagagcctgcattgccaagacaatcctaagccaaaagaacaaagctggaggcatcatgctacctgacttcaaactatactacaaggctacagtaaccaaaacagcatggtactggtaccaaaacagagatatagatcaatggaacagaatagagccctcagaaataataccacacatctacaacagtctgatctttgacaaacctgacaaaaacaagcaatgggtaaacgattccctatttaataaatggtgttgggaaaactggctagctatatgtagacagctgaaactggatcccttccttacaccttatacaaaaattaattcaagatggattaaagacttaaatgttagacttaaaaccataaaaaccctagaagaaaacctaggcaataccattcaggacataggcatgggcaaggacttcatgtctaaaacaacaaaagcaatggcaacaaaagccaaaattgacaaatgggatctaattaaactaaagagcttctgcacagtgaaagaaactaccatcagagtgaacaggcaacctacagaatgggagaacatttttgcaatctactcatctgacaaaggcctaatatccagagtctacaaagaactcaaacaaatttacaagaaaaaaaacaaccccatcaaaaagtgggcaaagcatatgaacagacacttctcaaaagaagacatttatgcagccaaaagacacatgaaaaaatgctcatcatcacaggccatcagagaaatgcaaatcaaaaccacaatgagataccatctcaaaccagttagaatggcaatcattaaaaagtcaggaaacaacaggtgctggagaggatgtggagaaataggaacactttcacactgctggtgggatgggaaactagttcaaccattgtggaagacagtgtggcgattcctcaaggatctagaactagaaataccatttgacccagtcatcccattactgggtatatacccacaggattataaatcatgctgctataaagacacatgcacacatatgtttattgtggcaccattcacaatagcaaagacttggaaccaacacaaatgtccatcaatgatagactggattaagaaaatgtggcacatatacaccatggaagactatgcagccataaaaaatgatgagttcatgtcctttgtagggacatggatgaagctggaaaccatcattctcagcaaactgtcacaaggacagaaatccaaacaccacatgttctcactcataggtgagaactga

SEQ ID NO: 7404 - DNA, 1947 bp, Homo sapiens; identical to SEQ ID NO: 5623
  SIMILAR (1829)..(1945): 741254mologous to Homo sapiens putative p150,accession number U93563,Smith-Waterman Score=161.

SEQ ID NO: 7405 - DNA, 1716 bp, Homo sapiens
  SIMILAR (184)..(1686): 941254mologous to Homo sapiens putative p150,accession number U93563,Smith-Waterman Score=2599.
atggataaattcttcgacacatacactctcccaagactaaaccaggaagaagttgcatctctgaatagaccaataacaggagctgaaattgtggcaataatcaatagtttaccaaccaaaaagagtccaggaccagatggattcacagccgaattctaccagaggtacaaggaggaactgaataaaatactaggaatccaacttacaagggatgtgaaggacctcttcaaggagaactacaaactgctgctcaatgaaataaaagaggatacaaacaaatggaagaacattccatgctcatgggtaggaagaatcaatatcgtgaaaatggccatactgcccaaggtaatttacagattcaatgccatccccatcaagctaccaatgcctttcttcacagaattggaaaaaactaccttaaagttcatatggaaccaaaaaagagcctgcatcaccaagtcaatcctaagccaaaagaacaaagctggaggcatcacactacctgacttcacactatactacaaggctacagtaaccaaaagagcatggtactggtaccaaaacagagatatagatcaatggaacagaacagagccctcagaaataacgccacatatctacaactatctgatctttgatgaacctgagaaaaacaagccgtggggaaaggattccctatttaataaatggttctgggagaactggttagccatatgtagaaagctgaaactggatcccttccttacaccttatacaaaaatcaattcaagatggattaaagacttaaacattagacctaaaaccataaaaaccatagaagaaaacctaggcattaccattcaggacataggcatgggcaaggacttcatgtttaaaacaccaaaagcaatggcaacaaaaaacaaaattgacaaatgggatctaattaaactaaagagcttctgcacagcaaaagaaactaccatcagagtgaacaggcaacctacgaaatgggagaaaattttcgcaacctactcatctgacaaagggctaatatccagaatctacaatgaactcaaacaaatttacaagaaaaaaacaaacaaccccatcaaaaagtgggcaaaggacatgaacagacacttctcaaaagaagacatttatgcagccaaaaaacacatgaaaaaatgttcatcatcactggccatcagagaaatgcaaatcaaaaccacaatgagataccatctcacaccagttagaatggcgatcattaaaaagtcaggaaacaacaggtgctggagaggatgtggagaaataggaacacttttacactgttggtgggactgtaaactagttcaaccattgtggaagacagtgtggcgattcctcagggatctagaactagaaataccatttgacccagccatccaattactgggtatatacccaaaggattataaatcatgctgctataaagagacatgcacacgtatgtttattgtgacattattcacaatagcaaagacttggaaccaacccaaatgtccaacaatgatagactggattaagaaaatgtggcacatatacaccatggaatactatgcagccataaaaaaggatgagttcatgtcctttgtagggacatggatgaaattggaaatcatcattctcaataaactatcgcaagaacaaaaaaccaaacacaaaaaaccaaacaccgcatattctcacccatag

SEQ ID NO: 7406 - DNA, 2882 bp, Homo sapiens
  SIMILAR (712)..(2880): 951254mologous to Homo sapiens putative p150,accession number U93563,Smith-Waterman Score=3575.
atggggaaaaaacagagcagaaaaaccggaaactctaaaaagcagagcgcctctcctcctccaaaggaatgcagctcctcaccagcaacggaacaaagctggacggagaatgactttgacgagttgagagaagaagacttcagacgatcaaactactccgagctacaggaggaaattcaaaccaaaggcaaagaagttgaaaactttgaaaaaaattcagacgaatgtataactggaataaccaatacagagaagtgcttaaaggagctgacggagctgaaagccaaggctcgagaactacatgaagaacgcagaagcctcaagagccgatgcgatcaactggaagaaagggtatcagtgatggaagacaaaatgaatgaaatgaagcgagaagggaagtttagagaaaaaagaataaaaagaaacaaacaaagcctccaagaaatatgggactatgtgaaaagaccaaatctacgtctgattagtgtacctgaaagtgacagggagaatggaaccaagttggaaaacactctgcaggatattatccaggagaacttccccaatctagcaaggcaggccaacattcagattcaggaaatacagagaacgccacaaagatactcctcgagaagagcaactccaaggcacataattgtcagattcagcaaagttgaaatgaaggaaaaaatgttaagggcagccagagagaaagaaatacaaactaacatcagagaatactacaaacaccgctacgcaaataaactagaaaatctagaagaaatggataaattcctcaacatatacacccttcgaagactaaaccaggaagaagttgaatctctgaacagaccaataagaggctctgaaattgtggcaataatcaatagtttaccaaccaaaaagagtccaggaccagatggattcacagccgaatactaccagaggtataaggaggaactggtaccattccttctgaaactattccaatcaatagaaaaagagggaatcctccctaactcattttatgaggccagcatcatcctgataccaaagccgggcagagacacaaccaaaaaagagaattttagaacaatatccttgatgaacattgatgcaaaaatcctcaataaaatactggcaaaccgaatccagcagcacatcaaaaagcttatccaccatgatcaagtgggcttcatccctgggatgcaaggctggttcaatatacgcaaatcaataaatgtaatccagcatataaacagaaccaaagacaaaaaccacgtgattatctcaatagatgcagaaaaggcctttgacaaaattcaacaactcttcttgctaaaaactctcaataaattaggtattgatgggacatatctcaaaataaaaagagctatctatgacaaacccacagccaatatcatactgaatgggcaaaaactggaagcattccctttgaaaactggcacaagacagggatgccctctctcaccactcctattcaacatagtgttggaagttctggccagggcaattaggcaggagaaggaaataaagggtattcaattaggaaaagaggaagtcaaattgtccctgtttgcagatgacatgattgtatatctagaaaaccccattgtctcagcccaaaatctccttaagctgataagcaacttcagcaaagtctcaggatacaaaatcaatgtacaaaaatcacaagcattcttatacaccaataacagacaaacagaaacccaaatcatgagtgaactcccattcacaattgcttcaaagagaataaaatacctaggaatccaacttacaagggacgtgaaggacctcttcaaggagaactacaaaccactgctcaatgaaataaaagaggatacaaagaaatggaagaatattccatgctcatgggtaggaagaatcaatatcatgaaaatggccatactgcacaaggtaatttatagattcaatgccatccccatcaagctaccaatgactttcttcacagaattggaaaaaactactttaaagttcacatggaaccaaaaaagagcccgcattgccaagtcaatcctaagccaaaagaacaaagctggaggcatcatgctacctgacttcaaactatactacaaggctacagtaaccaaaacagcatggtactggtaccaaaacagagatatagatcaatggaacagaacagagccctcagaaataacgccgcatatctacaactatctgatctttgacaaacctgagaaaaacaagcaatggggaaaggattccctattcaataaatggtgctgggaaaactggctagccatatggagaaagctgaaactggatcccttctttacaccttatacaaaaattaattcaagatggattaaagacttaaacgttagacctaaaaccataaaaaccctagaagaaaacctaggcattaccattcaggacataggtatgggcaaggacttcatgtctaaaacaccaaaagcaatagcaacaaaagccaaaattgacaaattggatctaattaaactaaagagcttctgcacagcaaaagaaactaccatcagagtgaacaggcaacctacagaatgggagaaaattttcgcaacctactcatctgacaaagggctaatatccagaatctacaatgaactcaaacaaatttacaagaaaaaaacaaacaaccccatcaaaaagtgggcaaaggacatgaacagacacttctcaaaagaagacatttatgcagccaaaaaacacatgaaaaaatgctcaccatcactggctatcagagaaatgcaaatcaaaaacacaatgagataccatctcacaccacttagaatggcaatcattaaaaagtcaggaaacaacag

SEQ ID NO: 7407 - DNA, 2648 bp, Homo sapiens
  SIMILAR (1099)..(2646): 951254mologous to Homo sapiens putative p150,accession number U93564,Smith-Waterman Score=2585.
atggtgaagggatcaattcaacaagaggagctaactatcctaaatatttatgcacccaatacaggagcacccagattcataaagcaagtcctgagtgacctacaaagagacttagactcccacacattaataatgggagactttaacaccccactgtcaacattagacagatcaacgagacagaaagtcaacaaggatacccaggaattgaactcagctctgcaccaagcagacctaatagacatcaacagaactctccaccccaaatcaacagagtatacatttttttcagcaccacaccacacctattccaaaattgaccacatagttggaagtaaagctctcctcagcaaatgtaaaagaacagaaattataacaaactatctctcagaccacagtgcaatcaaactagaactcaggattaagaatctcactcaaagccgctcaactccatggaaactgaacaacctgctcctgaatgactactgggtacataacgaaatgaaggcagaaataaagatgttctttgaaaccaacaagaacaaagacaccacataccagaatctctgggacgcattcaaagcagtgtgtagagggaaatttatagcactaaatgcctacaagagaaagcaggaaagatccaaaattgacaccctaacatcacaattaaaagaactagaaaagcaagagcaaacacattcaaaagctagcagaaggcaagaaataacgaaaatcagagcagaactgaaggaaatagagacacaaaaaacccttcaaaaaatcaatgaatccaggagctggttttttgaaaggatcaacaaaattgatagaccgctagcaagactaataaagaaaaaaagagagaagaatcaaatagacacaataaaaaatgataaaggggatatcaccaccgatcccacagaaatacaaactaccatcagagaatactacaaacacctctacgcaaataaactagaaaatctagaagaaatggatacattcctcgacacatacactctcccaagactaaaccaggaagaagttgaatctctgaatagaccaataacaggctctgaaattgtggcaataatcaatagtttaccaaccaaaaagagtccaggaccagatggattcacagccgaattctaccagagagctatctatgacaaacccacagccaatatcatactgaatgggcaaaaactggaagcattccctttgaaaactggcacaagacagggatgccctctctcaccgctcctattcaacatagtgttggaagttctggccagggcaatcaggcaggagaaggaaataaagggtattcaattaggaaaagaggaagtcaaattgtccctgtttgcagatgacatgattgtttatctagaaaaccccatcgtctcagcccaaaatctccttaagctgataagcaacttcagcaaagtctcaggatacaaaatcaatgtacaaaaatcacaagcattcttatacaccaaaaacagacaaacagagagccaactcatgagtgaactcccattcacaattgcttcaaagagaataaaatacctaggaatccaacttacaagggatgtgaaggacctcttcaaggagaactacaaaccactgctcaacgaaataaaagaggacacaaacaaatggaagaacattccatgctcatgggtaggaagaatcaatatcgtgaaaatggccatactgcccaaggtaatttacagattcaatgccatccccttcaagctaccaatgactttcttcacagaattggaaaaaactactttaaagttcatatggaaccaaaaaagagcccgcatcgccaagtcaatcctaagccaaaagaacaaagctggaggcatcacactacctgacttcaaactatactacaaggctacagtaaccaaaacagcatggtactggtaccaaaacagagatatagatcaatggaacagaacagagccctcagaaataatgccgcatatctacaactatctgatctttgacaaacctgagaaaaacaagcaatggggaaaggattccctatttaataaatggtgctgggaaaactggctagccatatgtagaaggctgaaactggatcccttccttacaccttatacaaaaatcaattcaagatggattaaagatttaaacgttagacctaaaaccataaaaaccctagaagaaaacctaggcattaccattcaggacataggcgtgggcaaggacttcatgtccaaaacaccaaaagcaatggcaacaaaagccaaaattgacaaatgggatctaattaaactcaagagcttctgcacagcaaaagaaactaccatcagagtgaacaggcaacctacaacatgggagaaaattttcgcaacctactcatctgacaaaggtctaatatccagaatctacaatgaactcaaacaaatttacaagaaaaaaacaaacaaccccatcaaaaagtgggcgaaggacatgaacagacacttctcaaaagaagacatttatgcagccaaaaaacacatgaagaaatgctcatcatcactggccatcagagaaatgcaaatcaaaaccactatgagatatcatctcacaccagttagaatggcaatcattaaaaagtcaggaaacaacag

SEQ ID NO: 7408 - DNA, 1336 bp, Homo sapiens; identical to SEQ ID NO: 5101
  SIMILAR (3)..(1334): 931254mologous to Homo sapiens putative p150,accession number U93563,Smith-Waterman Score=2221.

SEQ ID NO: 7409 - DNA, 2458 bp, Homo sapiens
  SIMILAR (656)..(2032): 571254mologous to Mus musculus reverse transcriptase,accession number U15647,Smith-Waterman Score=1502.
gagctggttttttgaaaagatcaacaaaatcgatagaccacaagcaagactaataaagaagaaaagagagaagaatcaaatagacacaataaaaaatgataaaggggatatcaccaccgatcccacagaaatacaaattaccatcagagaatactacaaacacctctatgcaaataaactagaaaatctagaagagatggataaattcctcgacacatacaccctcccaagactaaaccaggaagaagttgaatctgtgaatagaccaataacaggctctgaaattgaggcaataaccaatagcttaccaaccaaaaaaagtccaggaccagatggattcacagccgaattctaccagaggtacaaggaggagctggtaccattccttctgaaactattccaaccaatagaaaaagagggaatcctccctaactcattttatgaggccagcatcatcctgataccaaaacctggcagagacacaaccaaaaaagggaattttagaccaatatccttgatgaacattgatgcaaaaatcctcaataaaatactggcaaaccaaatccagcagcacatcaaaaagcttatccaccatgatcaagtgggcttcatccctgggatgcaaggctgtgttggaagttctggccagggcaataggcaggagaaggaaataaagggtattcaattaggaaaagaggaagtcaaattgtccctgtttgcagatgacatgattgtatatctagaaaaccccactgtctcagcccaaaatctccttaagctgataagcaacttcagcaaagtctcaggatacaaaatcaatgtacaaaaatcacaagcattcttatacaccaacaacagacaaacggagagccaaatcatgagtgaactcccattcacaattgcttcaaagagaataaaatacctaggaatccaacttacaagggatgtgaaggacctcttcaaggagaactacaaaccactgctcaatgaaataaaagaggatacaaacaagtggaagaacattccatgctcatggataggaagaatcaatatcgtgaaaatggccatactgcccaaggtaatttatacattcaatgccatccccatcaagctaccaatgactttcttcacagaattggaaaaaactactttaaagttcatatggaaacaaaaaagatcccacatcgccaagtcaatcctaagccaaaagaacaaagctggagacatcacactacctgacttcaaactacactacaaggctacagtaaccaaaacagcatggtactggtaccaaaacagagatatagatcaatggaacacaacagagccctcagaaataatgctgcatatctacaaccatctgatctttgacaaacctgacaaaaacaagcaatggggaaatgattccctatttaataaatggtgctgggaaaactggctagccatatgtagaaagctgaaactggatcccttccttacatcttatacaaaaatcaattcaagatggattaaagacttaaatgttagacctaaaaccataaaaaccctagaagaaaacctaggcaataccattcaggacataggcatgggcaaggacttcatgtctaaaacaccaaaagcagtggcaacaaaagccaaaattgacaaatgggatgtaattaaactaaagagcttctgcacagcaaaggaaactaccatcagagtgaacaggcaacctacagaatgggagaaaattttcgcaacctactcatcggacaaagggctaatatccagaatctacaatgaactcaaacaaatttacaagaaaaaaacaaacaaccccatcaaaaagtgggcaaaggatatgaacagacacttctcaaaagaagacatttatgcagccaaaagacacatgaaaaaatgctcatcatcactggccatcagagaaatgcaaatcaaaaccacaatgagataccatctcacaccaattagaatggtgatcattaaaaagtcaggaaacaacagagcacctgggggaaggggtggctgtgggtgcagctttggcagacttaaacgttcctgcgtgccagctctgaaaagagtagcagatctcccagcacaacgctcgagctctgctaagggagagactgcctcctcaagtgggtccctgaaccccgtgccccctgactgggagaaacctcccagcaggggtcgacagacacctcatactggagaactccggctagcatctgacgggtgcctctctgggatgaagcttccagaggaaggaataggcagcagtctttgctgttctgcagcctctgctggtgatacccaggcaaatggggtccggagtggactgccagcaaactccagcagacctgcagcagaggggcctgttagaaggaaaactaacagacagaaaggaatagtatcaacttcaacaaaaaggacgtccacaccaaaaccccatccaaag

SEQ ID NO: 7410 - DNA, 2101 bp, Homo sapiens
  SIMILAR (542)..(1987): 941254mologous to Homo sapiens putative p150,accession number U93564,Smith-Waterman Score=2460.
actaaaccaggaagaagttgaatctctgaatagaccaataacaggagctgaaattgtggcaataatcaatagcttaccaaccaaaaagagtccaggaccagatggattcacagccaaattctactggaggtacaaggaggaactggtaccattccttctgaaactattccaatcaatagaaaaagagggaatcctccctaactcatgttatgaggccagcatcatcctgataccaaagcctggcagagacacaacaaaaaaagagaattttagaccaatatccttgatgaacattgatgcaaaaatcctcaataaaatactggcaaaccgaatccagcagcacatcaaaaagcttatccaccatgatcaagtgggcttcatccctgggatgcaaggctggttcaatatatgcaaatcaataaatgtaatccagcatataaacagaaccaaagacaaaaaccacatgattatctcaatagatgcagaaaaggcctttgacaaaattcaacaacccttcatgctaaaaactctcaataaattagcccaaaatctccttaagctgataagcaacttcagcaaagtctcaggatacaaaatcaatgtacaaaaatcacaagcattcttatacaccaataacagacaaacagagagccaaatcatgagtgaactcccattcacaactgctttaaagagaataaaatacctaggaatccaacttacaagggatgtgaaggacctcttcaaggagaactacaaaccactgctcaaggaaataaaagaggatacaaacaaatggaagaacattccatgctcatgggtaggaagaatcaatatcttgaaaatggccacactgcccaaggtaatttatagattcaatgccatccccatcaagctactaatgactttcttcacagaattggaaaaaactactttaaagttcatatggaaccaaaaaagagcccgcatagccaagtcaatcctaaaccaaaagaacaaagctggaggcatcacactacctgacttcaaactatactacaaggctacagtaaccaaaacagcatggtactggcaccaaaacagagatagagaccaatggaacagaacagagccctcagaaacaatgctgcatatctacaactatctgatctttgacaaacctgacaaaaacaagcaatggggaacggattccctatttaataaatggtgctgggaaaactggctagccatatggagaaagctgaaactggatcccttccttacaccttatacaaaaattaattcaagatggattaaagacttacacattagagctaaaaccataaaaaccctagaagaaaacctaggcaataccattcagtacataggcatgggcaaggacttcatgtctgaaacaccaaaagcaatggcaacaaaagccaaaattgacgaatgggatctaattaaactaaagagcttctgcacagcgaaagaaactaccatcagagtgaacaggcaacccacaaaatgggagaaaattttcgcaacctactcatctgacaaagggctaatatccagaatctacaatgaactcaaacaaatttacaagaaaaaaacaaacaaccccatcaaaaaatgggcaaaggacatgaacagacacttctcaaaagaagacatttatgcagccaaaaaacacatgaaaaaatgctcatcatcactggccatcagagaaatgcaaatcaaaaccacaatgagataccatctcacaccagtcagaatggcgatcattaaaaagtcaggaaacaacaggtgctggagaggatgtggagaaataggaacacttttacactgttggtgggactgtaaactagttcaaccattgtggaagtcagtgtggcgattcctcagggatctagaactagaaataccatttgacccagccatcccattactgggtatatacccaaaggactataaatcatgctgctacaaagacacatgcacacgactgaagtgtggaattcgcatggtcaacatgaaaagtaaggaacctgccgtgggatctagattcttctctagaattagtagttggagaaattcaacagtgactggacatccatggcag

SEQ ID NO: 7411 - DNA, 792 bp, Homo sapiens
  SIMILAR (199)..(699): 891254mologous to Homo sapiens unknown protein,accession number M22334,Smith-Waterman Score=806.
ttattagacagtctacatactttattgaaagtcacatgaatgagccccaggatctcgtttgttttattatttggatatagcatatgtctttcacacaggcaatctttctagccctctactaatgtccttggcatcaagtgcttcatttcccccaggaaaatgaaggctttttctttatcgaaaacttatctttaaggtatcttgtccttcgcgaaggacatgaacagacacttctcaaaagaagacatttatgcagccaaaaaacacatgaagaaatgctcatcatcactggccatcagagaaatgcaaatcaaaaccactatgagatatcatctcacaccagttagaatggcaatcattaaaaagtcaggaaacaacaggtgctggagaggatgcggagaaataggaacacttttacactgttggttggactgtaaactagttcaaccattgtggaagtcagtgtggcgattcctcagggatctagaactagaaataccatttgacccagccatcccattactgggtatatacccaaatgagtataaatcatgctgctataaagacacatgcacacgtatgtttattgcggcactattcacaatagccaagacttgtgaaccacccaaatgttccaacatgatagactggattaagaaatgtggcacaatacaccagggatactatgcggcctaaaaatgatgaggtccaatccttggtagggcatgggtgaattgggaaaccaccttctcagtaactatcgcggtacaaaaaccaacacggctttctcac

SEQ ID NO: 7412 - DNA, 611 bp, Homo sapiens
  SIMILAR (444)..(283): 741254mologous to Escherichia coli periplasmic putrescine binding protein,accession number M93239,Smith-Waterman Score=200.
gtatatctcctaatgctatcccgtcccctcccccaaccccacaacaggcccgagtgtgtgaggtccccttcctgtgtccaggtgttctcattggtcaattcccacctatgagtgagctccagattcgagctaggtccgaaccgagccggtaccggggatctctagagtctgtagatggtcaggctgacatcatccaccgcatgttgaccatcgtaggatttgcacggtcgattttcggatcctgcactttcagagtgaacagcttcgcacgaacatccgcagcggataaatacctgggttctcacggacttccgcactcaccagcggcgtggctgctttattggcgttggcatagaacacatggtcggaaatatgcgctactacatccgggcgcacagcatggcgaatacatcaaagaacgccatcgccccttcttttggaatcgagaacgagacattcacgccattgtcgttgatggagtcaaagcctacatccggccccagcagtttgaactgacgcaggttgttattacgcagcgcgccaatgtggtactgctgtacccagccgcgacgtgcatattcgtgcctgcaggtcctcccctgtctgcctag

SEQ ID NO: 7413 - DNA, 1989 bp, Homo sapiens; identical to SEQ ID NO: 5631
  SIMILAR (1952)..(1987): 911254mologous to Homo sapiens putative p150,accession number U93565,Smith-Waterman Score=56.

SEQ ID NO: 7414 - DNA, 4648 bp, Homo sapiens
  SIMILAR (1016)..(2143): 961254mologous to Homo sapiens putative p150,accession number U93569,Smith-Waterman Score=1868.
atggggaaaaaacagaacagaaaaactggaaactctaaaacgcagagtgcctctcctcctccaaaggaacgcagttcctcaccagcaacggaaaaaagctggatggagaatgactttgacgagctgagagaagaaggtttcagacgatcaaattactctgagctacgggaggacattcaaaccaaaggcaaagaagttgaaaactttgaaaaaaatttagaagaatgtataactagaataaccaatacagagaagtgcttaaaggagctgatggagctgaaaaccaaggctcgagaactacgtgaagaatgcagaagcctcaggagccgatgtgatcaactggaagaaagggtatcagcaatggaagatgaaatgaatgaaatgaagcgagaagggaagtttagagaaaaaagaataaaaagaaatgagcaaagcctccaagaaatatgggactatgtgaaaagaccaaatctacgtctgactggtgtacctgaaagtgacggggagaatggaaccaagttggaaaacactctgcaggatattatccaggagaacttccccaatctagcaaggcaggtcaatgttcagattcaggaaatacagagaacgccacaaagatactcctcgagaagagcaactccaagacacataattgtcagattcaccaaagttgaagtgaaggaaaaaatgttaagggcagccagagagaaaggtcgggttaccctcaaagggaagcccatcagactaacagcggatctctcggcagaaaccctacaagccagaagagagtgggggccaatattcaacattcttaaagaaaagaattttcaacccagaatttcatatccagccaaactaagcttcataagtgaaggagaaataaaacactttacagacaagcaaatgctgagagattttgtcaccaccaggcctgccctaaaagagctcctgaaggaagtgctaaacatggaaaggaacaaccagtaccagccgctgcaaaatcatgccaaaatacagatcaacgagacagaaagtcaacaaggatacccaggaattgaactcagctctgcaccaagcggacctaatagacatctacagaactctccacaccaaatcaacagaatatacatttttttcagcaccacaccacacctattccaaaattgaccacatacttggaagtaaagctctcctcagcaaatgtaaaagaatagaaattataacaaactatctctcagaccacagtgcaatcaaactagaactcaggattaagaatctcactcaaagccgctcaactacatggaaactgaacaacctgctcctgaatgactactgggtacataacgaaatgaagacagaaataaagatgttctttgaaaccaacgagaacaaagacaccacataccagaatctctgggacgcattcaaagcagtgtgtagagggaaatttatagcactaaatgcctacaagagaaaggaggaaagatccaaaattgacaccctaacatcacaattaaaagaactagaaaagcaagagcaaagacattcaaaacctagcagaaggcaagaaataactaaaatgagagcagaactgaaggaaatagagacacaaaaaacccttcaaaaaatcaatgaatccagtagctggttttttgaaaggatcaacaaaattgatagaccgctagccagactaataaagaaaaaaagagagaagaatcaaatagacacaataaaaaatgataaaggggatatcaccaccgatcccacagaaatacaaactaccatcagagaatactacaaacacctctacacaaataaactagaaaatctagaagaaatggatacattcctcgacacatacactctcccaagactaaaccaggaagaagttgaatctctgaatagaccaataacaggctctgaaattgtggcaataaccaatagcttaccaaccaaaaagagtccaggaccagaaggattcacagccgaattctaccagaggtacaaggaggaattggtaccattccttctgaaactattccaatcaatagaaaaagagggaatcctccctaactcattttatgaagccagcatcattctgataccaaagccgggcagagacacaaccaaaaaaagagaattttagaccaatatccttgatgaacattgatgcaaaaatcctcaataaaatactggcaaaccgaatccagcagcacatcaaaaagcttatccaccatgatcaagtgggcttcatccctgggatgcaaggctggttcaatatacgcaaatcaataaatgtaatccagcatataaacagagccaaagacaaaaaccacatgattatctcaatagatgcagaaaaagcctttgacaaaaattcaacaacgcttcatgctaaaaacttttaataaatttgctattgatgggacgtatctcaaaataataagagctatctatgacaaacccacagccaatatcatcctgaatgggcaaaaactggaagcattccctttgaaaactggcacaagacagggatgccctctctcaccactcctactcaacatagtgttggaagttctggcctgggcaattaggcaggacaaggaaataaagtgtattcaattaggaaaagacgaagtcaaattgtccctgtttgcagatgacatgattgcatatctagaaaaccccattgtctcagcccaaaatctccttaagctgataagcaacttcagcaaagtttcaggatacaaaatcaatgttcaaaaatcacaagcattcttatacaccaataacagacaaacagagagccaaatcatgagtgaactcccattcacaattgcttcaaagagaataaaatacctaggtatccaacttacaagggacgtgaaggacctcttcaagggagaaccacaaaccactgctcaacgaaataaaagaggatacaaacaaatggaagaacattttcattccatgcttatgggtaggaagaatcagttatcatgaaaatggccatattgcccaaggtaatttacagattcaatgccatccccatcaagctaccaatgactttcttcacagaactggaaaaaactactttaaagttcatatggaaccaaaaaagagcccgcatcaccaaggcaatcctaagccaaaagcacaaagctggaggcatcacactacctgactgcaaactatactacaaggctacagtaaccaaaacagcatggtactggtaccaaaacagagatatagatcaatggaacagaacagagccctcagaaataacgccacatatctacaactatctgatctttgacaaaccctgggaaaaaccaagcaatgggggaaaggattcccttatttaataaatggtgctgggaaaaactggcttagccatatgtagaaagctgaaacttggatcccttccttacaccttatacaaaaaatcaaattcaagatggattaaaaaaaaagatttaaacgttagacctaaaaccataaaaaaccctagaagaaaacctaggcaataccattcaggacataggcatgggcaaggacttcatgtctaataaaacaccaaaagccaatggcaaccaaaagacaaaattgacaaatgggatctaatttaaactaaagagcttcctgcacagcaaaagaaactaccatcagagtgaacaggccaacctacaaaatggaagaaaattttcgcaatctacatcatctgacaaagggctaatatccagaatctacaatgaactcaagcaaatttacaagaaaaaaccaaacaaccccatcaaaaaagtgggtggaggacatgaacagacacttctcaaaaagaagacatttatgcagccaaaaaaacacatgaaaaaatgctcaaccatcactggccatcagagtaatgcaaatcaaaaccacaatgagataccatctcacaccagttagaatggtgatcattaaaaagtcaggaaacaacaggtgctggagaggatgtggagaaataggaacacttttacactgttggtgggactgtaaactagttcaaccattgtggaagtcagtgtggcgatgcctcagggatctagaactagaaataccatttgacccagccatcccattactgggtatatacccaaaggattataaatcatgctgctataaagacacatgcacacgtatgtttattgcagcactattcacacaatagcaaagacttggagccaacccaaatgtccaacaatgatagactggattaagaaaatgtggcacatatacaccatggattactatgcagccataaaaaatgatgagttcatgtcctttgtagggacatggatgaagctggaaaccatcattctcagcaaactatcgcaagaacaaaaaaaccaaacaccgcgtattctcactcataggtgggaattgaacaatgagaacacatggacacagggaaggggaacatcaccacactggggcctgttgtggggtggggggagggggaagggatagcattaggagatatacctaatgctaaatgacgagtaaatgggtgcagcacaccaacatggcacatgtatccatatgtaccacacttgcccgctgtgcacatgtaccctaacccttatagcataataatataataagttcataa

SEQ ID NO: 7415 - DNA, 1674 bp, Homo sapiens
  SIMILAR (640)..(1302): 981254mologous to Escherichia coli phosphoglycerate kinase (AA 1-387),accession number X14436,Smith-Waterman Score=1080.
atggggcagttacaacgtaacgcccgtgatttgcaggaatcagtgatgtcgattcgcatgatgccgatggaatatgtttttagtcgctatccccggctggtgcgtgatctggcgggaaaactcggcaagcaggtagaactgacgctggtgggcagttctactgaactcgacaaaagcctgatagaacgcattatcgacccgctgacccacctggtacgcaatagcctcgatcacggtattgaactgccagaaaaacggctcgccgcaggtaaaaacagcgtcggaaatttaattctgtctgccgaacatcagggcggcaacatttgcattgaagtgaccgacgatggggcggggctaaaccgtgagcgaattctggcaaaagcggcctcgcaaggtttgactgtcagcgaaaacatgagcgacgacgaagtcgcgatgctgatatttgcacctggcttctccacggcagagcaggtcaccgacgtctccgggcgcggcgtcggcatggacgtcgttaaacgtaatatccagaagatgggcggtcatgtcgaaatccagtcgaagcaggttactggcactacgatccgcattttactgccgctgacgctggccatcctcgacggcatgtccagcctcttaactcacggtatcggtcaattcgctgacgttgcgtgcgcaggcccgctgctggcagctgaactggacgcgctgggtaaagcactgaaagaacctgctcgcccgatggtggctatcgttggtggttctaaagtatctaccaaactgaccgttctggactccctgtctaaaatcgctgaccagctgattgttggtggtggtatcgctaacacctttatcgcggcacaaggccacgatgtgggtaaatccctgtacgaagctgacctggttgacgaagctaaacgtctgctgaccacctgcaacatcccggttccgtctgatgttcgcgtagcaaccgagttctctgaaactgcaccggctaccctgaaatctgttaacgatgtgaaagctgacgagcagatcctggatatcggtgatgcttccgctcaggaactggctgaaatcctgaagaatgcgaaaaccattctgtggaacggtccggttggcgtgttcgaattcccgaacttccgcaaaggtactgaaatcgtggctaacgctatcgcagacagcgaagcgttctccatcgctggcggcggcgacactctggcagcaatcgacctgttccgcattgctgacaaaaactcctacatctccactggcggcggcgcattcctcgaattcgtggaaaggttaaccacgctgacgcagttgctgcacgatcagggctacgtcactcaggccatcggaaaatggcatatgcgggaaaccacagagccgcagccgcagaacgttggctttgatgatttccgtggctttaactcggtgtctgatatgtacaccgcatggcgcgacgttcacgtcaatccggaagtggccctgagtccggaccgtcctgcatacatcaaccaatcaccgctcagcaaagatgacgttcatgcgctgcgcggcggcgaccaacaggccattgccgaccattacgccgaaatatatggcagatctggatcaacgctgcacggagtatggcgctcagctcctcgacaagatggcgaagagcgctaa

SEQ ID NO: 7416 - DNA, 3363 bp, Homo sapiens
  SIMILAR (1297)..(2100): 971254mologous to Escherichia coli Bacteriophage n4 adsorption inner membrane protein NfrB,accession number D90699,Smith-Waterman Score=1361.
atggcaggcaccacggcagcggcactgggttttgcacccagcgtagcactcgcggaaacccggcagtataaactgctgcgcacccgcgaaacccgtaatacctgcacctattgttccgtaggctgtgggctgttgatgtacagcctcggtgacggagcaaaaaacgccaaagcatctatcttccatatcgaaggcgatccggatcacccggtcaaccgcggtgcactttgtccgaaaggcgctggcctggtggatttcatccactccgaaagccgtctgaagtttccggaataccgtgcgccaggttctgataaatggcagcaaatcagttgggaagaggcgtttgatcgcatcgccaaactgatgaaagaagaccgcgatgctaactacattgcgcaaaacgccgaaggcgtgactgttaaccgctggctctccaccgggatgctgtgtgcttccgcgtcgagtaacgaaaccggctatttaacgcaaaaattctcccgcgcgctggcaagtcttgctccaacatttggtcgcggtgcgatgaccaaccactgggtcgacatcaagaacgccaacctcgtcgtggtgatgggcggtaacgccgctgaagctcacccggtcgggttccgctgggcgatggaagccaaaattcacaacggcgcgaagctgattgtgatcgatcctcgctttacgcgtacggcggcggtagctgactactatgcccctattcgttccggtatcgagctgatccatgcacgagcacgtcacacggcggtcgatatatgtatcgcgcaatatttcgcacgggataatcgatcacgaaaaccaccacatcggtggagcaatttgcgggccaaacatgacgttttccagcgctgtcagatgcgggaagaggtaaaactgctggaacaccatacctgcttcctggcgaatcaggcgctcgtcaactttcggatcgttaaccttcaggccatcgacaatcagatcgccggaggtgatttcttccagtttgttgatgcagcgcagcagggtcgatttaccggaaccggacggcccgataatcaccacgacttcgccctgggcaatgttcaaatcgatattgtgcagcacctgggttgggccaaaacgacgcagaataaagctcagcaccagggtaataatcagatagaacaccgccacggcgctccagatctcaagggcgcggaagttaccggcaataatttcttgcccctgacgggtcagttccgccacgccgatcacaataaacagcgaggtgtctttaatgctgatgatccactgtgtgaaggccgtattgcttgcaccgtgcagagtattactgaagattacgacattggcttccgcctgaaagaaaaaggtatgacggaaatttttgtccgttttccggtggtggacgaagccaaagaacgcgagcagcgtaaatttttacagcacgcgcggacatcaaacatgatctgcgtgcgcgaatatttccccgataccttttcgactgcggttcgacaaaaatcccgctggatcatcggcattgttttccaaggctttaaaacccataaatggacctccagcctgacgctgaactactttctctggcgcgaccgcaaaggggcaatcagtaactttgtcagcttcctcgcgatgctggtgatgatccagcttttgctgttgctggcgtatgaaagtttgtggcccgatgcctggcatttcctttctattttcagcggcagcgcatggttaatgaccctgctgtggctaaactttggtttgatggttaaccgcatcgtgcagcgggtgattttcgttactggctactacggcctgacgcaggggctgctttccgtcctgcgtcttttctggggcaacctgattaacttcatggccaactggcgcgcgctaaaacaggtacttcaacacggcgatccacgtcgcgtggcgtgggataaaacaacgcatgacttccccagcgtgactggcgatacccgctcgttgcgcccgttaggtcaaattctgctggaaaatcaggtcatcactgaagaacaactcgatacagcactgcgtaatcgcgtcgaaggtctacgccttggcgtgagagagatagtttttaaatgcttcggtttgcggctcggtaaagcagctcgcgtcgccttgttctacgatatgaccattttccatatacaccactcggctggcggttttacgcgccacttcaacttcgtgggtgacgatcacctgggtaatattcgtttctgccagctcacgaatgatgctgacgatttgtgccgtaatttccggggtcagtgcggcggtcggttcatcgaacagcagtacctgcgggttcatcatcaacgcacgggcaatagcaacacgctgctgcttgacaccagaaagatgcagcgggttgtattgctgaaacaccatgccaacgttacgacgcaaatcgcgaatcgctttgtcagagggtgttttggtgaaatcgaaatggttgcttgcaatgttgagcgtaccggagcgcggcatctcaagcagattgagtacacgcagcagcgagcttttacccgcgccgctggggccaacgcagcagataccccgtcaactgccaccgcacgcaaaggctttgccggatacgatcacccaaaccagtatctggttaaaccggcgaccactattgccgacaatatgatgccagtaatgcagcatccggcgcaggataaagaaacccagcagaagctggcagaacttgagaaaaaaaccggtaagaaaccgaatgtggttgttttcttgctggacgatgtgggctggatggacgtcggttttaacggtggcggcgtggcggtgggtaaccctacaccagatatcgacgccgttgccagccaggggctgattttaacttcggcgtattctcaaccaagctcttccccaacccgcgccaccattctcaccggacaatactccatccaccacggcattctgatgccgccaatgtacgggcaaccgggcgggctgcaagggttaaccacgctgccgcagttgctgcacgatcagggctacgtcactcaggccatcggaaaatggcatatgggggaaaacaaagagtcgcagccgcagaacgttggctttgatgatttccgtggctttaactcggtgtctgatatgtacaccgaatggcgcgacgttcacgtcaatccggaagtggccctgagtccggaccgttctgaatacatcaagcaattaccggtcagcaaagatgacgttcatgcggtgcgcggcggcgaacaacatgccattgccgacattacgccgaaatatatgggaaaactggatcaacgcttgatggactatggcgtttag

SEQ ID NO: 7417 - DNA, 543 bp, Homo sapiens
  SIMILAR (2)..(541): 981254mologous to Escherichia coli similar to phosphotransferase system II permeases,accession number L10328,Smith-Waterman Score=907.
gaacagtttattcgcgcaaatcgtacacattattgaagagggcggttggacggtattccgtaatatgccgctgatttttgctgtcggtttacccattggccttgataagcaagcgcaggggcgtgcttgtctggcggtgatggtgagtttcctgacctggaactatttcatcaacgcgatgggaatgacctggggaagctacttcggcgtcgatttcactcaggacgcggtggcaggtagcggtctgacaatgatggccgggattaaaaccctcgataccagcattatcggcgcaattatcatttccggcattgtgacggcgctgcataaccgtctgttcgataaaaaactgccggtttttctcggcattttccaggggacgtcttatgtggtgattatcgccttcctggtgatgatcccctgtgcctggctgacgttgctcggctggccaaaagtacaaatggggattgaatctctgcaagcgttcctgcgttcggcgggtgcacttggggtctggaataacaccttcctcgaacgtattct

SEQ ID NO: 7418 - DNA, 2241 bp, Homo sapiens
  SIMILAR (866)..(825): 711254mologous to Escherichia coli Hyf F,accession number M63654,Smith-Waterman Score=41.
tcaccccatattctgcacgctggaatacgccagcagacgcttaatgtcccgctgtaccagaatgaaaaatgccgccacggcaaccgacaacatgccgaagatgagcaacaaccggttggggaaatcgctgccgatggcttggcaaataatgatgtaatagcgaatcagcaccaacagcgcgcagttcagcaatacggcggagagcagggcgctgaccggactcggcgcttcactgtgagcatccggcagccaggcgtgcatgggaaatagcccggttttggtaccaaagccaattagcaaaaacacaaaggccaacagcattaatgttgggtcaagcaaggacgattgcttaagaacctcgctccagaatatcgccatttctgcctgcggcataacgctggcggcgttggcgtataccagcacggtaccgaacagaccaaaagcgacaccaacagtacaaataatgatgtacttccatgcagcttccagcgatgaacgctgaccgtaaatgcctaccagaaacgccgagcttaaggtggtggcttcgatcgccgcccacatcacaatcaggttattgctggtaacaaccagcagcatggtgaacaaaaacagatggaagaaaccgtagtaatcgcacagcgtaacgggtgaaagctcgccgtgtgccacttcatgacgcatgtagccaatcgagtaaatacccggtgagaaagccatcacaccagaaatggcgagaaacaaccggccaagaccatcaatttgaagccacagtcccgcagcgaatatttctctggcatcagcggcagttttgaccacccagagtgcagaatcagcagcagtgtgatccctaaggtccagcgtgccgtgggtacgccatatttttcttgccagtaacaccatcacaatgacggcgaagatggcgtcggtagcgatacctatttccaccagttccggtgctcgccaggcaagaagcgccagcaccagatgggagccgttttccatcaggcagtaaccaaaaatttgccgcaggatattgcgctggctgacaatgcacagcaggccaagcagaaaatgacctaacgctaccgccagcgccggtttcagcccggtagccatcggtagcttcacgggctgaacgacaaatgcgcaaagcaggacaattaacgccgcgagcagtgccatcattgccggaccgaataacgctttttccgggatgttctggggaatatttcgtgcagcgtaagtcatgattaacggtaccagcagcactttggtgataaaggcgctggcggaccagatcagcagttgctctgcggcgaacaggcacgagagagtggcgaaaatagacaccagcaccagtgactggcaggcgtaaaatccgcatgacaggcgatagcttttgacgtgcaaccaggtcgcggcgattacgctggaaatcagcgacatcacaatcagtacaatcaacaccaggcgcattgatcctggcagcggtgcggcattggcgacggcctcgctcggtttgccaggcacaacgcgaccaaaccagcgaataaaccaggcgaaactggcgaccgattcaatcatcagaagaatcatggcgggcagcaggatccagtactccaccagctgattgaggtcatgctcgttggccgcggtggtgaccaggctgtgggtcaggccactcttggcatcgacaccaatgtgggccttcatgccaaagtgccactgattgcctttcttggtctgatgcatctccggatcgcgttgctgctctttgttcttggtcgagctgggtgcctcaatgatggtggcatcgaccaaggtgccttgagtcatcatgacgcctgcttcggccagccagcgattgatggtcttgaacaattggcgggccagttgatgctgctccagcaggtggcggaaattcatgatggtggtgcggtccggcaaggcgctatccagggataaccgggcaaacagacgcatggaggcgatttcgtacagagcatcttccatcgcgccatcgctcaggttgtaccaatgctgcatgcagtgaatgcgtagcatggtttccagcggataaggtcgccggccattaccagccttggggtaaaacggctcgatgacttccaccatgttttgccatggcagaatctgctccatgcgggacaagaaaatctcttttctggtctgacggcgcttactgctgaattcactgtcggcgaaggtaagttgatgactcat

SEQ ID NO: 7419 - DNA, 4443 bp, Homo sapiens
  SIMILAR (2344)..(2877): 1001254mologous to Escherichia coli K12 putative general secretion pathway for protein export (GSP),accession number AE000379,Smith-Waterman Score=899.
atgaatcgcttcgatggcgcaaaacagaatgtcgtgggtgccgacgctcaccacctggctgatacggcagtcaaacgaaaccagagcctcttccagttgcgggcatccggtcacccccgtctgccagcgggcggcggcaaagcggtgttccatgggcgttttgccgccaaaaagattgaagcggtcgcgttttacttccgtcacctcatcgcccttctcgttgtgcagatgcacttcaagctggttaaaggcaatgttgatgtcgttttcacggcacagctgatcgatagtacggttcagctcatcgacagtacgactacggtcacgcagttcacgcacatacagacgcagctcatgaggagcgtggagtggctgacggataatggttcatgctaccgggctaatgaaacacgccagttcgcccggatgttgggacttgaaccgaagaacacggcggtgcggagtccggagagtaacggaatagcagagagcttcgtgaaaacgataaagcgtgactacatcagtatcatgcccaaaccagacgggttaacggcagcaaagaaccttgcagaggcgttcgagcattataacgaatggcatccgcataaagccggtacgctgaccaatgaacaatggcagcaggttaccgctgaactgcacgaccgcatgatggaaacggtcttttttgctttagatgatgcagagcagttgtttgcccaccatcaaccgactccggttaccagcgttgatttgctggggcagggccgtcaggcgctgatcgacgctaacctgcgtcttggcttggctctggcggaagatgaaattgactatctgcaggatgctttcacaaagcttggtcgtaacccgaacgacatcgaactgtatatgtttgcccaggcgaactccgagcactgccgccacaaaatttttaacgccgactgggtatcgatgccgtgggaagaagatttcggtaagcctgagcgcattgtcaccgcgctggacatcatgaccgaaggcccgctgggcggcgcggcgtttaacaacgaatttggtcgtccggcactgaacggctacttccgtacttatgaagaaaaagtgaacagccacaacggcgaagagctgcgcggttattgttcgccgtttaacggcgataaacctgcaaaaaatattattttgctgattggcgatgggatgggggactcggaaattactgccgcacgtaattatgccgaaggtgcgggcggcttttttaaaggtatagatgccttaccgcttaccgggcaatacactcactatgcgctgaataaaaaaaccggcaaaccggactacgtcaccgactcggctgcatcagcaaccgcctggtcaaccggtgtcaaaacctataacggcgcgctgggcgtcgatattcacgaaaaagatcacccaacgattctggaaatggcaaaagccgcaggtctggcgaccggtaacgcttctaccgcagagttgcaggatgccacgcccgctgagctggtggcacatgtgacctcgcgcaaatgctacggtccgagcgcgaccacgccacatttgcgtgatgttggtgtacgcaaggaagacattccggcactggcgcaggcggcactggatgatgtttgtaccggtggcaacccgcaccgcctgcctcatgcgttctccggcgggcagcggcaacgtatcgccattgccagagcactctcttcgcagcctgacgtgattgtgcttgatgagccaacctctgcgctggatatctccgttcaggcgcagatcctcaatttactggtaacgctacaggaaaatcacgggctgacctatgtgctgatttcacacaatgtctcggtgatacgtcatatgagcgatcgggtggcggtgatgtatctcgggcagattgtagaactgggcgacgcgcagcaggtgctgacggcacctgcacatccatacacccgattattgctggattccctccccgccattgataaaccgctggaggaagaatgggcattacgtaaaacggatctgccgggaaaccgcacgttgccgcaaggctgttttttctacgaacgttgcccgctggcaacccacggatgtgaagtccggcaatcattagcaataagggaggacggacgcattcacgcgcctgacgcgtcatccggcaatgctttacgatttcaactggtaatccagcgtaatttccgctttcagtacctgagagaccgggcatcctgcttttgctttctggattatgccgtcaaaggtagaggcatcaatacccggcagagacaatctcttaatacagacaaagagcatctgcgaaaaattgcacgcgggatgttctggctgatgctgcttattatttctgcaaaaatggcgcattcactctggcgctatatctccttttctgcggaatatacggcggtttctcaaccggtgaataaaccgagccgtgtggatgcaaaaacgttcgataaaaatgacgtgcaattaatcagccagcaaaactggtttggcaaatatcagcctgtcgccgcgcaggtaaaacaacccgaacctgtgcctgtggcagaaacgcgtcttaatgtggtgctgcgtgggatcgcctttggtgccagacccggcgcggttattgaagaaggcggtaaacagcaggtctatttgcagggtgaaacgcttggctctcacaacgcggtgattgaggaaatcaaccgcgaccatgtgatgctgcgttatcagggaaaaatagagcgtctgagtctggcagaagaggaacgttccactgttgctgtgaccaacaaaaaagccgtcagtgacgaagcaaagcaagctgttgctgagcctgctgtcagtgtgccagttgagatcccgctgcctacccacgcagaccgctgcgagcggactctttgcgcgatacgccataatagtattcgttctggttttcgctgttccactgcacaccaatacctggaaaacgtcatggaagcgccgagtcaggtattgggcctgagcaagcaggaagcgcgcgagcgggcggtgaagtatctggcaaaagtcgggatagacgaacgtgcgcaggggaaatatccggtgcatctttccggcggtcagcaacagcgtgtttctatcgcgcgggcgctggcgatggaaccggaagttttactgtttgatgaacctacctcggcgctcgatcctgaactgtccgcgccggacccgaaaatttgtatctcctacggtgcctgcggtaacagtggcgggatcttccacgatctctactgcgtgtggggcggtacggataaaattgtccctgtggatgtttatatcctggctgcccgccaacgcctgccgccacgctgtacggctttgcaatggcgctcggcctgctggagcagaaaattcacgcccgtgggccgggtgaactggatgaacaaccggcggagatcctgcatggtgatatggtgcagccgctgcgcaggcgcgtatccgatgagtgaaaaggtggtgttcagtcaactgagccgtaaatttattgatgagaacgatgccacgcccgccgaggcgcagcaggtggtctattacagcctggcgattggtcaccaccttggggttatcgattgcctggaagcggcgctcacctgcccgtgggatgaatatctggcatggattgccactctggaggcaggcagtgaagcccgccgcaaaatggaaggcgtgccgaaatatggtcaggaagaggcgcagaaaaataactggtctgtttccattgctgttgccgatgacgccggtcatctgctggcgttaagtcgcatggacgattgcgcgccgattccggcttatatctcccaggagaaagcgcgtaccgccgcgctggggcgtcgtgaaactaagggctatgaagagatggtgaacaacggacgtaccgcgtcgcgaaagcggcagcagcggtgttggcgaaataagcgaaaacgaggagatggtacctccgggcataaactgtatggccccaccggaattggcattctttatgtgaaagaagccttgttgcaggagatgccgccgtgggaagggggcggttctatgatcgccaccgtcagcctgagtgaaggcactacctggaccaaagcaccatggcggtttgaagccggtacacccaataccgggggcatcattggtcttggcgcggcgctggagtatgtttcggcgctggggcttaataacatagccgagtatgaacagaatctgatgcattatgcgctatcacagctggaatctgtaccggatctcactctctatggcccacaaaacaggcttggcgttattgcttttaatctcggtaaacaccacgcctatgatgttggcagttttctcgataattacggcattgctgtgcgtaccggacatcactgcgcaatgccattgatggttgccgcagcctga

SEQ ID NO: 7420 - DNA, 538 bp, Homo sapiens
  SIMILAR (344)..(451): 1001254mologous to Escherichia coli similar to arylsulfatases of Klebsiella pneumoniae and Homo sapiens,accession number M87049,Smith-Waterman Score=202.
tcacaccaggaaggcgataatcaccacataagacgtcccctggaaaatgccgagaaaaaccggcagttttttatcgaacagacggttatgcagcgccgtcacaatcctgaaaggctgaccattgagctctccgatgccgacggcaatattgtactgagttatcaggaacatcagccgcaagcgttgccgttacctggagtatgtttcggcgctggggcttaataacatagccgagtatgaacagaatctgatgcattatgcgcatgacaatccacacctgactctgacagccctgaatgctattttgtggacttctgtcttcgtcgcgtaattctggcagactccgcagttgctgcacgatcagggctacgtcactcaggccatcggaaaatggcatatgggggaaaacaaagagtcgcagccgcagaacgttggctttgatgatttccgacggcggcccggatcgttgcaaccaggtcgcggcgattacgctggaaatcagcgacatcacaatcagtacaatcaacaccaggcgcat

SEQ ID NO: 7421 - DNA, 1986 bp, Homo sapiens
  SIMILAR (604)..(942): 971254mologous to Escherichia coli K12 putative transport system permease protein,accession number AE000134,Smith-Waterman Score=528.
atgttgtttatcgtcacatccttcaactacggcgaccgcgctacgctctctatcgccggttcggaaatggccaaagatatcggccttgatcccgtgggaatgggctatgtgttctctgcttctcatgggcatcagcggatcgcctggctgggagggcaaagttcctcattaacccgtgcagaacggttcatcccctttgggcgccctacctggtgcccctttaatcttcggcccttcggtcccggccatcagccggccgggctcatgttcgccggagtggccgaccttggatacttcgggctattcggccccgcgctgctgtttaccgcgtatgcaggttcggaagccgtttttgcgcacgtattcggtgacgcacttggcgacgctgggcttcttatgagcctgctgtcaccctttgacgtggtgatatggatgacggatggctggccgctgtatgaatcccgcctgaagggaaagctgcacgtaatcagcaagcgatatacgcagcgaattgagcggcataacctgaatctgaggcagcacctggcacggctgggacggaagtcgctgtcgttctcaaaatcggtggagcagcatgacaaattggagtcattaccgggccaaatcgataaatcgctcgatgaagcctcactcagcctgcgcgccggttccctgcgtaccattacgcacatcctgctgccgctgctgcgcccggcgatcctctcggcgctgatttacagctttgtgcgcgccattaccaccgtcagcgccattgtgttcctcgtcacgccggatacccgcgtagcgacggcttacatcctcaaccgcgtggaagatggcgaatacggtgtagcgattgcctacggttccattctgatcgtggtgatgctggcgattattttcatctttgactggctgatcggtgaatcacttctgtccagattcgagaagactgtcgacgatcacagtcagagcagactgccagcagaaggaagcattctgagtcaagatatctctggagttaagcttttttctctattgaccccagcacggggctatgttcctattcgggccccttgccctttcttatgcgcgtcgtaccggttcttttgcgtagcccggcagcaaggtcttgatgcggcgctgattgatgcgccgttagcagtcgatgcacttacgcctcttagcgagttgctctctcatgtcggacaggcaccctgttcggtgcccgtggtcgacgaggaccaacagtatgtcggcatcatttcgaaaggaatgctgctgcgcgctttagatcgtgaggggggcgtgcgcgttccggttgattatatcctcaacggtttccaccccttgctgctgggtatgcccgcaccgctggcgattatcgttttcgctctcatcgcctgcagatttccggggtcgaatggtcggataaggcgttcacgccgcatccgacatttgcacaagatgcctgatgcgacgctgtccgcgtcttatcaggcctacgtgcggcatcagacaaatgtcactgctttggttcttcgctccagtcatcgctttcggaaagatcgccactgctggggattcgtttttcttcagcagcccattctccgagcaacaggccagttcgaaatccagacgttccggtacctgtccgttttcagtgtccagcggcataaaacgaatggcaaaacggctcttatgtccggaaatgttgcggataaagctgtgaatcgagcgacaggaccgactgcctgtgtgtggctattttcccttcggaattcctccatggttaccacacgtttctgtggactctgtgaatgggcagatcagcaaggagctcgccccgcccgtataagcgagaacggcaaacgcggctactcctacctttacgacgtgcatatgggagcacaatccggggaaacaaggggccgccaaggggagtatgcgtcaaaaccgccttcccgggagtatgctggggactaa

SEQ ID NO: 7422 - DNA, 982 bp, Homo sapiens
  SIMILAR (808)..(245): 971254mologous to Escherichia coli K12 orf, hypothetical protein,accession number AE000119,Smith-Waterman Score=947.
cctttcaaggcatacgtgcggcatcagacaaatgtcactgctttggttcttcgctccagtcatcgctttcggaaagatcgccactgctggggattcgtttttcttcagcagcccattctccgaggtcgatcagctgacaacgtttggagcaaaatggccgaaacgggctgatttcaccccacaccaccgttttcccgcaggttgggcaatttaccgtaatagtttctgacatttttactccttagcaacaggccagttcgaaatccagacgttccggtacctgtccgttttcagtgtccagcggcataaaacgaatggcaaaacggctcttatgtccggaaatttgcggataaagctgtgaatcgagcgacagattcaggcgcagcaagtcggcatcgccaccgttatcctgataaaaaccattcaggctggtttgtttacggaagggggccgactggcgaattaaatccagcaccatggtaagtgcctgggtgagcgggttcaggctggcaatccaggtttctacctggctgtcgcgctgcgcctggggtagatgcagccaaatgtgcaatgtaggtaaatcaaagctgcaacagccgcctgggatgctcagtcgctgacgcaccagagcaatcaaacgatcttcacgcagaaattgcccgatacgcggcgcggaaattaatacgctccccgccgcttttaactgctgaattaatgcttcaatacggctctggtccacgccaggcacgccaatccaggtctggagtttacgttgctgccggtcaagttcccgaaaggccgctgttttgctgatattcagccaatgcccgatgaatttggctggccgcgccgtaacgcctttattcagccgcaggtcgatgcggtgatgctggaaggggtgtcgcgttttccgaatgtgcgctgcttgttttcccgcgagctggaggccttcagtcagcaagatgacgaagtgaccttgcac

SEQ ID NO: 7423 - DNA, 1566 bp, Homo sapiens
  SIMILAR (226)..(867): 911254mologous to Escherichia coli secA protein,accession number M20791,Smith-Waterman Score=985.
atgatccagagttatcgactgaacgaagccgattattcgtgtgaacgctttgccgacttgccatgcgaccctaaaagcaacaacgaccttgttgtactcaataaaaccggagtggatcggcgttattcacaacgcctactttttaagcgggcgcggatatcatcggaaccaacagctttaacttcacgaccatgtggatgcgggttgtcgactctagaggatccccaacgctgcatcgccgaaatgcgtaccggtgaaggaaaaaccctgaccgcaacgctgtctgtttacctgaacgcactaaccggtaaaggcgtgcacgtagttaccgtcaacgactacctggcgcaacgtgacgccgaaaacaaccgtccgctgtttgaattccttggcctgactgtcggtatcaacctgccgggcatgccagcaccggcaaagcgcgaagcttacgcagctgacatcacttacggtacgaacaacgaatacggatttgactacctgcgcgacaacatggagttcagccctgaagaacgtgtacagcgtaaactgcactatgcgctggtggacgaagtggactccatcctgatcgatgaagcgcgtacaccgctgatcatttccggccccgcagaagacagcttggaaatgtataaacgcgtgaataaaaatattccccacctgatccgtcaggaaaaaaaagactccgaaaccttccaaggggaaagccactttttgggggacgaaaaatcttgtcaggtgaaactgacccaactttgtcttgtgctgattgaagaacttcttgtgaaaaagggcattatggatgaaggggagtctcttgtctcttcggacaacattatgctgatgcaccacgcacttaccatggtgctggatttaattcgccagtcggaccccttccgtaaacaaaccagcctgaatggtttttatcaggataacggtggcgatgccgacttgctgcgcctgaatctgtcgctcgattcacagctttatccgcaaatttccggacataagagccgttatgccattcgttttatgccgctggacactgaaaacggacagcattgtgttcgaatgtccgatgctgcgaaaacgccttatctgacctacagacgttttagctttgcaattacccgttcattgggctgcggaaaatcattggcatttaagaccgatcagcgacattcactcaacggggttggcttcttttacccacggattcccttcccaaggagtccccaagatcaagccaagcagcccttggcactggggctgactctggacacttgcagcagcttccataacaagcagttaggccacaaaagccatgcagtgtgccaagcatggctgcaggaaggcactggaacccgcaggacgcccgtggctgctgactcccatgctgcaatcccactggtgccatgtatccttgacatatatcggagtacacgagcctgtcttccttcatatccaacctggctgtcagaggacccagttgtctccaagctccctagttgtgaagatggggcaaccatcctggcattctcagaagcttaa

SEQ ID NO: 7424 - DNA, 1086 bp, Homo sapiens
  SIMILAR (207)..(118): 1001254mologous to Escherichia coli PUTATIVE ARSENICAL PUMP MEMBRANE PROTEIN (FRAGMENT),accession number D90889,Smith-Waterman Score=151.
atgatgggaggggtggccgctgcgcgggcgccggcggggccgcgtgggcgtctgtgcgcggggggtcgggcgcgggggctcggcgcgttgggtctgcgggcgcggcggcgctggcgtcggcgtcaggatcagcgcggcgccgtcattggcaaacaacgcatcaacagcggcaccgagcaagactttccaggtgaacagcgctctaggctatattggaactggattcgcgcccatccccccatccggtaccccagcggcctacgtcccgcaccgccactgtcagtgagggccgccctgctgctaactgacttacagccatcgtatagcgccgattttcatgcggcaacacccgacgccagctggcacacaccaggcagcggcacgtcacgagggcaaccaccacggatacccccagccccaacaacgcacaagcaatacggcccacaaccgagcaacgacaaaacgagactccaccgaggccacgcccagcaccaccccccacccaccgcccaccaagcaccccacgcaccccaaccagccaagcaccggacacaggccaccgacgcacccgggaagacccgaacacggggcaacgccaccccgggactgaacagcaaaaaacacacacagacgcacgacgaccgcttccgctccacaacgaaccatagcaccaaccagacccacacccacaccagccatagacgcacacccacaccaaaccaaaaaaaaaaacgagaggcaaactccgccgtgctctgcgggccaagtacaaaaaaacccgcaacagcacgacagcaacgagcaccacctaccacacacaccacaccgacaaccaagcacacacccacacaaaccaccacgtcggtcaagctgcgtgttgccgaaccccgtcagccgacgtggcctatcggaattcgctggtcaccgcctttgccgatgggcaaccgtatgcgacgggtggacgccttgaaattagttttgctggggtactgcatgccaagaattgtcctatgctactttacttatatatgcgatgtgctgttctatatgtccgacgggcccgtgcataccacaattaacggctaa

SEQ ID NO: 7425 - DNA, 887 bp, Homo sapiens
  SIMILAR (468)..(875): 931254mologous to Escherichia coli f470,accession number L10328,Smith-Waterman Score=618.
gacgatatcgcactgaccaggattccctgcggctccagaaagaagaaaccgacaagcagcaataacaggacaatccagcccgccctgaaggttgccagatccttgatcgcactggcaggcgtcttcagcagcgaaacttaatacgttgccggaataactctgcgaaagaagagatacagcataatcagcgtggccgcaatcgctgccgcatccacggcagatcataacggaggcgtactgcgcaaagctcagaccgaatgaactccgccgagtacgatattcagcagcgttagaaacgatgagcggcaggctggccgtatctgtaataaatcctgcagccatgacaaaggccagtgtcgtgccctggctgaacccagtgcgatcagtatcgcaatcacaatcggcgtcaggatcagcgcggcgccgtcattggcaaacaacgcatcaacagcggcaccgagcaagactttccaggtgaacagcgctctagcggcgtctattccattccgcctgatattagcggcgtcattggtgaagtagatttgagcggcgcgttaacacttgaactcgccggtatcattttctcctttatgctgatcaacctatttgattcatcaggaacattaattggtgtaactgataaagcgggcttaatagatggtaacggtaaattccccaatatgaataaggcgctgtatgttgatagcgtcagttcggtggcgggtgcgtttatcggcacctcgtctgttactgcctatattgaaagtacttctggtgtggcagtcggtggccgcacggggctgactgcggttgtggttggcgttatgttcctgttggttatgttcttctcaccgctggtcattatcttggaaccaaaggaaggataa

SEQ ID NO: 7426 - DNA, 3662 bp, Homo sapiens
  SIMILAR (1921)..(2490): 991254mologous to Cloning vector pZC320 SopA,accession number U26464,Smith-Waterman Score=993.
atgcaagatgagaaactgcgggacgagacagagcagcctgtgagcaaagtaattgagcggaaccgtctgagaacggcatttcaagtgatgcggaagcaagcgggtgcagcggcgcttgacccaacgcagggtggaggatctgcacatcaccctgggcgccgggaggtggattcgtgtgggcagcccctcaaaccagatccactggtcggctacatccagctgcttcatgtgccccatgggggttctattgcggtagggcttaatgaagatgactcgggggccctcgactggaaccgcttgcatgcctgcaggtcgactctagaggatccccggccttttcatggggccgagcgccgctgggtaggcggaagtagccgcacgagtggcggggctatgtcgtgctctgctcgtcctgttgctcctggggcccggcggctggtgccttgcagaacccccacgcgacacctgcgggaggaacttgtcatcaccccgctgccttccggggacgtagccgccacattccagttccgcacgcgctgggattcggagcttcagcgggaaggagtgtcccattacaggctctttcccaaagccctggggcagctgatctccaagtattctctacgggagctgcacctgtcattcacacaaggcttttggaggacccgatactgggggccacccttcctgcaggccccatcaggggtggacaaccatttggaggagctgagcctgccggtgcctacatcagacaggaccacatctaggacctcctcctcctcctcctccgactcctccaccaacctgcatagcccaaatccaagtgatgatggagcagatacgcccttggcacagtcggatgaagaggaggaaagggctcaccaggcgggggaaacggggcccacggtctgcggttacatgggactggacagcgcgtccggcagcgccactgagacgcagaagctgaatttcgagcagcagccggactccagggtcgactccaaaggatcccctgacagcccggaagcgaggaaaataacccggcgctggagaataggtgaagcagcggatttagttggggtttcttctcaggctatcagagatgccgagaaagcagggcgactaccgcacccggatatggaaattcgaggacgggttgagcaacgtgttggttatacaattgaacaaattaatcatatgcgtgatgtgtttggtacgcgattgcgacgtgctgaagacgtatttccaccggtgatcggggttgctgcccataaaggtggcgtttacaaaacctcagtttctgttcatcttgctcaggatctggctctgaaggggctacgtgttttgctcgtggaaggtaacgacccccagggaacagcctcaatgtatcacggatgggtaccagatcttcatattcatgcagaagacactctcctgcctttctatcttggggaaaaggacgatgtcacttatgcaataaagcccacttgctggccggggcttgacattattccttcctgtctggctctgcaccgtattgaaactgagttaatgggcaaatttgatgaaggccggctctccatgatgtccttcatcctcaacgccctcacctgcgccatgagaggccttctttgctggcccgtgttgctgctccttcttcagccctgggaaacccagctccagttgacaggggtggacaaccatttggaggagctgagcctgccggtgcctacatcagacaggaccacatctaggacctcctcctcctcctcctccgactcctccaccaacctgcatagcccaaatccaagtgatgatggagcagatacgcccttggcacagtcggatgaagaggaggaaagggatggggaaactgaggctccaagagaggaggctaaggtcgactctagaggatccccgatcggagttgctgcccataaaggtggcgtttacaaaacctcagtttctgttcatcttgctcaggatctggctctgaaggggctacgtgttttgctcgtggaaggtaacgacccccagggaacagcctcaatgtatcacggatgggtaccagatcttcatattcatgcagaagacactctcctgcctttctatcttggggaaaaggacgatgtcacttatgcaataaagcccacttgctggccggggcttgacattattccttcctgtctggctctgcaccgtattgaaactgagttaatgggcaaatttgatgaaggtaaactgcccaccgatccacacctgatgctccgactggccattgaaactgttgctcatgactatgatgtcatagttattgacagcgcgcctaacctgggtatcggcacgattaatgtcgtatgtgctgctgatgtgctgattgttcccacgcctgctgagttgtttgactacacctccgcactgcagtttttcgatatgcttcgtgatctgctcaagaacgttgatcttaaagggttcgagcctgatggaaggaccagtgtgctgaggggggacatggttgccagcaccagcaatgaatgcctgcaggtcgactctagaggatccccttatttcattatggtgaaagttggaacctcttacgtgccgatcaacgtctcattttcgccaaaagttggcccagggcttcccggtatcaacagggacaccaggatttatttattctgcgaagtgatcttccgtcacaggtggtgcagacacagaacatttccagttgtagaaattcctgttagggctgagcttgcatgcctgcaggtcgactctagaggatccccacgtaaaaatagcccgcgaatcgtccagtcaaacgacctcactgaggcggcatatagtctctcccgggatcaaaaacgtatgctgtatctgttcgttgaccagatcagaaaatctgatggcaccctacaggaacatgacggtatctgcgagatccatgttgctaaatatgctgaaatattcggattgacctctgcggaaccaaaccggtttacgcagtttcggcttagtgaaacaaaagaaatcaccaatccgtatgccatgcgtttatacgaatccctgtgtcagtatcgtaagccggatggctcaggcatcgtctctctgaaaatcgactggatcatagagcgttaccagctgcctcaaagttaccagcgcacttctccttgctgctgccacatgaagaaggacgtgtttgcttccccttccaccatgatttcttccagcagagtaagcaataataccagcaaaacaacaatcatcaagaatcaatgccaaaaggacgactctagaagatccctgctggtcaagaactcaagacctgccaaatgcgggagtaaaaggagctgtaacactttcctggccggctcgctgaggtgcaggtcatccccagagcacaccaccattctgaggggaggcgtgcgcaggtgcctgcagcaacagtgtgaacagactgtgcggatcctgcatgccaaggtggcccagaaatcatacggaaatgagaagcgactaataatcagaccgacgatacgagtgggaccatggtcccagactaataatcagaccgacgatacgagtgggaccgtggtccagtctgattatcagaccgacgatacgagtgggaccgtggtcagaactaataatcagaccgacgatac

SEQ ID NO: 7427 - DNA, 405 bp, Homo sapiens
  SIMILAR (1)..(291): 971254mologous to Cloning vector pZC320 SopA,accession number U26464,Smith-Waterman Score=487.
atgaaactcatggaaacacttaaccagtgcataaacgctggtcatgaaatgacgaaggctatcgccattgcacagtttaatgatgacagcccggaagcgaggaaaataacccggcgctggagaataggtgaagcagcggatttagttggggtttcttctcaggctatcagagatgccgagaaagcagggcgactaccgcacccggatatggaaattcgaggacgggttgagcaacgtgttggttatacaattgaacaaattaatcatatgcgtgatgtgtttgaccgacgatacgagtgggaccatggtcccagactaataatcagaccgacgatacgagtgggaccgtggtcccagtctgattatcagaccgacgatacgagtgggaccgtggtcccagactaa

SEQ ID NO: 7428 - DNA, 276 bp, Homo sapiens
  SIMILAR (275)..(21): 581254mologous to Homo sapiens transcription factor RBP- L,accession number AB027710,Smith-Waterman Score=232.
gtatcgtcggtctgattattagttctgaccacggtcccactcgtatcgtcggtctgataatcagactggaccacggtcccactcgtatcgtcggtctgattattagtctgggaccatggtcccactcgtatcgtcggtctgattattagtcgcttctcatttccgtatgatttctgggccaccttggcatgcaggatccgcacagtctgttcacactgttgctgcaggcacctgcgcacgcctcccctcagaatggtggtgtgctctggggatgac

SEQ ID NO: 7429 - DNA, 756 bp, Homo sapiens
  SIMILAR (136)..(666): 981254mologous to Cloning vector pBACe3.6 levansucrase,accession number U80929,Smith-Waterman Score=925.
atgagcacggaaggtggtggccgtcgctgccaggcacaagtgtcccgccgcatctccttcagcgcgagccaccgattgtacaggtactgggaggaggagatgaaccctgctcctgtggaggctatgagaacgttccagcagtttatcgatgaaggcaattatacatccggcgacacccatacgctgagagaccctcactacgttgaagacaaagcccataaataccttgtattcgaagccaacacgggaacagaaaacggataccaaggcgaagaatctttatttaacaaagcgtactacggcggcggcacgaacttcttccgtaaagaaagccagaagcttcagcagagcgctaaaaaacgcgatgctgagttagcgaacggcgccctcggtatcatagagttaaataatgattacacattgaaaaaagtaatgaagccgctgatcacttcaaacacggtaactgatgaaatcgagcgcgcgaatgttttcaaaatgaacggcaaatggtacttgttcactgattcacgcggttcaaaaatgacgatcgatggtattaactcaaacgatatttacatgcttggttatgtatcaaactctttaaccggcccttacaagccgctgaacaaaacagggcttgtgctgcaaatgggtcttgatccaaacactaatattcagaccgacgatacgagtggcaccgtggtccagactaataatcagaccgccgatacgagtgggaccatggtcccagactaa

SEQ ID NO: 7430 - DNA, 709 bp, Homo sapiens
  SIMILAR (179)..(574): 451254mologous to Mus musculus Kiaa0575,accession number AF180470,Smith-Waterman Score=283.
agaatccccgaatggagtgagctcttccagcacagctgacaagtcccagaagcagtccctgacccccagctttcagagcccagccaccagcttggggctggatgaaggggtctccgccagctcagctggagccggagccggggagactctgaagcaggaatgtgactccctgggcccccagatggcgagcagcaccacctccaagccgtcatcatcatcctcaggacccaggaccctcccatggccgggacagcccatcagaggctgccggggcccacaggcagccctgccaccagtggtgatcctatccaaagcggcctacagtctcctgggctcccagaagagtggcaagctgccatcctcctcctccctgctgccccacgccgacgtggcctgggtgagctccctgcggccactcctgaacaaggacatgagcagtgaggagcagtccctctactacaggcagtggaccttggcccggcagcaccacgctgactatagcaaccagctggacccggcctctggcacccgaaacttccacccccgacggctcctgctgacagggcccccacagactaataatcagaccgacgataccgagtgggaccgtggtcccagactaataatcagaccgacgatacgagtgggaccgtggttccagactaataatcagaccgacgatacgagtgggaccgtggtcccagactaa

SEQ ID NO: 7431 - DNA, 1488 bp, Homo sapiens
  SIMILAR (445)..(1068): 991254mologous to Escherichia coli Chemotaxis protein methyltransferase (EC 2.1.1.80),accession number D90830,Smith- Waterman Score=1089.
atgcgtatctggatgaacccgaatgagctgaacaaattccagctaacgccggttgatgtcattaccgccatcaaagcgcagaacgcccaggttgcagcgggtcagctcggtggtacgccgccggtgaaaggccaacagcttaacgcctctattattgctcagacgcgtctgacctctactgaagagttcggcaaaatcctgctgaaagtgagcgccgtgagtgagcgagttcatcatgtgcggcggcaaagcggtcggacagtgctccgagaacgggtgcgcatagaaattgcatcaacgcatatagcgctacagcacgccatagtgactggcgatgctgtcggaatggacgatatcccgcaagaggcccggcagtaccggcataaccaagcctatgcctacagcatccagggtgacggtgccgaggatgacgatgagcgcattcacagcggtgagtggcaggcgtttatcaattcgctgaccacgaatctgacggcatttttccgtgaggcacatcatttccctctgctcgcggatcacgcacgtcgccgttctggcgagtatcgcgtatggagcgcggcggcttcgaccggcgaagagccgtacagcattgcgatgacgctggctgacacattgggcaccgcgcccggacgctggaaagtgtttgccagtgatatcgacaccgaagtgctggaaaaagccagaagcggtatctatcgccatgaagagttgaaaaacctgacgccgcagcaactgcaacggtatttcatgcgagggacggggccgcatgaagggctggtacgcgtgcgtcaggagctggcgaactatgttgattttgccccgctgaatctactggcgaaacagtacaccgtgccggggccgtttgatgcgatcttctgtcgtaacgtcatgatctacttcgatcaaactacccagcaggagattttgcgccgctttgttccgctccttaaacccgacggattgctgtttgcgggtcactctgaaaactttagccaccttgagcgccgcttcacgctgcgtggtcagacggtgtatgcgctaagaaaatgttgtcgaaaagcgtgtaagaggtgcgcaatgcgtaagcagtggctcgggatctgcatcgcggcaggaatgctcgcggcatgtacaagcgatgatggtcagcaacagacggtaagtgtaccgcagcctgcggtatgtaacggccctatagttgaaattagcggggcggacccgcgtttcgaaccactgaacgcgacggcaaatcaggattaccagcgcgacggtaaaagctacaaaatcgtgcaggatccgtctcgatttagccaggcgggactggcggcaatctatgatgccgaacccggcagtaacctgacggcctctggcgaagcatgtcgatccgacacagctgacggcagcccatccaacgcttccgatcccccagctacgccagaatcactaacctggctaacgggcgaatga

SEQ ID NO: 7432 - DNA, 1641 bp, Homo sapiens
  SIMILAR (1641)..(1075): 1001254mologous to Cloning vector pZC320 SopA,accession number U26464,Smith-Waterman Score=1006.
ttatctaatctcccagcgtggtttaatcagacgatcgaaaatttcattgcagacaggttcccaaatagaaagagcatttctccaggcaccagttgaagagcgttgatcaatggcctgttcaaaaacagttctcatccggatctgacctttaccaacttcatccgtttcacgtacaacattttttagaaccatgcttccccaggcatcccgaatttgctcctccatccacggggactgagagccattactattgctgtatttggtaagcaaaatacgtacatcaggctcgaaccctttaagatcaacgttcttgagcagatcacgaagcatatcgaaaaactgcagtgcggaggtgtagtcaaacaactcagcaggcgtgggaacaatcagcacatcagcagcacatacgacattaatcgtgccgatacccaggttaggcgcgctgtcaataagtacatcaggctcgaaccctttaagatcaacgttcttgagcagatcacgaagcatatcgaaaaactgcagtgcggaggtgtagtcaaacaactcagcaggcgtgggaacaatcagcacatcagcagcacatacgacattaatcgtgccgatacccaggttaggcgcgctgtcaataactatgacatcatagtcatgagcaacagtttcaatggccagtcggagcatcaggtgtggatcggtgggcagtttaccttcatcaaatttgcccattaactcagtttcaatacggtgcagagccagacaggaaggaataatgtcaagccccggccagcaagtgggctttattgcataagtgacatcgtccttttccccaagatagaaaggcaggagagtgtcttctgcatgaatatgaagatctggtacccatccgtgatacattgaggctgttccctgggggtcgttaccttccacgagcaaaacacgtagccccttcagagccagatccgacgatacgagtgggaccgtggtcccagtctgattatcagaccgacgatacgagtgggaccgtggtcccagactaataatcagaccgacgatacgagtgggaccgtggtcccagactttaccaacttcatccgtttcacgtacaacattttttagaaccatgcttccccaggcatcccgaatttgctcctccatccacggggactgagagccattactattgctgtatttggtaagcaaaatacgtacatcaggctcgaaccctttaagatcaacgttcttgagcagatcacgaagcatatcgaaaaactgcagtgcggaggtgtagtcaaacaactcagcaggcgtgggaacaatcagcacatcagcagcacatacgacattaatcgtgccgatacccaggttaggcgcgctgtcaataactatgacatcatagtcatgagcaacagtttcaatggccagtcggagcatcaggtgtggatcggtgggcagtttaccttcatcaaatttgcccattaactcagtttcaatacggtgcagagccagacaggaaggaataatgtcaagccccggccagcaagtgggctttattgcataagtgacatcgtccttttccccaagatagaaaggcaggagagtgtcttctgcatgaatatgaagatctggtacccatccgtgatacat

SEQ ID NO: 7433 - DNA, 494 bp, Homo sapiens
  SIMILAR (238)..(492): 981254mologous to Homo sapiens Human sialoadhesin family 4 (SAF-1) polypeptide,accession number W81023,Smith-Waterman Score= 461.
  misc_feature (1)...(494): n = a,t,c or g
ctgcacgaccatcgggataccgacccgtcccgcccctcccagccctcagaccccggggtcctggagcttcctctgtttcaagtggagcacgaaggagagtggacctgccacgctcggcacccactgggctcccagcacgtctctctcagcctctccgtgcactgtgagtgggggaaaggggacacctgggtcccaggaaggggaccctgctgagtcctgtcctccctcccctcagactccccgaagctgctgggcccctcctgctcctgggaggctgagggtctgcattgcagttgctcctcccaggccagcccggccccctctctgcgctggtggcttggggaggagctgctggaggggaacagcagccaggactcctttgaggtcacccccagctcagccgggccctgggccaacagctccctgagcctccatggagggctcagctccggcctcangctccgctgtgaggcctggaacgtccatggngccca

SEQ ID NO: 7434 - DNA, 888 bp, Homo sapiens
  SIMILAR (1)..(294): 781254mologous to Cloning vector pZC320 SopA,accession number U26464,Smith-Waterman Score=377.
atggaaattcgaggacgggttgagcaacgtgttggttatacaattgaacaaattaatcatatgcgtgatgtgtttggtacgcgattgcgacgtgctgaagacgtatttccaccggtgatcggggttgctgcccataaaggtggcgtttacaaaacctcagtttctgttcatcttgctcaggatctggctctgaaggggctacgtgttttgctcgtggaagcccagggaacagagttcccagagcccactcgcctgttcagcggcctgcttaaccctgaggacacagtcttgcctgggcactgcagggcagaccgacgatacgagtgggaccatggtgcagtactaataatcagaccgacgatacgagtgggaccgtggtccagtctgattatcagaccgacgatacgagtgggaccgtggtcagaaactaataatcagaccgacgatacgagtgggaccgtggtccagactaataatcagaccgacgatacgagtgggaccgtggtccagtctgattatcagaccgacgatacgagtgggaacgtgatgccaaaggaagagtttcccccaagtccagagtgctggaggcagcatccgagcaagccaaactcagtcccgtactgctacttcaagaaacctgagatctacacgcactggcacgacctgtatgatcagcgagaggaaagggaggctgagaagatgttgaggaaaatgagagatgactgtaggtacatcaacgaggttaatcaaacccgcattcaaatggttcatcttccaatgaggaagctggctataaaaactgagatgcggtccagggccttagagccttatcaggaactccctgaagtggccaagattagaggtcaggacatgtgggaaaggaagtag

SEQ ID NO: 7435 - DNA, 1290 bp, Homo sapiens
  SIMILAR (1)..(729): 1001254mologous to Escherichia coli IS5 39.3kDa protein,accession number U70214,Smith-Waterman Score=1249.
atggaagatgctctgtacgaaatcgcctccatgcgtctgtttgcccggttatccctggatagcgccttgccggaccgcaccaccatcatgaatttccgccacctgctggagcagcatcaactggcccgccaattgttcaagaccatcaatcgctggctggccgaagcaggcgtcatgatgactcaaggcaccttggtcgatgccaccatcattgaggcacccagctcgaccaagaacaaagagcagcaacgcgatccggagatgcatcagaccaagaaaggcaatcagtggcactttggcatgaaggcccacattggtgtcgatgccaagagtggcctgacccacagcctggtcaccaccgcggccaacgagcatgacctcaatcagctgggtaatctgctgcatggagaggagcaatttgtctcagccgatgccggctaccaaggggcgccacagcgcgaggagctggccgaggtggatgtggactggctgatcgccgagcgccccggcaaggtaagaaccttgaaacagcatccacgcaagaacaaaacggccatcaacatcgaatacatgaaagccagcatccgggccagggtggagcacccatttcgcatcatcaagcgacagttcggcttcgtgaaagccagatacaaggggttgctgaaaaacgataaccaactggcgatgttattcacgctggccaacctgtttcgggcggaccaaatgatactttgtccagtctttgtccaccacataccacggttcttcggtaccttctttggtgccaccgatacccagacctttacgctgaccgagagtgtgatacatcagcccctggtgctcaccaatttcatcgccatcgacggtaatgattttgcccggttgcgccgggagataacggcccaggaactcgcggaatttacgttcgccaatgaagcaaatgccgaccaagatcttcagcaatcttacgcactgcggtttttccagttcgccgaccgggaacaggctttgcgcaatctgctcatggctgagcgtataaaggaagtagctctggtctttattgctgtccagaccacgcagcaggcggctcttgccatcgacatcggcccgacgtacgtaatgaccggtagcgatataatcggcacctacaaagaggggttctacacggattgggttaaaatgatacctggtcacacgtttttatctgaaggaagaatatttcaaggtgatataccctacaagcccttgacgcggaggaatgaatgtgatgggagtgatgtatctgaatag

SEQ ID NO: 7436 - DNA, 1452 bp, Homo sapiens
  SIMILAR (1408)..(1349): 901254mologous to Escherichia coli Hypothetical protein in purB 5'region (orf-15) ,accession number D90748,Smith-Waterman Score=89.
atggtggtcgaaaacggctgctataccctgaaagacacttttgatgacaccaccattctgggctggatgatccagacggaagatactgaatacagcttaccgcagccggaaattgcaggcgagctgctgaaaatcagcggagcgcgcctggaaaacaaaggccagtttgacggtaaatggctggatgaaaaagatccgctgcaaaacgcctatgtgcaggccaacggtcaggtgatcaatcaggatccttatcattactacaccattaccgagagtgccgagcaggagctaattaaagccaccaacgagctgcacctgatgtatcttcacgcaaccgacaaggtgctgaaagatgacaacctgctggcgctgttcgacatcccgaaaatcctctggccacgtttgcgtctctcctggcagcgtcgccgtcaccatatgatcactggtcgtatggatttctgcatggatgagcgtggcctgaaggtttacgagtacaacgccgactccgcctcctgtcataccgaagcgggcttgatcctcgaacgttgggcggagcagggctataaaggcaacggcttcaatccggcggaagggctgattaacgaattggctgcgggtttttaccgtgcaacgcatagtgccggtgaatggttcgcgatcgacccagtgcaactgctgggcaatcaacccgacagacatcagccgcgggtgttcatggccctgagcgacaaccagaatgttgttttcgacgtcttggtccacaacataccccggttcttcggaaccttctttggtcccaccgatacccagacctgtacgctgaccgagagtgtgatacatcagcacatggtgctcaccaatttcatcgccatcgacggtaatgattttgcccggttgcgccgggagataacggcccaggaactcgcggaatttacgttcgccaatgaagcaaatgccggtagagtctttattcttcgcggtgaccagaccaagatcttcagcaatcttacgcacctgcggtttttccagttcgccgaccgggaacaggctttgcgcaatctgctcatggctgagcgtataaaggaagtagctctggtctttattgctgtccagaccacgcagcaggcggctcttgccatcgacatcggcccgacgtacgtaatgaccggtagcgatataatcggcacctaaatcttcggcggcaaattcgaggaaggctttaaatttgatctctttgttgcacagaatatccggattcggcgtgcgaccggctttatattcggcaaggaacagttcgaagacgttgtcccagtactcggcagcaaagttaacggtgtgcagttcaatgaccgagcttgtcgcagacagcctgggcatcagccagatccgctgccgctgcccaatattcggggatcctctagaatcgacataagcatggaccttcgcctgcat

SEQ ID NO: 7437 - DNA, 1442 bp, Homo sapiens
  SIMILAR (7)..(666): 991254mologous to Escherichia coli K12 sialic acid transporter,accession number AE000401,Smith-Waterman Score=1137.
  misc_feature (1)...(1442): n = a,t,c or g
atggcgaatatcccgtggtatcgccatctcaccggtgcacaatggcgcgcattttccgctgcctggttgggatatctgcttgacggttttgatttcgttttaatcgccctggtactcaccgaagtacaaggtgaattcgggctgacgacggtgcaggcggcaagtctgatctctgcagcctttatctctcgctggttcggcggcctgatgctcggcgctatgggtgaccgctacgggcgtcgtctggcaatggtcaccagcatcgttctcttctcggccgggacgctggcctgcggctttgcgccaggctacatcaccatgtttatcgctcgtctggtcatcggcatggggatggcgggtgaatacggttccagcgccacctatgtcattgaaagctggccaaaacatctgcgtaacaaagccagtggttttttgatttcaggcttctctgtgggggccgtcgttgccgctcaggtctatagcctggtggttccggtctggggctggcgtgcgctgttctttatcggcattttgccaatcatctttgctctctggctgcgtaaaaacatcccggaagcggaagactggaaagagaaacacgcaggtaaagcaccagtacgcacaatggtggatattctctaccgtggtgaacatcgcatagccaatcagcttggcccaatggggggaaaaccccttttttttttaaaaatcccaaaaaatggcctagtgggggaagtctgggaccacggtccccactcgtatcgtcggtctgattattagtctgggaccacgtgtcccactcgtatcgtcggtttgataatcagactgggaccacggtcccactcgtatcgtcggtacagggtaagctgcctgcgggagtcagcgccgagctggggccagatgccacgggtgttggctggatctatgaatatgcactggtggatcgcagcggtaagcacgatctggccgatttacgctcattacaggactggtttctcaaatatgagctgaaaaccatccctgacgttgcgnaagtggcgtcggtgggcggtgtggtgaaagagtatcaggtggttatcgatccccagcgcctggcgcagtatggcatcagtctcgccgaagtaaaaagcgcgctggatgcttcaaaccaggaagcgggcggttcgtcgatcgaactggcggaagcggaatatatggtgcgcgccagcggctatctgcaaacgctcgacgactttaatcacatcgttttaaaagccagtgaaaatggcgtgcccgtttatctgcgcgatgttgcgaaggtccagattggcccggagatgcgccggggcattgccgaactaaacggcgaaggcgaagtggcgggcggggtggtgatcctgcgatccggcaaaaacgcccgagaagtgatcgccgccgtgaaggacaaactggaacaatattaa

SEQ ID NO: 7438 - DNA, 960 bp, Homo sapiens
  SIMILAR (138)..(953): 301254mologous to Homo sapiens zinc finger protein 10,accession number X52332,Smith-Waterman Score=263.
tttcgtgttgaatctcccgctcccttgaggctggggttgcgtctgttgacgcggccgactacaatcccgagccctgccagccgggaacacggaggggaaggaggaggagcttaaaagaggctactgaaccccagttggccatggctgaggaatttgtgaccctcaaggatgtcggcatggacttcaccttgggagactgggagcagctcgggctggaacagggggacacgttctgggacacagcgttggacaattgccaggacctcttcctgctggaccccccaagacccaacctgacctcccacccagatggcagtgaagatctggagcctctggcaggaggaagcccagaagcaacaagccctgatgtgactgagaccaagaactctcctctgatggaggatttcttcgaagaaggattctcccaggagattatagagatgttatccaaggatggcttctggaactccaatttcggagaagcctgtatagaggacacctggttagatagtttgctaggcgatccagaaagtcttctgaggtctgatattgccaccaacggggaaagtcccacggaatgcaagagtcatgaattaaagagaggactcagtcctgtgtccaccgtttccacgggagaagattccatggtgcataatgtttctgaaaagaccctcacaccagctaagtctaaggaatataggggtgagtttttctcctactccgaccacagccagcaggattctgttcaggaaggggagaaaccatatcaatgtagtgaatgtgggaaaagcttcagtgggagttaccgtcttacccagcactggatcactcatactagggagaaacccactgtccatcaagagtgtgagcaaggttttgaccggaatgcttccctttctgtgtatccgaaaactcacacgggctacaaattctatgtgtgtaatgaatatgggacaactt

SEQ ID NO: 7439 - DNA, 1809 bp, Homo sapiens
  SIMILAR (112)..(393): 1001254mologous to Homo sapiens KIAA1141 protein,accession number AB032967,Smith-Waterman Score=494.
atgctaacgagtggctcgggatctgcatcgcggcaggaatgctcgcggcatgtacaagcgatgatggtcagcaacagacgtgaacaggagacatttgcacttgctctttcagatgtgactgagaccaagaactctcctctgatggaggatttcttcgaagaaggattctcccaggagattatagagatgttatccaaggatggcttctggaactccaatttcggagaagcctgtatagaggacacctggttagatagtttgctaggcgatccagaaagtcttctgaggtctgatattgccaccaacggggaaagtcccacggaatgcaagagtcatgaattaaagagaggactcagtcctgtgtccaccgtttccacgggagaagattccatgaaatctgtgatggttttacacggcttcgtgttaaatagaatttccccagatgctgactgccctccaataaagatgcctccaggatgcagcaagtgcctaaccagatttaggtgccgattatatcgctaccggtcattacgtacgtcgggccgatgtcgatggcaagagccgcccctgctgcgtgggtctgggacagccattaaagacaagagctacttcctttatacgctcagccatgagcagattgcgcaaagcctgttcccggtcggcgaactggaaaaaccgcagtgcgtaagattgctgaagatcttggtctggtcaccgcgaagaaaaaagactctaccggcatttgcttcattggcgaacgtaaattccgcgagttcctgggccgttatctcccggcgcaaccgggcaaaatcattaccgtcgatggcgatgaaattgactaataatcagaccgacgatacgagtgggaccgtggtcatgactaataatcagaccgacgatacgagtgggaccatggtcacgactaataatcagaccgacgatacgagtgggaccgtggtcatgtctgattatcataccgacgatacgagtgggaccgtggtcaggactaatactcagaccgacgatacgagtgggaccgtggtcagcactaataatcaggccgacgatacgagtgggaccgtggtcagccattgtaagagacatatatctttggttttctctgaagatatgccgctctgtggatgtctctctaatcgtgcaactacaccaggagatatgcacgacactagtcagctgaagcatgattcgtctacagacatcattgtaacgaatcccaggtatgtcgcagaactaatcgttgctgcgacgagtatgacgttggttctggttgcaatgaaaacgtctacgtcgctcatgcatgcagatggaaatggtggcaatcgtgagaaatatcaggatcatagtactacagggatgatgtgggccagcccggccccctctctgcgctggtggcttggggaggagctgctggaggggaacagcagtcagggctccttcgaggtcacccccagctcagccgggccctgggccaacagctccctgagcctccatggagggctcagctccggcctcaggctccgctgtaaggcctggaacgtccacggggcccagagtggctctgtcttccagctgctaccagtcgacaacaactcatcagaaaagcgagggatgaataacaccgagccaagacacgcaccttctgacctggagatggtcgcagaaataatggcgaaagctgacagcacagaactagacgtaggggagacaccagacatagagcacggacaatgcatgccgctacagacggtgcacagagcacaatcatgggcgtaccaggcgcgcgaatga

SEQ ID NO: 7440 - DNA, 2601 bp, Homo sapiens
  SIMILAR (2601)..(1990): 851254mologous to unidentified cloning vector 29kD protein essential for the replication of mini F plasmid,accession number AB015619,Smith-Waterman Score=881.
  misc_feature (1)...(2601): n = a,t,c or g
atggacgatatcccgcaagaggcccggcagtaccggcataaccaagcctatgcctacagcatccagggtgacggtgccgaggatgacgatgagcgcattgttagatttcatacacgggtcaccgtcgacagcgacacacttgcatcggatgcagcccggttaacgtgccggcacgctcggagtaaccagtgcggatgttcgactccaaacatcaaagccaacgagaggttcaggttactcctccttgaccccaaacatccagtgagtggagactggcctgttcacagagtaaaatatgtcgtctctaattcggcaaagacggtgatgactgtatatatgcaggccaattccgtaagtaaagtttcatgtaaaactaattaccggatattccaaccaccccctgtgcaggccagccgcatgcacaagggacaggatttattccccactggaagcaactggaaaactggaaaaaaatatacaaaacagcagttctcaagacattgtgtgccggcaacaaaggacagtgatgctggagagatgagaaataagcaagtctgggaccacggtcccactcgtatcgtcggtctgattattagtctgggaccacggtcccactcgtatcgtcggtctgataatcagactgggaccacggtcccactcgtatcgtcggtctgaccgggcagatagttcaccggggtgagaaaaaagagcaacaactgatttaggcaatttggcggtgttgatacagcgggtaataatcttacgtgaaatattttccgcatcagccagcgcagaaatatttccagcaaattcattctgcaatcggcttgcataacgctgaccacgttcataagcacttgttgggcgataatcgttacccaatctggataatgcagccatctgctcatcatccagctcgccaaccagaacacgataatcactttcggtaagtgcagcagctttacgacggcgactcccatcggcaatttctatgacaccagatactcttcgaccgaacgccggtgtctgcaggaagcggcggcggaagtcaggcatacgctggtaactttgaggcagctggtaacgctctatgatccagtcgattttcagagagacgatgcctgagccatccggcttacgatactgacacagggattcgtataaacgcatggcatacggattggtgatgtttttctnctggttacccaggccgtgccggcacgttaaccgggctgcatccgatgcaagtgtgtcgctgtcgacggtgaccctatatcgaggagggggtttctnntgaatcgccagcggcatcagcaccttgtcgccttgcgtataatatttgcccatggtgaaaacgggggcgaagaagttgtccatattggccacgtttaaatcaaaactggtgaaactcacccagggattggctgagacgaaaaacatattctcaataaacccgtctttcattgccatacggaactccggatgagcattcatcaggcgggcaagaatgtgaataaaggccggataaaacttgtgcttatttttctttacggtctttaaaaaggccgtaatatccagctgaacggtctggttataggtacattgagcaactgactgaaatgcctcaaaatgttgtgaaatattttccgcatcagccagcgcagaaatatttccagcaaattcattctgcaatcggcttgcataacgctgaccacgttcataagcacttgttgggcgataatcgttacccaatctggataatgcagccatctgctcatcatccagctcgccaaccagaacacgataatcactttcggtaagtacagcagtggcttccgcagaggtcaatccgaatatttcagcatatttagcaacatggatctcgcagataccgtcatgttcctgtagggtgccatcagattttctgatctggtcaacgaacagatacagcatacgtttttgatcccgggagagactatatgccgcctcagtgaggtcgtttgactggacgattcgcgggctatttttacgtttcttgtgattgataaccgctgtttccgccatgacagatccatgtgaagtgtgacaagtttttagattgtcacactgcaggaagcggcggcggaagtcaggcatacgctggtaactttgaggcagctggtaacgctctatgatccagtcgattttcagagagacgatgcctgagccatccggcttacgatactgacacagggattcgtataaacgcatggcatacggattggtgatttcttttgtttcactaagccgaaactgcgtaaaccggttctgtaacccgataaagaagggaatgagatatgggttgatatgtacactgtaaagccctctggatggactgtgcgcacgtttgataaaccaaggaaaagattcatagcctttttcatcgccggcatcctcttcagggcgataaaaaaccacttccttccccgcgaaactcttcaatgcctgccgtatatccttactggcttccgcagaggtcaatccgaatatttcagcatatttagcaacatggatctcgcagataccgtcatgttcctgtagggtgccatcagattttctgat

SEQ ID NO: 7441 - DNA, 2118 bp, Homo sapiens
  SIMILAR (1)..(600): 991254mologous to Cloning vector pSacBII SacB,accession number U09128,Smith-Waterman Score=1065.
atgctgcagatccctaaacagcagcaaaacgaaaaataccaagtgcctcaattcgatcaatcaacgattaaaaatattgagtctgcaaaaggacttgatgtgtgggacagctggccgctgcaaaacgctgacggaacagtagctgaatacaacggctatcacgttgtgtttgctcttgcgggaagcccgaaagacgctgatgacacatcaatctacatgttttatcaaaaggtcggcgacaactcaatcgacagctggaaaaacgcgggccgtgtctttaaagacagcgataagttcgacgccaacgatccgatcctgaaagatcagacgcaagaatggtccggttctgcaacctttacatctgacggaaaaatccgtttattctacactgactattccggtaaacattacggcaaacaaagcctgacaacagcgcaggtaaatgtgtcaaaatctgatgacacactcaaaatcaacggagtggaagatcacaaaacgatttttgacggagaacggaaaacatatcagaacgttcagcagtttatcgatgaaggcaattatacatccggcgacaaccatacgctgagagaccctcactaccaaaatacgtacatcaggctcgaaccctttaagatcaacgttcttgagcagatcacgaagcatatcgaaaaactgcagtgcggaggtgtagtcaaacaactcagcaggcgtgggaacaatcagcacatcagcagcacatacgacattaatcgtgccgatacccaggttaggcgcgctgtcaataactatgacatcatagtcatgagcaacagtttcaatggccagtcggagcatcaggtgtggatcgatagaaaggcaggagagtgtcttctgcatgaatatgaagatctggtacccatccgtgatacattgaggctgttccctgggggtcgttaccttccacgagcaaaacacgtagccccttcagagccagatcctgagcaagatgaacagaaactgagctgctgcacttaccgaaagcgatatcgtgttctggttggcgagctgggtgatgagcagatggctgcattatccagattgggtaacgattatcgcccaacaagtgcttatgaacgtggtcagcgttatgcaagcctattgcagaatgaatttgctggaaatatttctgcgctggctgatgcggaaaatatttcacgtaagattattacccgctgtatcaacaccgccaaattgcctaaatcagttgttgctcttttttctcaccccggtgaactatctgcccggtcaggtgatgcacttcaaaaagcctttacagataaagaggaattacttaagcagcaggcatctaaccttcatgagcagaaaaaagctggggtgatatttgaagctgaagaagttatcactcttttaacttctgtgcttaaaacgtcatctgcatcaagaactagtttaagctcacgacatcagtttgctcctggagcgacagtattgtataagggcgataaaatggtgcttaacctggacagactaataatcagaccgacgatacgagtgggaccgtggtcccagactaataatcagaccgacgatacgagtgggaccatggtcccagtactaataatcagaccgacgatacgagtgggaccgtggtcccaagtctgattatcagaccgacgatacgagtgggaccgtggtcccagactaataatcagaccgacgatacgagtgggaccgtggtcccagactaataatcagaccgacgatacgagtgggaccgtgggcccaggctgattattacaccggccatttccagtggaacaggggggcccagaaatgatatttctggccagttatgctttctggcctgtaacaaaggacattaagtaaagacagataaacgtagactaaaacgtggtcgcatcagggtgctggcttttcaagttccttaagaatggcctcaattttctctatacactcagttggaacacgagacctgtccaggttaagcaccattttatcgcccttatacaatactgtcgctccaggagcaaactgatgtcgtgagcttaaactagttcttgatgcagatgacgttttaagcacagaagttaaaagagt

SEQ ID NO: 7442 - DNA, 5048 bp, Homo sapiens
  SIMILAR (1)..(882): 961254mologous to Cloning vector pSacBII SacB,accession number U09128,Smith-Waterman Score=1505.
  misc_feature (1)...(5048): n = a,t,c or g
atgagttcgccaaaaggacttgatgtgtggaacagctggccgctgcaaaacgctgccggaccagtagctgaatacaagggctatcacgttgtgtttgctcttgcggaaagcccgaaagacgctgatgacacatcatcctacatgttttatcaaaaggtcggcgacaactcaatcgacagctggaaaaacgcgggccgtgtctttaaagacagcgataagttcgacgccaacgatccgatcctgaaagatcagacgcaagaatggtccggttctgcaacctttacatctgacggaaaaatccgtttattctacactgactattccggtaaacattacggcaaacaaagcctgacaacagcgcaggtaaatgtgtcaaaatctgatgacacactcaaaatcaacggagtggaagatcacaaaacgatttttgacggagacggaaaaacatatcagaacgttcagcagtttatcgatgaaggcaattatacatccggcgacaaccatacgctgagagaccctcactacgttgaagacaaaggccataaataccttgtattcgaagccaacacgggaacagaaaacggataccaaggcgaagaatctttatttaacaaagcgtactacggcggcggcacgaacttcttccgtaaagaaagccagaagcttcagcagagcgctaaaaaacgcgatgctgagttagcgaacggcgccctcggtatcatagagttaaataatgattacacattgaaaaaagtaatgaagccgctgatcacttcaaacacggtaactgatgaaatcgagcgcgcgaatgttttcaaaatgaacggcaaatggtacttgttcactgattcacgcggttcaaaaatgacgatcgatgatttgtggaagtttgaacttgagaatgatgatttagagtatctagtggaagaaaattctaaacagaaaaccattcaagatgtgatctggctgtttttaactgcctacactcatatacgaggagcgactcaagccttcgcgaaagaaaataaccaaaaagcatacaaagaaacgtacggcgtctctcatattacacgccatgatatgctgcagatccctaaacagcagcaaaacgaaaaataccaagtgcctcaattcgatcaatcaacgattaaaaatattgagtctgcaaaaggacttgatgtgtgggacagctggccgctgcaaaacgctgacggaacagtagctgaatacaacggctatcacgttgtgtttgctcttgcgggaagcccgaaagacgctgatgacacatcaatctacatgttttatcaaaaggtcggcgacaactcaatcgacagctggaaaaacgcgggccgtgtctttaaagacagcgataagttcgacgccaacgatccgatcctgaaagatcagacgcaagaatggtccggttctgcaacctttacatctgacggaaaaatccgtttattctacactgactattccggtaaacattacggcaaacaaagcctgacaacagcgcaggtaaatgtgtcaaaatctgatgacacactcaaaatcaacggagtggaagatcacaaaacgatttttgacggagacggaaaaacatatcagaacgttcagcagtttatcgatgaaggcaattatacacccggcgacaaccatacgctgagagaccctcactacgtgaagacaaaggccatgaggggatctnctacagtagacctggatgcatgcacgaaaggcgttctgacttttacgactgcacttctggcaggaggagcgaatcaagccttcgcgaaagaaaataccaaaaaagcatacaaagaaacgtacggcgtctctcatattacacgccatgatatgctgcagatcctnaaacagcagcaaaacgaaaaataccaagtgcctcaattcgatcaatcaacgattaaaaatattgagtctgcaaaaggacttgatgtgtgggacagctggccgctgcaaaacgctgacggaacagtagctgaatacaacggctatcacgttgtgtttgctcttgcgggaagcccgaaagacgctgatgacacatcaatctacatgttttatcaaaaggtcggcgacaactcaatcgacagctggaaaaacgcgggccgtgtctttaaagacagcgataagttcgacgccaacgatccgatcctgaaagatcagacgcaagaatggtccggttctgcaacctttacatctgacggaaaaatccgtttattctacactgactattccggtaaacattacggcaaacaaagcctgacaacagcgcaggtaaatgtgtcaaaatctgatgacacactcaaaatcaacggagtggaagatcacaaaacgatttttgacggagacggaaaaacatatcagaacgttcagcagtttatcgatgaaggcaattatacatccggcgacaaccatacgctgagagaccctcactacgttaagacaaaggccatgatctgggaccacggtcccactcgtatcgtcggtctgattattagtctgggaccacggtcccactcgtatcgtcggtctgataatcagactgggaccacggtcccactcgtatcgtcgtatcgtagccgggatggctcaggcatcgtctctctgaaaatcgactggatcatagagcgttaccagctgcttcaaagttaccagcgtatgcctgactcccgccgccgcttcctgcaggtctgtgttaatgagatcaacagcagaactccaatgcgcctctcatacattgagaaaaagaaaggccgccagacgactcatatcgtatattcgatcagcgatagcacgcaattctggctgtctgctggtgtgagcaaagtgactcaggactgtagtctcaagagagccacaggtgtggccatcaggaaaaaagcatatagaagtcaaaggatggccacagacacagccagaatccaagggaatctggactcagaccacctgcacccaggtgaaataaacagctttattgctcacacaaagcctgtttggtgctctcttcacatggacatgcatgagatttggtgccgtgactcggatcaggagacctcccttgggagatcaatcccctgtcctgctgctctttgctccgtgagaaagatccacgtacaacctcaggtcctcagaccaaccagcccaagaaacatctcaccaatttcaaatctgcctgacctcgtatctctgtgccctgacccctttccagcttttctggagggcctctctttgctgtcacctggactgaccctgacacccaacagtcccagcagcttacctgggctgtgctgccgcaaggtttcaggggacagccctcattacttcagccaagctctttctcatgatctactttctttccacccctctgcttctcaccttattcaatatattgatgaccttcttctttgtagcccctcctttgaatcttctcaacaagacacacttctgcttcttcagcagttattctctaaaggatttcaggtgtcctcctccaaagaccgacgatacgagtgggaccgtggccgaactaataatcagaccgacgatacgagtgggaccatggtcagaactaataatcagaccgacgatacgagtgggaccgtggtcccagtctgattatcagaccgacgatacgagtgggaccgtggtcccagactaataatcagaccgacgatacgagtgggaccgtggtcccagaccctttccaccggtgatcggggttgttttccataaaggtggcgtttacaaaacctcagtttctgttcatcttgctcaggatctggctctgaaggggctacgtgttttgctcgtggaaggtaacgacccccagggaacagcctcaatgtatcacggatgggtaccagatcttcatattcatgcagaagacactctcctgcctttctatcgatccacacctgatgctccgactggccattgaaactgttgctcatgactatgatgtcatagttattgacagcgcgcctaacctgggtatcggcacgattaatgtcgtatgtgctgctgatgtgctgattgttcccacgcctgctgagttgtttgactacacctccgcactgcagtttttcgatatgcttcgtgatctgctcaagaacgttgatcttaaagggttcgagcctgatgtacgtattttgcttaccaaatacagcaatagtaatggctctcaatccccgtggatggaagagcaaatatcggatgccctccgcatcagccagcgcagaaatatttccagcaaattcattctgcaatccgcttgcataacgctgaccacgttcataagcacttgttgggcgataatcgttacccaatctggataatgcagccatctgctcatcatccagctcgccaaccagaacacgataatcactttcggtaagtgcagcagctttacgacggcgactcccatcggcaatttctatgacaccagatactcttcgaccgaacgccggtgtctgttgaccagtcagtagaaaagaagggatgagatcatccagtgcgtcctcagtaagcagctcctggtcacgttcattacctgaccatacccgagaggtcttctcaacactatcaccccggagcacttcaagagtaaacttcacatcccgaccacatacaggcaaagtaatggcattaccgcgagccattactcctacgcgcgcaattaacgaatccaccatcggggcagctggtgtcgataacgaagtatcgacgatgcgagtgggaccgagggcccagtactgattatcagaccgaccatacgagtgggaccgtggtcccagactaataatcataccgtctatacgagtgggaccgtgtgtcccagactggttacccaggccgtgccggcacgttaaccgggctgcatccgatgcaagtgtgtcgctgtcgacggtgacccgtgtatgaaatctaacaatgcgctcatcgtcatcctcggcaccgtcaccctggatgctgtaggcataggcttggttatgccggtactgccgggcctcttgcgggatatcgtccat

SEQ ID NO: 7443 - DNA, 669 bp, Homo sapiens
  SIMILAR (1)..(573): 761254mologous to Escherichia coli quinolinate phosphoribosyltransferase,accession number L28105,Smith-Waterman Score=685.
atgccgcctcgccgttataaccttgacacccgacgtgacgagttgctggaacgcattaatctcgatatccccggcccggtggcccaggcgctgcgggaagatttaggcggaacagtcgatgccaacaatgatattacggcaaaacttttaccggaaaattctcgctctcatgccacggtgatcacccgcgagaatggcgtcttttgcggcaaacgatgggttgaagaggtgtttattcaactggcaggcgacgatgtcaccataatatggcatgtggatgacggcgatgtcatcaatgccaatcaatccttgttcgaacttgaaggcccatcccgcgtgctgttaacgggcgaacgcactgcgcttaattttgtgcaaaccctttcaggagttgccagtaagatgtgctggtgccgtaagcataacggtcactggacggtagaactctacagtgacagcattccgcgtctgcaaatcaaccagcactacgcctcgatgtgcaataacgcgcgcaacgatggtgacagccagtttatccgcagcaatctgcaggatgccaaatggttgatcaagagtctggaaagccgtaacgatacgctactgcgcgtgagtcgctgtatcgttgaacagcagcaagccttctttgagcaaggctgtcgaaatgcatga

SEQ ID NO: 7444 - DNA, 744 bp, Homo sapiens
  SIMILAR (169)..(603): 981254mologous to Escherichia coli arginine decarboxylase,accession number M93362,Smith-Waterman Score=757.
  misc_feature (1)...(744): n = a,t,c or g
atggagccgcaaacaaaaaagttgccggtcttacctgttgggcgaatccagaaaaaagccttcgccgcaatggatcgcgacctgctggagcttgtcgatgaattcgcctggattctggaagataccgccgactttatcgccggacgcgccgtgcccgcgatgaccccgccaggccaccagggcggcgttggttttaccaaaacacccgccggacgtttctaccatgactactatggtgaaaatctgttccgcaccgacatgggcatcgaacgaacttccctcggttctttgcttgaccatactggcgcatttggcgaaagcgaaaaatatgccgcacgcgtatttggtgccgatcgctcctggtcggtagtcgtcggtacttccggctctaaccgcaccatcatgcaggcttgcatgaccgataacgatgtcgtggtcgttgaccgtaactgccataaatccatcgaacaaggtttgatgctgacaggcgcgaaaccggtctatatggtgccaagccgcaaccgctacggcattatcgggccaatctatccgcaggaaatgcaacctgaaaccttgcagaagaaaatcagtgaaagacgcctccaaaccgagaacaggactgaagaatcgcgcggagaacgggccaaccaaacgggccgacattggccgcccaaaaaggccgtctggcaaggtctcggcgagggaacgccagaaacggttataccgacatcgaacccggcntgg

SEQ ID NO: 7445 - DNA, 727 bp, Homo sapiens
  SIMILAR (1)..(477): 841254mologous to Escherichia coli arginine decarboxylase,accession number M93362,Smith-Waterman Score=638.
atgaaagtattaattgttgaaagcgagtttctccatcaagacacctgggtcggtaacgccgttgagcgtctggcagatgctttaagccagcaaaatgttaccgtgattaaatccacctcctttgatgatggttttgccattctctcttcaaacgaagccattgactgcctgatgttcagctatcaaatggaacatccggacgaacatcaaaacgtcagacaattgatcggtaagcttcatgagcgccaactaaacgtgccggtcttcctgttgggcgatcgggaaaaagccctcgccgcaatggatcgcgacctgctggagcttgtcgatgaattcgcctggattctggaagataccgccgacttttatcgccggaccgcgccggttgcccgcgaatgaacccgctacccgccaggcagctgttggccgccactgttcaagcgccgctgatgaaatatagtgaacatccatgaatatttcctgggcagcgccaggccaccagggcggcgttggttttaccaaaacacccgccggacgtttctaccatgactactatggtgaaaatctgttccgcaccgacatgggcatcgaacgaacttccactgcggtttctttgcttgaccattctggcgcatttggccaaagcgaaaaatatgccgcacgcgtatttggtgccgatcgctcctggtcggtagtcgtcggtacttccggctctaaccgcaccatc

SEQ ID NO: 7446 - DNA, 747 bp, Homo sapiens
  SIMILAR (535)..(627): 741254mologous to Escherichia coli DNA-damage-inducible protein,accession number L02362,Smith-Waterman Score=118.
atgcagatgcagactcacactccaccatctacaattagccgatttgctgactcgcaccgagagctgcagctgagtcaatccagcatccacatcacaacagagcagagtaccatcaaacggattcatacccaccaagcacattccagtggtgcatcaccactagccagaagcaacagcaaccattgtagcagccaacacaggacccaaccaacaccgggccacaaggacaacccggtaccacacacggggccgacgataacgcctaggccggatatacaacccaataaaggcatacagaagccaacccatggcacagacagcacaatacagagaccacaccgccagccatccaagtaccagaaggaggggaaaacgaacaacgcaaacctccaaaaaacacgcatgaacggatctcacaccaacacaaccaagacaacacgcaccaagacggcgcaaggtccacaaaccccaaagaaacgccaaaacgacaaaccaaaacagacaacacatgcttgccaatcctctatagggtttctagctattgtgctcgcccaacacgttaacattgtgctggatgtctggctggtgatggggctgcatatgaacgtgcagggcgcggcgctggcaaatgagatgcaacgtcaagtagccggatccacagaaaggtatggtgaaccaccctatgcctgccagctcttatctcaggtggacatggactgcaggtccacatgcgacccatcggcctga

SEQ ID NO: 7447 - DNA, 250 bp, Homo sapiens
  SIMILAR (1)..(162): 941254mologous to Homo sapiens laminin-binding protein,accession number J03799,Smith-Waterman Score=274.
atgcctgatctctacttctacagagatcctgaagagattgaaaaagaagagcaggctgctgctgaaaaggctgtgaccaaggaggaatttcagggtgagtggactgctctagctcctgagttcactgctactcagcctgagattgcagactggtttgaaggaaaaacaagagtagcaggtattagcgcaggccgaaataagctaatagaccttgcttgtcatggagagcacccaacactctttgaattag

SEQ ID NO: 7448 - DNA, 850 bp, Homo sapiens
  SIMILAR (1)..(660): 861254mologous to Gallus gallus 37kD Laminin receptor precursor /p40 ribosomal associated protein,accession number X94368,Smith-Waterman Score=976.
atgaaggaggaagatgtccttaatttccttgcagcaggaaaccaattaggtggcaccaaccttgacttacagatggaacagtacatgtataaaaggaaaagtgatggcatctacatcccaaatctgaagaggacctgggagaagcttctgctggcagctcgtggcattgttgccattgaaaaccccgctgatgtcagtgtcataccctccagaaatactggccagagggccgtgctgaagtttgctgctgccactggagccactccaatcgctggccgcttcactcctggaaccttcactaaccagatccaggcagccttccgggagccacggcttcttgtgtttactgaccccagggctgatcagcagcctctcacagaggcatcttatgttaacctacctaccttgctctattctcctctgcgccatgtggacattgccatcccaagcaacaacaagggagctcactcagtgggtctgatgtggtggatgctggctcgggaagttctgcgcatgcgtggcaccatttcctgtgaacacccgtgggaggtcatgcctgatctctacttctacagagatcatgaagacattgaaaaagaagagcaggctgctgctgaaaaggctgtgacaaggaggaatttcaggctagttaaaactgcaaagttgggcacctcctggaactacctctttgacttccaccctcacagggtcctggtcgtgggagccttcgccaacttctgcacagagcccacgggctgctcctgcctcttccccaaactcccgccacacctgctcatgctgccttgttggttccatctcctcttcttccaggactacatcatgtcaggtg

SEQ ID NO: 7449 - DNA, 1275 bp, Homo sapiens
  SIMILAR (145)..(732): 481254mologous to Homo sapiens laminin-binding protein,accession number J03799,Smith-Waterman Score=328.
gggaatctggctgcaggaaaaaccatccaagcgcaagacagagatgctgtgggcatcctcagttccagaactggggaatccatggaaaacctgcagaaaaacttgctgcccaagcagaggaggcgaacgagggaaactttcacaatgtccggagcccttgatgtcctgcaaattaaggaggaggatgtccttaagttccttgcagcaggaacccacttaggtggcaccaatcttgacttccagatggaacagtacatctataaaaggaaaagtgatggcatctatatcataaatctcaagaggacctgggaggagcttcgtccgccagcctcgtgcaaatggtgcccattgaaaaccctgctgatggtcagtgttatatcctccagggaatactggccaggtttgtggaacagtgagggctgttgttgaggtttcttgctgccactggagccactccaattggcggcccgcttcactcctggaacctttcactaacccagatccaggccagccttcccgggagcccacgggctttcttgtgggttacctgacccccaggggctgaaccaccagccctctcacggagtgcatctttatgttaacccttcttaccattggcgctggttaacccggatttccccttcggcgctatgtgatcattgccatcccatgcaacaacaagggagctcacctcagtgggtttgatgtggtggaatgctggctcgggaagtttctgcgcatgcgtggcaccatttcccgtgaacacccatggggaggtcatgcctgatctgtacttctacagagatcctgaagagattgaaaaagaagagcaggctgctgctgagaaggcagtgaccaaggaggaatttcagggtgaatggactgctcccgctcctgagttccactggctactcagcctgaggttgcagactggtctgaaggtgtacagggtgcccctctggtgccctattcagcaatttccctactgaagactggagcgctcagcctgccacggaaagactggtcttgagcttccacttgctcaggccactgaatgggtaggagcaaccactgactggtcttaagactgttcttgcataggctcttaagcagcatggaaaaatggttgatggaaaactaaacatcagtttctaaaagttgtcttcatttagtttgctttttactccagatcagaatacctgggattgcatatcaaagcataataataaatacatgtctcgacatgagttgtacttctaaaaaaaaaaaaaaagc

SEQ ID NO: 7450 - DNA, 1056 bp, Homo sapiens
  SIMILAR (511)..(888): 861254mologous to Homo sapiens beige-like protein,accession number M83822,Smith-Waterman Score=580.
atggagaacaactacagcaactacattactggtaggaatgcagcatgctacagccactttggaaaacagtttgacagttcttatgaagttaaacatacatttaccataccaagcacactcttcagtattcacccaggagaaaggaaaacatgtccaccaaaggcctataggcaaagccattcaacaaagacagttatggacttcgtgaatagcagtgataatgtcatctttgtacacaacacaattcatctcatctctcaagtgatggacaatatggtcatggcttgtgggggtatactgccattgctttcagctgctacatcggctacacatgaactggaaaatattgaacctactcaaggcctttcaatagaagcctctgtgacatttttgcagaggctaattagccttgtggatgtgcttatatttgcaagttctcttggctttactgaaattgaagctgaaaaaagtatgtcatctggaggaattttgcggcagtgtctccgactagagatactaaaagtaattgcgaccctacttcgaaattctccccagtgcccagagagcatggaggttcgcagagcctttctttctgacatgattaaactttttaataacagtagagaaaacaggaggagcttgctacaatgctctgtgtggcaagaatggatgctttctctctgctattttaatcctaagaattcagatgagcaaaagataacagaaatggtatacgccatattcagaatcctgctttaccatgcagtcaaatatgagtggggtggctggcgtgtatgggtagacactttatcaatcactcattcaaaggtttttccagagaaacagaaccaagaggatgtgcagatagagagagagacagagattgatttcaagaagtttattcatgcaattatggaggcttgggggtgtggctatagagaatgctgggtagggccttttggctttgcttctgtagctttatacacttacgtcagcaggttttatattgggctgtgcagttcaacctacaagccattggatggcagttatgagtaa

SEQ ID NO: 7451 - DNA, 770 bp, Homo sapiens
  SIMILAR (17)..(613): 941254mologous to Homo sapiens beige-like protein,accession number M83822,Smith-Waterman Score=929.
gggtcgacgatttcgagctacacatgagctggaaaatattgaacctactcaaggcctttcaatagaagcctctgtgacatttttgcagaggctaattagccttgtggatgtgcttatatttgcaagttctcttggctttactgaaattgaagccgaaaaaagtatgtcatctggaggaattttgcggcagtgtctccgactagtttgcgcagacgcagtaaggaattgcttggagtgtcaacagcattcacaactgaaaactatgggagataaagccttgaaaccaatgcatagccttattcctttagggaaatctgcagcgaatagcccagtggacattgtgactggcggtatatctccagtaagagatcttgacaggcttctacaggacatggatattaatcggcttagggcagctgttttcagagacatagaggatagcaaacaagctcaatttttagccttggcagtagtatactttatctctgttcttatgggctccaagtacagagacattttggaaccccaaaatgaaaggcatagccagtcatgtacagaaactggcagtgaaaatgagaatgtatcactctctggttcaactgatgctctatacttatctgtccacggaattcacccgtacagtcaacatatataacaccattcggagagttggaacagtgcttctcatcatgcacacgctgaagtactactactgggcagtgaatcctcaggatcgaagtggtatcaccccaaaaggattaggtatataa

SEQ ID NO: 7452 - DNA, 2616 bp, Homo sapiens; identical to SEQ ID NO: 4623
  SIMILAR (670)..(2502): 961254mologous to Homo sapiens putative p150,accession number U93567,Smith-Waterman Score=3104.

SEQ ID NO: 7453 - DNA, 2763 bp, Homo sapiens
  SIMILAR (2591)..(2650): 701254mologous to Homo sapiens putative p150,accession number U93572,Smith-Waterman Score=76.
atgggagactttaacaccccgctgtcaacattagacagatcaatgagacagaaagttaacaaggatatccaggaattgaactcagctctgcaccaagcagacctaatagacatctacagaaatctccaccccgaatcaacagaatatacattcttttcagcaccacaccacacctattccaaaattgaccacatacttggaagtaaagcacccctcagcaaatatagaagatcagaaattaaaataaactgtctctcagaccacagtgcaatcaaactagaactcaggattaagaaactcactcaaaaccgctcaactacatggaaactgaacaacctgctcctgaatgactactgggtacataacgaaatgaaggcagaaataaagatgttctttgaaaccaatgagaacaaagacacaacataccagaatctctgggacacattgaaagcagtgtgtagagggaaatttatagcactaaatgcccacaagagaaagcaggaaagatctaaaattgacactctaacatcacaattaaaagaactagagaagcaagagcaaacacattcaaaagctagcagaaggcaagaaatatctaagatcagaggagaactgaaggaaatagagacacaaaaaacccttcaaaaaatcaatgaatccagaggctggttttttgaaaagatcaacaaaattgatagactgctagcaagactaataaagaagaaaagagagaagaatcaaatacatgcaataaaaaatgataaaggggacatgtccaccaatcacacagaaatacaaactaccatcagagaatactataaacacctctatgcaaataaactggaaaatctaaaagaaatagataaattcctggagacatacagcctcccaagactaaaccaggaagaagttgaatctctgaatagaccaataacaggctctgaaatagaggcaataattaatagcttaccaaacaaaagaagtccaggaccagatggattcacagccaaattctaccagaggtacaaggaggaactgctaataagcaacttcagcaaagtctcaggatacaaaatcaatgtgcaaaaatcacaagcattcttatataccaacaacagacaaacagagagccaaatcatgagtgaactcccattcacaattgcttcaaagagaatgaaatacctaggaatccaacctacaagggacatgaaggacctcttcaaggagaactacaaaccactgctcaatgaaataaaagaggatacaaacaaatggaagaacattccatgctcatgggtaggaagaatcaatattgtgaaaatggccatactgcccaagaattggaaaaaaactactttaaagttcatatggaaccaaaaaagagcccgcattgccaagtcaatcctcagccaaaagaacaaagctggaggcatcatgctacctgacttcaaactatactacaaggctacaataacgaaaacagcatggtactggtatcaaaacagagatatagatcaatggaacagaacagagccctcagaaataatgccacatatctacaaccatctgatctttgacaaacctgataaaaacaagaaatggggaaaggattccctatttaataaatggtgctgggaaaactggctagccatatgtagaaagctgaaactggatcccttccttacaccttatacaaaaattaattcaagatggattaaagacttaaatgttagacctaaaaccataaaaaccctagaagaaaacccaggcaataccattcaggacataggcatgggcgaggacttcatgtctaaaacaccagaagcaatggcaacaaaagccaaaattgacaaatgggatctaattaaactaaagagcttctgcacagcaaaagaaactaccatcagactgaacaggccacctacagaatgggagaaaatttttgcaatctactcatctgacaaagggctaatatccagaatctacaatgaactccaacaaatttacgagaaaaaaacaaacaaccccatcaaaaagtgggcaaaggatatgaacagacacctctcaaaagaagacatttatgcagccaaaagacacatgaaaaaatgcgcatcatcactggccatcagagaaatacaaatcaaaaccacaatgagataccacctcacaccagttagaatggcaatcattaaaaagtcaggaaacaacaggtgctggagaggatgtggagaaataggaacacttttacactgttggtgggactgtaaactagttcaaccattgtggaagtcagtgtggcgattcctcagggatctagaactagaaataccatttgacccagccatcccattactgggtatatacccaaaggattataaatcatgctgctatgaagacacatgcacacatatgtttattgtggcactattcacaatagcaaagacttggaaccaacccaaatgtccaacgatgatagactggattaagaaaatgtggcacatatacaccatggaatactatgcagacataaaaaaggatgagttcatgtcctttgtacggacacggatgaagctggaaaccatcattctcagcaaaatatcacaaggagaaaaaaaccaaacaccgcatgttctcactcataggtgggaattgaacaataagaacacatggacacaggaaggggaacatcgcacagcggggcctgttgtggggtggggcgaggggggagggatagctttaggagatatacctaatgttaagtga

SEQ ID NO: 7454 - DNA, 2748 bp, Homo sapiens
  SIMILAR (2748)..(1285): 961254mologous to Homo sapiens putative p150,accession number U93563,Smith-Waterman Score=2438.
tcaattcccacctatgagtgagaatatgcggtgtttggttttttgttcttgtgatagtttactgagaatgatgatttccaatttcatccatgtccctacaaaggacatgaactcatcattttttatggctgcatagtattccatggtgtatatgtgccacattttcttaatccagtctatcattgttggacatttgggttggttccaagtctttgctattgtgaataatgccgcaataaacatacgtgtgcatgtgtctttatagcagcatgatttatagtcatttgggtatatacccagtaatgggatggctgggtcaaatggtatttctagttctagatccctgaggaatcgccacactgacttccacaatggttgaactagtttacagtcccaccaacaatgtaaaagtgttcgtatttctccacatcctctccagcacctgttgtttcctgactttttaatgattgccattctaactggtgtgagatggtatctcattgtggttttgatttgcatttctctgatggccagtgatgatgagcattttttcatgtgttttttggctgcataaatgtcttcttttgagaagtgtctgttcatgtccttcgcccactttttgatggggttgtttgtttttttcttgtaaatttggttgagttcattgtagattctggatattagccctttgtcagatgagtaggttgcgaaaattttctcccatgttgtaggttgcctgttcactctgatggtagtttcttttgctgtgcagaagctctttagtttaattagatcccatttgtcaattttgtcttttgttgccattgcttttggtgttttggacatgaagtccttgcccatgcctatgtcctgaatggtaatgcctaggttttcttctagggtttttatggttttaggtctaacgtttaaatctttaatccatcttgaattgatttttgtataaggtgtaaggaagggatccagtttcagctttctacatatggctagccagttttcccagcaccatttattaaatagggaatcctttccccatttcttgtttttctcaggtttgtcaaagatcagacagttgtaggtatgcggtgttatttctgagggctctgttctgttccattgatctatatctctgttttggtaccaataccatgctgttttggttactgtagccttgtagtaaagtttgaagtcaggtagtgtgatgcctccagctttgttcttttggcttaggattgacttggcaatgcgggctcttttttggttccatatgaagtttaaagtagttttttccaattctaatttattgagagtttttagcatgaagggttgttgaattttgtcaaaggctttttctgcatctattgagataatcatgtggtttttgtctttggttctgtttatgtgctggattacatttattgatttgcgtatattgaaccagccttgcatcccagggatgaagcccacttgatcatggtggataagctttttgatgtgctgctggattcggtttgccagtattttattgaggatttttgcatcagtgttcatcaaggatattggtctaaaattctctttttttgttgtgtctctgcccggctttggtatcagaatgatgctggcctcataaaatgagttagggaggattccctctttttctattgattggaatagtttcagaaggaatggtaccagttcctccttgtacctctggtagaattcggctgtgaatccatctggtcctggactctttttggttggtaagctattgattattgccacaatttcagctcctgttattggtctattaagagattcaacttcttcctggtttagtcttgggagagtgtatgtgtcgaggaatttatccatttcttctagattttctagtttatttgcgtagaggtgtttgtagtattctctgatggtagtttgtatttctgtgggatcggtggtgatatcccctttatcattttttattgtgtctatttgattcttctctctttttttctttattagtcttgctagtggtctatcaattttgttgatcctttcaaaaaaccagctcctggattcattgattttttgaagggttttttgtgtctctatttccttcagttctgctctgattttagttatttcttgccttctgctagcttttgaatgtgtttgctcttgcttttctagttcttttaattgtgatgttagggtgtcaattttggatctttcctgctttctcttgtgggcatttagtgctataaatttccctctacacactgctttgaatgcatcccagagattctggtatgttgtgtctttgttctcgttggtttcaaagaacatctttatttctgacttcatttcgttatgtacccagtagtcattcaggagcaggttgttcagtttccatgtagttgagtggctttgagtgagattcttaatcctgagttctagtttgattgcactgtggtctgagagatagtttgttataatttctgttcttttacatttgctgaggagagctttacttccaactatgtggtcaattttggaataggtgtggtgtggtgctgaaaaaaatgtatattctgttgatttggggtggagagttctgtagatgtctattaggtccgcttggtgcagagctgagttcaattcctgggtatccttgttgactttctgtctcgttgatctgtctaatgttgacagtggggtgttaaagtctcccat

SEQ ID NO: 7455 - DNA, 1965 bp, Homo sapiens; identical to SEQ ID NO: 6310
  SIMILAR (1290)..(4): 901254mologous to Homo sapiens putative p150,accession number U93563,Smith-Waterman Score=2117.

SEQ ID NO: 7456 - DNA, 1716 bp, Homo sapiens
  SIMILAR (1716)..(1417): 621254mologous to Homo sapiens putative p150,accession number U93563,Smith-Waterman Score=297.
ctatgggtgagaatatgcggtgtttggttttttgtgtttggttttttgttcttgcgatagtttattgagaatgatgatttccaatttcatccatgtccctacaaaggacatgaactcatccttttttatggctgcatagtattccatggtgtatatgtgccacattttcttaatccagtctatcattgttggacatttgggttggttccaagtctttgctattgtgaataatgtcacaataaacatacgtgtgcatgtctctttatagcagcatgatttataatcctttgggtatatacccagtaattggatggctgggtcaaatggtatttctagttctagatccctgaggaatcgccacactgtcttccacaatggttgaactagtttacagtcccaccaacagtgtaaaagtgttcctatttctccacatcctctccagcacctgttgtttcctgactttttaatgatcgccattctaactggtgtgagatggtatctcattgtggttttgatttgcatttctctgatggccagtgatgatgaacattttttcatgtgttttttggctgcataaatgtcttcttttgagaagtgtctgttcatgtcctttgcccactttttgatggggttgtttgtttttttcttgtaaatttgtttgagttcattgtagattctggatattagccctttgtcagatgagtaggttgcgaaaattttctcccatttcgtaggttgcctgttcactctgatggtagtttcttttgctgtgcagaagctctttagtttaattagatcccatttgtcaattttgttttttgttgccattgcttttggtgttttaaacatgaagtccttgcccatgcctatgtcctgaatggtaatgcctaggttttcttctatggtttttatggttttaggtctaatgtttaagtctttaatccatcttgaattgatttttgtataaggtgtaaggaagggatccagtttcagctttctacatatggctaaccagttctcccagaaccatttattaaatagggaatcctttccccacggcttgtttttctcaggttcatcaaagatcagatagttgtagatatgtggcgttatttctgagggctctgttctgttccattgatctatatctctgttttggtaccagtaccatgctcttttggttactgtagccttgtagtatagtgtgaagtcaggtagtgtgatgcctccagctttgttcttttggcttaggattgacttggtgatgcaggctcttttttggttccatatgaactttaaggtagttttttccaattctgtgaagaaaggcattggtagcttgatggggatggcattgaatctgtaaattaccttgggcagtatggccattttcacgatattgattcttcctacccatgagcatggaatgttcttccatttgtttgtatcctcttttatttcattgagcagcagtttgtagttctccttgaagaggtccttcacatcccttgtaagttggattcctagtattttattcagttcctccttgtacctctggtagaattcggctgtgaatccatctggtcctggactctttttggttggtaaactattgattattgccacaatttcagctcctgttattggtctattcagagatgcaacttcttcctggtttagtcttgggagagtgtatgtgtcgaagaatttatccat

SEQ ID NO: 7457 - DNA, 3300 bp, Homo sapiens; identical to SEQ ID NO: 3981
  SIMILAR (1627)..(3297): 971254mologous to Homo sapiens putative p150,accession number U93563,Smith-Waterman Score=2950.

SEQ ID NO: 7458 - DNA, 2313 bp, Homo sapiens
  SIMILAR (1338)..(4): 881254mologous to Homo sapiens putative p150,accession number U93574,Smith-Waterman Score=2196.
tcaattcccatctatgagtgagaacatgtggtgtttggttttttgtccttgcgatagtttgctgagaatgatggtttccagctttatccatgtccctgcaaaggacatgaactcatccttttttatggctgcatagtattccatggtgtatatgtgccacattttcttaatccagtctatcattgatggacatttgggttggttccaagtctttgctattgtgaatagtgctgcagtaaacatacgtgtgcatgtgtctttatagcagcatgatctataatcctttgggtgtatacccagtaatgggctggctgggtcaaatggtgtttctagttctagatccctgaggaatcgccacactgacttccacaatggttgaactagtttacagtcccaccaacagtgtaaaagtcttcctatttctccacatcccctccagcaccagtcgtttcctaactttttaatgatcgccattctaactgatgtgagatggtgtctcattgtggttttgatatgcatttctctaatggccagtgatgatgagcattttttcatgtgtcttttggctgcataaatgtcttcttttgagaagtgtctgttcatatcctttgcccactttttgatggggttgtttgtttttttcttgtaaatttgtttgagttcattgtagattctggatattcgccctttgtcagatgagtagattgcaaaaattttctcccattctataggttgcctgttcactctgatggtggtttcttttgctgtgcagaagctctttagattaattagatcccatttgtcaattttggcttttgttgccattgcttttggtgttttagacataaagtccttgcccatggctatgtcctgaatggtattgcctaggttttcttctagggtttttatggttttaggtctaacatttaagtctttaatccatcttgaattaatttttgtataaggtataaggaagggatccagtttcagctttctacatatggctagccagttttcccagcaccatttattaaatagggaatcatttccccatttcttgtttttgtcaggtttgtcaaagatcagatggttgtagatatgtggcattatttctgagggctctgttctgttccattggtctatatctctgttttggtaccagtaccatgctgttttgattactgtagccttgtagtatagtttgaagtcaggtagcgtgatgcctccagctttgttcttttggcttaggattgacttggcaatgcgggctcctttttggttccatatgaactttaaagtagttttttccaattcttgggcattgaatctataaattaggattgacttggcaatgcgggctcctttttggttccatatgaactttaaagtagttttttccaattctgtgaagaaagtcattggtagcttgatggggatggcattgaatctataaattaccttgggcagtatggccattttcatgatattgattcttcctacccatgagcgtggagtgttcttccatttgtttgtatcctcttttatgtcattgagcagtggtttgtagttctccttgaagaggtccttcacgtcccttgtaagttgtattcctaggtattttattctctctgaagcaattgtgaatgggagttcactcatgatttggctctctgtttgtctgttattggtgtataagaatgcttgtgatttttgcacattgattttgtatcctgagactttgctgaaattgtctatcagcttaaggagattttgggctgagacaatggggttttctagatgtacaatcatgtcatctgcaaacagggacaatttgatttcctcttttcgtaattgaataccctttatttccttctcctgcctgattgccctggccagaacttccaacactatgttgaatagaagtggtgagagagggcatccctgtcttgtgccagttttcaaagggaatgcttccagtttttgcccattcagtacaatattggctgtggatttgtcatagatagctcttattattttgagatacgtcccatcaatacctaatttattgagagtttttagcatgaagcgttgttgaattttgtcaaaggccttttctgcatctattgagataatcatgtggtttttgtcattggttctgtttatatgctggactatgtttattgattttcgtatgttgaaccagccttgcatcccagggatgaagcccacttgatcatggtggataagctttttgatgtgctgctggattcggtttgccagtattttattgaggatttttgcatcgatgttcat

SEQ ID NO: 7459 - DNA, 2985 bp, Homo sapiens
  SIMILAR (187)..(2682): 981254mologous to Homo sapiens putative p150,accession number U93572,Smith-Waterman Score=4352.
atggttgacatccacaagccatatcacccctttacttggttgggagtctctgtgagtccatgtggtccagtgctcaggtacagcaacttcttcttagccagcagcactgtgcaagtggagctcttggtctgtggtggcagcagcagtggcagcagtgagcagggatttgtgaccatgagaacagaactaaaccaggaagaagttgaatctctgaatagaccaataacaggctctgaaattgtggcaataatcaatagtttaccaaccaaaaagagtccaggaccagatggattaacagccgaattctaccagaggtacaaggaggaactggtaccattccttctgaaactattccaatcaatagaaaaagagggaatcctccctaactcattttatgaggccagcatcattctgataccaaagccgggcagagacacaaccaaaaaagagaattttagaccaatatccttgatgaacattgatgcaaaaatcctcaataaaatactggcaaaccgaatccagcagcacatcaaaaagcttatccatcatgatcaagtgggcttcatccctgggatgcaaggctggttcaatatacgcaaatcaataaatgtaatccagcatataaacagagccaaagacaaaaaccacatgattatctcaatagatgcagaaaaagcctttgacaaaattcaacaacccttcatgctaaaaactctcaataaattaggtattgatggcacgtatttcaaaataataagagctatctatgacaaacccacagccaatatcatactgaatgggcaaaaactggaagcattccctttgaaaactggcacaagacagggatgccctctctcaccgctcctattcaacatagtgttggaagttctggccagggcaatcaggcaggagaaggaaataaagggtattcaattaggaaaagaggaagtcaaattgtccctgtttgcagacgacatgattgtttatctagaaaaccccatcatctcagcccaaaatctccttaagctgataagcaacttcagcaaagtctcaggatacaaaatcaatgtacaaaaatcacaagcattcttatacaccaacaacagacaaacagagagccaaatcatgagtgaactcccattcacaattgcttcaaagagaataaaatacctaggaatccaacttacaagggatgtgaaggacctcttcaaggagaactacaaaccactgctcaaggaaataaaagaggacacaaacaaatggaagaacattccatgctcatgggtaggaagaatcaatatcgtgaaaatggccatactgcccaaggtaatttacagattcaatgccatccccatcaagctaccaatgactttcttcacagaattggaaaaaactactttaaagttcatatggaaccaaaaaagagctcgcatcgccaagtcaatcctaagccaaaagaacaaagctggaggcatcacactacctgacttcaaactatactacaaggctacagtaaccaaaacagcatggtactggtaccaaaacagagatatagatcaatggaacagaacagagcccccagaaataatgccgcatatctacaactatctgatctttgacaaacttgagaaaaacaagcaatggggaaaggattccctatttaataaatggtgctgggaaagctggctagccatatgtagaaagctgaaactggatcccttccttacaccttatacaaaaatcaattcaagatggattaaagatttaaacgttagacctaaaaccattaaaaccctagaagaaaacctaggcattaccattcaggacataggcatgggcaaggacttcatgtccaaaacaccaaaagcaatggcaacaaaagccaaaattgacaaatgggatctaattaaactaaagagcttctgcacagcaaaagaaactaccatcagagtgaacaggcaacctacaacatgggagaaaatattcgcaacctactcatctgacaaagggctaatatccagaatctacaatgaactcaaacaaatttacaagaaaaaaacaaacaaccccatcaaaaagtgggcgaaggacatgaacagacacttctcaaaagaagacatttatgcagccaaaaaacacatgaaaaaatgctcatcatcactggccatcagagaaatgcaaatcaaaaccactatgagatatcatctcacaccagttagaatggcaatcattaaaaagtcaggaaacaacaggtgctggagaggatgtggagaaataggaacacttttacactgttggtgggactgtaaactagttcaaccattgtggaagtcagtgtggcgattcctcagggatctagaactagaaataccatttgacccagccatcccattactgggtatatacccaaatgactataaatcatgctgctataaagacacatgcacacgtatgtttattgcggcattattcacaatagcaaagacttggaaccaacccaaatgtccaacaatgatagactggattaagaaaatgtggcacatatacaccatggaatactatgcagccataaaaaatgatgagttcatgtcctttgtagggacatggatgaaattggaaaccatcattctcagtaaactatcgcaagaacaaaaaaccaaacaccgcatattctcactcatagaccgtcttgaccagcgcaacttcctcctaggttccagcggggcctttccactgtcccatgacctggctgagcgggaccaggcctctgggacaggcaaggcctctcctcacaggcaactcaacccttcacatccagcccagccctcggtggactccggaccgctgaccgccaatcacaacacagcctctgctactttcagcctgccctgcctttgggctaaggctcccccagctggccacctggaacatggcacctttcgagtgaaaagttttctgggccacagtcctgccatcaatcaataa

SEQ ID NO: 7460 - DNA, 8779 bp, Homo sapiens
  SIMILAR (8314)..(6266): 941254mologous to Homo sapiens putative p150,accession number U93572,Smith-Waterman Score=3462.
tcacttaacattaggtatatctcctaaagctatccctcccccctcgccccaccccacaacaggccccgctgtgcgatgttccccttcctgtgtccatgtgttcttattgttcaattcccacctatgagtgagaacatgcggtgtttggtttttttctccttgtgatattttgctgagaatgatggtttccagcttcatccgtgtccgtacaaaggacatgaactcatccttttttatgtctgcatagtattccatggtgtatatgtgccacattttcttaatccagtctatcatcgttggacatttgggttggttccaagtctttgctattgtgaatagtgccacaataaacatatgtgtgcatgtgtcttcatagcagcatgatttataatcctttgggtatatacccagtaatgggatggctgggtcaaatggtatttctagttctagatccctgaggaatcgccacactgacttccacaatggttgaactagtttacagtcccaccaacagtgtaaaagtgttcctatttctccacatcctctccagcacctgttgtttcctgactttttaatgattgccattctaactggtgtgaggtggtatctcattgtggttttgatttgtatttctctgatggccagtgatgatgcgcattttttcatgtgtcttttggctgcataaatgtcttcttttgagaggtgtctgttcatatcctttgcccactttttgatggggttgtttgtttttttctcgtaaatttgttggagttcattgtagattctggatattagccctttgtcagatgagtagattgcaaaaattttctcccattctgtaggtggcctgttcagtctgatggtagtttcttttgctgtgcagaagctctttagtttaattagatcccatttgtcaattttggcttttgttgccattgcttctggtgttttagacatgaagtcctcgcccatgcctatgtcctgaatggtattgcctgggttttcttctagggtttttatggttttaggtctaacatttaagtctttaatccatcttgaattaatttttgtataaggtgtaaggaagggatccagtttcagctttctacatatggctagccagttttcccagcaccatttattaaatagggaatcctttccccatttcttgtttttatcaggtttgtcaaagatcagatggttgtagatatgtggcattatttctgagggctctgttctgttccattgatctatatctctgttttgataccagtaccatgctgttttcgttattgtagccttgtagtatagtttgaagtcaggtagcatgatgcctccagctttgttcttttggctgaggattgacttggcaatgcgggctcttttttggttccatatgaactttaaagtagtttttttccaattcttgggcagcatggccattttcacaatgttgactcttcctatccatgagcatggaatgttcttccaatcgtttgtgtcctcttttatttccttgagcagtggtttgtagttctccttgaagagctctttcacattccttgaaagttggattcctaggtattttattctctttgtagcaattgtgaatgggagttcactcatgatttggctctctatttgtctgatattggtatataggaatgcttgtgatttttgcacgttgattttgtatcctgagactttgctgaagttgcttatcagcttaaggagatttggggctgacatgatggggttttctaaatatacaatcatgtcatctgcaaacagggacaatttgacttcctcttttcctaattgaataccctttatttctttctcttgcctgattgccctggccagaacttccaatactatgagtgagaacatgaggggggtgggtttctggttcctgtgttagtttgctcagaatgatggtttccagcttcatccatgtccctacaaaggacatgaactcatcattttttatggctgcatagtattccatggtgtatatgtgccacattttcttaatccagtctatcgttgatgggcatttgggttggttccaggtctttgctattgtgaatagtgccgcaataaacataggtgtgcatgcgtctttatagtagcatgatttataatcttttgggtatatacccagtaatgggatctctgggttaaatggtatttctggttctagatccttgaggaattgccacactgtcttccacaatggttgaactagtttacagtcccaccaacagtgtaaaagtgttcctatttctccacatcctctccggcatctgttgtttcctgactttttaatgatcgccattctaactgctgtgagatggtatctcattgtggttttgatttgcatttctctgatggccggtgatgatgagcattttttcatgtgtctgttggctgcataaatatcttcttttgagaagtgtctgtacctatcctttgcccactttttgatggggttgtttgtttttttcttgtaaatttgtttgagttctttgtagattctggatattagccctttgtcagatgagtagattgcaaaaattttctcccattctgtaggttgcctgttcagtctgatggtagtttcttttgctgtgttttcagtcttcagataccccagcaaagaacagaagctcttgagtttaattagatcccatttgtcaattttggcttttgttgccattgcttttggtgttttggacatgaagtccttgcccatgcctatggcctgaatggtattgcctaggttttcttctagggtttttatggttttaggtctaacatttaagtctttaatccatcttgaattaatttttgtataaggtgtaaggaagggatccagtttcagctttctacatatggctagccagttttcccagcaccatttattaaatagggaatcctttccccgttgcttgtttttcttgttgtttttgtcaggtttgtcaaagatcagatagttgtagatatgcggcattatttctgagggctctattctgttccattggtctatatatctgttttggtaccagtaccatgctgttttggttactgtagccttgtagtatagtttgaagtcaggtagcgtgatgcctccagctttgttcttttggcttaggattgacttggtgatgtgggctcttttttggttccatatgaactttaaagtagttttttccaattctgtgaagaaagtcattggtagcttgatggggatggcattgaatctataaattaccttgggcagtatggccattttcacgatactgattcttcctacccatgaacatggaacgttcttccatttgtttgtatcctcttttatttcattgagcagtggtttgtagttctccttgaagaggtccttcacatcccttgtaagttggattcctaggtattttattctctttgaagcagttgtgaatgggagttcactcatgatttggctctcttgtttgtctgtgttattggtgtataagaatgcttgtgatttttgtacattgattttgtttcctgagactttgctgaagttgcttatcagcttaaggagattttgggctgagacaatagggttttctagatatacaatcatgtcatctgcaaacagggacaatttgacttcctcttttcctaattgaataccctttatttccttctcttgcctaattgcccttgccagcacttccaacaccatgttgaataggagtggtgagagagggcatccctgtcttgtgccagttttcaaagggaatgcttccagtttttgtccattcagtatgatattggctgtgggtttgtcatagatagcccttattattttgagatacgtcccatcaatacctaatttattgagagtttttagcatgaagcattgttgaattttgtcaaaggccttttctgcatctattgagataatcatgtggtttttgtctttggttctgtttatatgctggattacatttattgatttgcgtatattgaaccagccttgcatcccagggatgaagcccagttgatcatggtggataagctttttgatgtgctgctggattcggtttgccagtattttattgaggatttttgcatcaatgttcatcaaggatattggtctaaaattctcttttttggttgtgtctctgcctggctttggtatcaggatgatgctggcctcctgaaatgagttagggaggattccctctttttctattgattggaatagtttcagaaggaatggtaccagttcctccttgtacctctggtagaattcggctgtgaatccatctggtcctggactcttttttgttggtaaactattgattattgccacaatttcagagcctgttattggtctattcagagattcaacttcttcctggtttagtcttgggagggtgtatgtgtcgaggaatttatccatttctcctagattttctagtttattggcgtagaggtgtttgtagtattctctgatggtagtttgtatttctgtgggatcggtggtgatatcccctttatcattttttattgcgtctatttgatgcttctctcttttcttgtttattagtcttgctagcggtctatcaattttgttgatcctttcaaaaaaccagctcctggattcattaattttttggagggtttttttttttgtctttatttccttcagttctgctctgattttagttatttcttgccttctgctagcttttgaatgtgtttgctcttgcttttctagttcttttaattgtgatgttagggtgtcaattttggatctttcctgctttctcttgtgggcatttagtgctataaatttccctctacacactgctttgaatgtgtcccagagattctggtatgttgtgtctttgttctcgttggtttcaaagaacatctttatttctgctttcatttcgttatgtacccagtagtcattcaggagcaggttgttcagtttccatgtagttgagcagttttgagtgagtttcttaatcctgagttctagtttgattgcactgtggtctgagagacagtttgttataatttctgttcttttacatttgctgaggagagctttacttccaagtatgtggtcaattttggaataggtgtggtgtggtgctgaaaaaaatgtaaattcttttgatttggggtggagagttctgtagatgtctattaggtctgcttggtgcagagctgagttcaattcctgggtatccttgttaactttctgtcttgttgatctgtctaatgttgacagtggggtgttaaagtctcccattattattgtgtgggagtctacgtctccttgtaggtcactcaggacttgctttatgaatctgggtcctcctgtattgggtgcatatatatttaggatagttagctcttcttgttgaatagcagatgctttgttactctccacctcatgcctctgtgaacttaagtcctctgtaggtgttagatctgcatgtaaataaacgtgccaatagctatgggagctgagcaccttccagatcctcagacctcgcctagatggagccaactccttcctccactgaggagtgtggaatgttcggcagagctgggtacaacaggtttcacctctaattttggaactggaaagtgttcctttttgacaaatgtggacacccttttcgacaggtctattgcactcagtgaataattctgaagccatttggtggctgtaatctctacacatcatcttttcatgggcctgaagatttctctgtcccacctgctttctggcctccctggcctgctgctctcggcatgaatagagaagtagcactgggcctgaggattgggaccacatcatgcacatcctttcgcacacagagatatgggcgaggtgtcctgacacttggacccacagctcagctgctggctctctatgagattgaagcaagtcatgtgaatgttcgggcttccaaacgctagggcagcaacatccacagcgcctttcgcttctcacagcctctgtctctgttttaggattcttttgctccttgggcctggaattaatctggccaatccaagaaatcatctggttcttcaccagaagttcagcattcttggcaggcatttttcccttggccacagaggaaccctgtatttctctggctctggctccttccaagagatgggaatgtaatagcagcagctgaagatatgaaaataactgagcctggggaacagaaagcacttcccacgagtgcccatgtttcagcgaagacgatagtttgctgagaatgatggtttccagcttcatccatgtccctacaaaggacatgaactcatccttttttatggctgcatagtattccatggtgtatatgtgccacattttcttaatcccgtctatcattgttggacatttgggttggttccaagtctttgctattgtgaatagtgccgcaataaacatacgtgtgcatgtgtctttatagcagcatggtttataatcctctgggtatatacccagtaatgggatggctgggtcaaatggtatttctagttctagatccctgaggaattgccacaccgacttccacaatggttgaactagtttacagtcccaccaacagtgtaaaagtgttcctatttctccacatcctctccagcacctattgtttcctgactttttaatgatcaccattctaactggtgtgagatggtatctcattgtggttttgatttgcatttctctgatggccagtgatgatgagcattttttcatgtgttttttggctgcataaatgtcttcttctgagaagtgtctgttcatatcctttgcccactttttgatggggttgtttgtttttttcttgtaaatttgtttgagttcattgtagattctggatattagccctttgtcagatgagtaggttgcaaaaattttctcccattctgtaggttgcctgttcactctgatggtggtttcttttgctgtgcagaagctctttagtttaatgagatcccatttgtcaattttggcttttgttgccattgcttttggtgttttcgacatgaagtccttgcccatgcctatgtcctgaatggtattgcctaggttttcttctagggtttttatggttttaggtctaacatgtaagtctttaatccatcttgaattaatttttgtataaggtgtaaggaagggatccagtttcagctttctacatatggctagccagttttcccagcaccatttattaaatagggaatcctttccccattgcttgtttttgtcaggtttgtcaaagatcagatagttatagatatgcggcattatttctgagggctctgttctgttccattggtctatatctctgttttggtaccagtaccatgctgttttggttactgtagccttgtagtatagtttgaagtcaggtagcatgatgcctccagctttgttcttttggcttaagattgacttggcaatgtgggctcttttttggttccatatgaactttaaagtagttttttccaattctgtgaggaaagtcattggtagcttgatggggatggtgttgaatctataaattaccttgggcagtatggccattttcacgatattgattcttcctacccatgagcatggaatgttcttccatttgtttgtatcctcttttatttccttgagcagtggtttgtagttctccttgaagaggtccttcacatcccttgtaagttggattcctaggtatgttattctctttgaagtgattgtgaatgggagtccactcatgatttggctctctgtttgtctgttattggtgtataagaatgcttgtgatttttgcacattgattttgtatcctgagactttgctgaagttgctcatcagcttaaggagattttgggctgagacagtggggttttctagatatacaatcatgtcatctgcaaacagggacaatttgacttcctcttttcctaactgaatgctctttatttccttctcctgcctgattgccctggccagaacttccaacactatgttgaataggagtggtgagagagggcatccctgtcttgtgccagttttcaaagggaatgcttccagtttttgcccattcagtatgatactggctgtgggtttgtcatagatagctcttattattttgagatacgtcccatcaatacctaatttattgagagtttttagcatgaagggttgttgaattttatcaaaggccttttctgcatctattgagataatcatgtggtttttgtctttggttctgtttatatgctgttttcctgtccacagcggaaagggcttcaggatggaaggagaaaggagcttcacgcgccccactttgtccgtgagtcctcggtacaccagctccatatagtgctcccgggtgaaaaagcaaccccgagtagtcatgcttgcccctgaaaccatgtgatcctggatcagtcccgccaatggttggccatccttgggaacaaggtactgctgatcagtgcaggccaggacgtaggcctcggcccggcccagctcactctgggggaaatgggcattcatctcgtctccatcaaagtcggcattataggccttgcagttggcatagtggagccgcagcactttctcttcaggcaggatgcgggcacggtgggcctggatggagggtctgtgcagtgtgggctgtcggttcagtagcagaatgtccccattcttcacatgccggcacaccgtgatcacatgtgagtacat

SEQ ID NO: 7461 - DNA, 454 bp, Homo sapiens
  SIMILAR (2)..(454): 991254mologous to Rattus norvegicus calcium-activated potassium channel rSK2,accession number U69882,Smith-Waterman Score =774.
gagcgggcacggcagcagcagtggcaccaagtccagcataaagaaaaaccagaacatcggctacaagctgggccaccggcgcgccctgttcgaaaagcgcaagcggctcagcgactacgcgctcatcttcggcatgttcggcatcgtggtcatggtcatcgagaccgagctgtcgtggggcgcctacgacaaggcgtcgctgtattccttagctctgaaatgccttatcagtctctccacgatcatcctgctcggtctgatcatcgtgtaccacgccagggaaatacagttgttcatggtggacaatggagcagatgactggagaatagccatgacttatgagcgtattttcttcatctgcttggaaatactggtgtgtgctattcatcccatacctgggaattatacattcacatggacggcccggcttgccttctcctatgccccatccaca

SEQ ID NO: 7462 - DNA, 800 bp, Homo sapiens
  SIMILAR (14)..(742): 971254mologous to Homo sapiens apamin-sensitive small- conductance Ca2+-activated potassium channel,accession number AF239613,Smith-Waterman Score=1205.
tacactgcggtggaattcacaggatgttactagcaacttccttggagcgatgtggttgatatcaatatcttttctctccattggttatggtgacatggtacctaacacatactgtggaaaaggagtctgcttacttactggaattatgggtgctggttgcacagccctggtggtagctgtagtggcaaggaagctagaacttaccaaagcagaaaaacacgtgcacaatttcatgatggatactcagctgactaaaagagtaaaaaatgcagctgccaatgtactcagggaaacatggctaatttacaaaaatacaaagctagtgaaaaagatagatcatgcaaaagtaagaaaacatcaacgaaaattcctgcaagctattcatcaattaagaagtgtaaaaatggagcagaggaaactgaatgaccaagcaaacactttggtggacttggcaaagacccagaacatcatgtatgatatgatttctgacttaaacgaaaggagtgaagacttcgagaagaggattgttaccctggaaacaaaactagagactttgattggtagcatccacgccctccctgggctcataagccagaccatcaggcagcagcagagagatttcattgaggctcagatggagagctacgacaagcacgtcacttacaatgctgagcggtcccggtcctcggccaggaggcggcggtcctctttcacagcaccaccaacttcttcagagagtagctagaagagaataagttaacccccaaaaaagactttttgccatcatatgggcaataatt

SEQ ID NO: 7463 - DNA, 2868 bp, Homo sapiens
  SIMILAR (1052)..(1144): 381254mologous to Homo sapiens Human hSK2 protein,accession number W63707,Smith-Waterman Score=51.
atgtgcccgatactcagggagcacaggggaagcactgaggggaagagaagacagaaaaggctcccacttgaacttactttgaaggatgaagaggtgttagcccatcgtcaggaaatcgaggtagcaaaggccagtccaagcaaagggaacatcataattcattttggttacaaaggtgtggagtaccatgatcaacaggatgttactagcaacttccttggagcgatgtggttgatatcaataacttttctctccattggttatggtgacatggtacctaacacatactgtggaaaaggagtctgcttacttactggaattatgggtgctggttgcacagccctggtggtagctgtagtggcaaggaagctagaacttaccaaagcagaaaaacacgtgcacaatttcatgatggatactcagctgactaaaagacactgtccgtgggcagcgactattcagcccaagctatcattcttaatttccctgccaggctgcgactaccggggtgaatcagcccgcgccaggcccctttcccacccgccgctgcagttaggacttggcaaagatgctcgatatttgcgtatttgtgaccggtctttgctttgtgtctgcgctgcagcgggcaatgcagggctcaggccccgggattctccccacacgctgctgcactggcgcagtcggtcgccatactttttctccccaaagccagtgcccccgcagttacttggcgggcagccggcagcccactctcggcgggatgatctgggagaagcgggcgtgggacgagggggctgctgttttgcagccctgcgaggcgtgcagtcggagaagtggtcggggttccacaccgtccctgagcctgcccccggccaaggtgatgtcatgcccattgttttggtgcgcccaaccaatcggactcgccgcctggattctaccggagccggcatgggcccttcctcgcaccagcagcaggagtccccgctcccgaccataacgcattgcgcagggtgcaccaccgcttggtctccctgcagctttaacagccctgacatggaaaccccattgcagttccagcgcggcttcttcccagagcagccgccgccgccgccgcgctcctcacacctgcattgccagcagcagcaacagagccaggacaagccgtgcccgcccttcgcgcccctcccgcaccctcaccaccacccgcacctcgcgcaccagcagccggccagcggcggcagcagcccatgcctccggtgcaacagctgcgcctcctccggtgccccggcggcgggggcgggagataacctgtccctgctgctccgcacctcctcgcccggcggcgccttccggacccgcacctcctcgccgctgtcgggctcgtcctgctgctgctgctgctgctcgtcgcgccggggcagccagctcaatgtgagcgagctgacgccgtccagccatgccagtgcgctccggcagcagtacgcgcagcagtccgcgcagcagtcggcgtccgcctcccagtaccaccagtgccacagcctgcagcccgccgccagccccacgggcagcctcggcagtctgggctccgggcccccgctctcgcaccaccaccaccacccgcacccggcgcaccaccagcaccaccagccccaggcgcgccgcgagagcaaccccttcaccgaaatagccatgagcagctgcaggtacaacgggggcgtcatgcggccgctcagcaacttgagcgcgtcccgccggaacctgcacgagatggactcagaggcgcagcccctgcagccccccgcgtctgtcggaggaggtggcggcgcgtcctccccgtctgcagccgctgccgccgccgccgctgtttcgtcctcagcccccgagatcgtggtgtctaagcccgagcacaacaactccaacaacctggcgctctatggaaccggcggcggaggcagcactggaggaggcggcggcggtggcgggagcgggcacggcagcagcagtggcaccaagtccagcaaaaagaaaaaccagaacatcggctacaagctgggccaccggcgcgccctgttcgaaaagcgcaagcggctcagcgactacgcgctcatcttcggcatgttcggcatcgtggtcatggtcatcgagaccgagctgtcgtggggcgcctacgacaagcctggaacagcggcgctcgcttcggtcctctatggcgtggacccagcagcccagccacgcgtcttcccagtctttccaggtctactctcgtctcttttggttttgaggccgagtgatctgacagatcacagagccaagacaggcgtcgctgtattccttagctctgaaatgccttatcagtctctccacgatcatcctgctcggtctgatcatcgtgtaccacgccagggaaatacaggaaaagtaagtgttatagctgactttctggctctatgtcctctggaattgcttaatgaagcaagaggaggccctgacattttcatggagaaccttggaaagcagatccgtgtgaccttttataaaatgtttatacacactctggcaaaacaagatggttcagagttggcttttcagagatggctctatagctctataatcggaagaacagtaatgaaaatttctcttcattcgtgcaccaaggccacagaaaacaggaaagaagaccacacggaacactcagtgggcctgcatctgctctgcagcatttacccagcagcaagaggtctcctctgcactagtgtgcaagaacacaggtggctgcagcaaggtgatcagtgtgatggaggaaaaagtttgccagcccctgagttagagaagtggatggtcagcaaaggcaagaagaaacatggctga

SEQ ID NO: 7464 - DNA, 582 bp, Homo sapiens
  SIMILAR (157)..(306): 901254mologous to Gallus gallus small-conductance calcium- activated potassium channel,accession number AF079372,Smith- Waterman Score=230.
atggagatgactccaggtgcaggatctttggctgctggtggggacctgaccatgggaacagggatggccacagggagccaaggtggaaggcaattacaggagaaatgcttgacaatctattttcccttaataatgagaatggtggtgacttggactacaatggcagctgaggaggtaaaaaatgcagctgccaatgtactcagggaaacatggctaatttacaaaaatacaaagctagtgaaaaagatagatcatgcaaaagtaagaaaacatcaacgaaaattcctgcaagctattcatcaacttgctcttaattctatatggagaagagcagatatggtcacatctgtggctcagaaaagtagctttccttatgaaacctacgagggtagtaatggaaagttgttcatggtggacaatggagcagatgactggagaatagccatgacttatgagcgtattttcttcatctgcttggaaatactggtttgtaatgctgtgttagggggcaaattggggatggaaaggaaaagagagagcaaaggtgaccttgctgggttttatgaccgtccacagtcatga

SEQ ID NO: 7465 - DNA, 1186 bp, Homo sapiens
  SIMILAR (67)..(408): 501254mologous to Homo sapiens unnamed protein product,accession number AK001694,Smith-Waterman Score=302.
atgagctctgccaatcggtccatcctggaagtaccacaccttgatatcctcctccaagagctgcctggggtgagcaaggtggtgaccgtggaagtgagagggaactggcagcgctggctgaaggtgcgggacctcaccaagggagtgacctatttcttccgtgtccaagcgcggaccatcacctacgggcccgagctccaagccaatatcacagccgggccagccgagggatccccgggctcgcctagagatgtcctggtcaccaagtccgcctctgaactgacgctgcagtggactgagggacactctggcgacacacctaccacgggctatgtgatcgaggcccggccctcagtctttggcaacgggagttttcaagtgagtaaggaagaaaatcagtatttctctgaaggtttgacatccatagaagttccaagtcagcaggttcagcaagagggggctgttgccatggctctgatggtgcccgatgaaggcttatgggacatgtttgtgaaggacatcccgcggagcgccacatcctacaccctcagcctggataagctccggcaaggagtgacttacgagttccgggtggtggctgtgaatgaggcgggctacggggagcccagcaacccctccacggctgtgtcagctcaagtggaagccccattctacgaggagtggtggttcctcctggtgatggctctgtccagcctgatcgtcatcctgctggctggtgttcgccctcgtcctgcacgggcagaataagaagtataagaactgcagcacacgacaggggatctccaccatggaggagtctgtgaccctggacaacggaggatttgctgccctggagctcagcagccgccacctcaatgtcaagagcaccttctccaagaagaacgggaccaggtccccaccccggcctagccccggcggcctgcactactcagacgaggacatctgcaacaagtacaacggcgccgtgctgaccgagagcgtgagcctcaaggagaagtcggcagatgcatcagaatctgaggtcagtgtcggtgcctacttccgggcagtgaccatcagcccctacttctgcaaggatgccgggtttgctgtccgcaccatagccttgggcttggcagaaacagcaggcagcaaagcagatgctcggaaagggacatttgtctaa

SEQ ID NO: 7466 - DNA, 1350 bp, Homo sapiens
  SIMILAR (817)..(1224): 531254mologous to Homo sapiens unnamed protein product,accession number AK001694,Smith-Waterman Score=354.
atgagctctgccaatcggtccatcctggaagtaccacaccttgatatcctcctccaagagctgcctggggtgagcaaggtggtgaccgtggaagtgagagggaactggcagcgctggctgaaggtgcgggacctcaccaagggagtgacctatttcttccgtgtccaagcgcggaccatcacctacgggcccgagctccaagccaatatcacagccgggccagccgagggatccccgggctcgcctagagatgtcctggtcaccaagtccgcctctgaactgacgctgcagtggactgagggacactctggcgacacacctaccacgggctatgtgatcgaggcccggccctcagtctttggcaacgggagttttcaagtgagtaaggaagaaaatcagtatttctctgaaggtttgacatccatagaagttccaagtcagcaggttcagcaagagggggctgttgccatggctctgatggtgcccgatgaaggcttatgggacatgtttgtgaaggacatcccgcggagcgccacatcctacaccctcagcctggataagctccggcaaggagtgacttacgagttccgggtggtggctgtgaatgaggcgggctacggggagcccagcaacccctccacggctgtgtcagaccggctgcaagccagggcgctggggggttcagagagggatgggctgtgtttgaggagaggggatctcagcagcatgaagggcagggaggcctcggcgttggggcagcagagcctcagccagaagccccaggagtttggaggaacgaccctgtgctcgtctgtggctcaagtggaagccccattctacgaggagtggtggttcctcctggtgatggctctgtccagcctgatcgtcatcctgctggtggtgttcgccctcgtcctgcacgggcagaataagaagtataagaactgcagcacaggaaaggggatctccaccatggaggagtctgtgaccctggacaacggaggatttgctgccctggagctcagcagccgccacctcaatgtcaagagcaccttctccaagaagaacgggaccaggtccccaccccggcctagccccggcggcctgcactactcagacgaggacatctgcaacaagtacaacggcgccgtgctgaccgagagcgtgagcctcaaggagaagtcggcagatgcatcagaatctgaggtcagtgtcggtgcctacttccgggcagtgaccatcagcccctacttctgcaaggatgccgggtttgctgtccgcaccatagccttgggcttggcagaaacagcaggcagcaaagcagatgctcggaaagggacatttgtctaa

SEQ ID NO: 7467 - DNA, 1062 bp, Homo sapiens
  SIMILAR (62)..(12): 471254mologous to Homo sapiens Human secreted protein, SEQ ID NO: 7083,accession number G03002,Smith-Waterman Score=41.
atgtcgctgacttcaggagtgaagctgcagaccttcgctgtagtgttacagctcttaaaggcgggcgtctggagttgttccttccttccgtgggtttgtcatcccgctggcttcaggagtgaagctgcagaccttcttgtgagtgttacagctcataaaggcggcatggacccaaagagtgagcagcacaagatttattgccaagagcaaaagaataaagcttccaccgcacagaagggacccaagcgggttgccactactggctccggaagcctgctttttcccttatctggccctacccacatcctgctgattggtccattttacagagagctattggtccgttttgacaggactctatacagaatcatcagtgccgctgatacttctaatactcttttatttgatggatcacaaacaggacagcttgtaccacagcttgaacctgatgcagagaggtcttttgcccaagacccactcaacattggcagccttatgggttacctgataaatggcgtattgcaagtccacacctgccgttggtctccgtgttacggtttagtcgctgtcacgtctgtcgctcatatgttacacgttttgcataggtgccccttcgcacctgtcggtcggttcgcttatcatcgcgacttcgttcatcgtttcgaaccgcccgtgccgggcgccctatgtagacaccatctatcgtctcccctccccccttcgtttggccggtcaccgcacccttccattgaagccatcgttccctcgccgctctcctcctcttctttattatccctcacccaggccccccgctcactaccccctctcaccctcatccgagccaaatcggcgctatacgatggctttaacagctgtcccgtatccttatacttccccgcttcaggccttcccgtttctgcacagtcggatcccccaattgcaactctttctcctaaccaacagttttacttccagaaccccagtcgagcccgttcaagttttggagatcctgtcacagtggaaagcaacaacaaagtggcactacgggtagctgcgaaataa

SEQ ID NO: 7468 - DNA, 753 bp, Homo sapiens
  SIMILAR (189)..(61): 741254mologous to Homo sapiens Human secreted protein, SEQ ID NO: 7102,accession number G03021,Smith-Waterman Score=157.
tcactgaccaggaatgaagccacggaccctcgcagtgagtgttacagttcttatagatggtgtgtctggagtctcttccttctgatgttgggacatgtcgctgacttcaggagtgaagctgcagaccttcgctgtgagtgttacagctcttaaaggcgggcgtctggagttgttccttccttccggtgggtttgtcatcccgctggcttcaggagtgaagctgcagaccttcttggtgagtgttacagctatatgatttttttccttcagaaatacttcccatcctgcttccaggacaccaaacactcttaattcttctgttttacaggtggtcttattaatgccttgtagttctctgattcccatctgtacttttgtagcatggagggtccgatccagggcttcctttatacttcgggaacccgtccagctgcgcgtgaaccggaaatcgtcgataccgcgaacttcctgattacgctgggtgcgaaaattagcggtcagggcaccgatcgtatcgcttgggtccatcataggaatataccagcgtagtataaagtgctcaattggtacatccgctttagaacataatgatcggcatgaaagatcgggtacgtacatcgtaccttgagtgagagcactagtaccgcccatgtcttcggaattattactggccatctccccatagataagacgctctttgatattcttctcataatgtggcctatttttactgctcttgctttggtttggcat

SEQ ID NO: 7469 - DNA, 507 bp, Homo sapiens
  SIMILAR (1)..(357): 981254mologous to Escherichia coli K12 putative oxidoreductase,accession number AE000373,Smith-Waterman Score=587.
  misc_feature (1)...(507): n = a,t,c or g
atggctatagcacttgtgactggtggcagtcgcggcatcgggcgggcaactgcattactgttggcgcaagaagggtatacggtggcggttaattatcagcaaaacctccacgcggcgcaagaagtgatgaacttaataacgcaagccggtggcaaagcattcgtgctccatgcggatatcagcgacgaaaaccaggtcgttgcgatgtttacagcaatcgatcagcacgatgaaccgctagcaacgctggtcaataacgccgggatcttgtttacccagtgcaccgttgaaaaccttaccgcagagcgaatcaaccgagtactttccaccaacgtgacgggatattttctctgctgcggggngcataaaaccatgaccctgggctgtaccgtacaagcctgcggcttacactatcccatggatgactcgaataaatcggctttgatgagctgggctttagccccgatcaaccctaaaaactatgccgttttgcagaaaaagagctga

SEQ ID NO: 7470 - DNA, 350 bp, Homo sapiens
  SIMILAR (147)..(308): 941254mologous to Escherichia coli ORF_o208,accession number U36840,Smith-Waterman Score=272.
ggatacatgtgatccgaattcactatcgtatgtcatatagtatcctggcctttacgcttagcgcagaccgaagccataggcgctctaaatggcgtaaggatgtgggcattcaacaggtggtgcattccaacaaggtggccttggattacatgcagggtgattacgacttaaaccgtaacacgttacgtacaatgataacgacagcttggtacagtgcacttggcatccctatcgatagctcggggaagttagttaattacccgccaaatggcaaataccttctcaatcgtaaaagggacaacttagagcactgcaagctagcagctggacgtcacatgtggtacccctga

SEQ ID NO: 7471 - DNA, 2145 bp, Homo sapiens
  SIMILAR (196)..(744): 1001254mologous to Escherichia coli glyoxylate carboligase,accession number L03845,Smith-Waterman Score=966.
atgttaatccaggccgaacgtccggtgattgttgccgggggcggggtaattaatgctgacgcagctgctctgttacaacaggttgctgaactgaccagcgttccggtgatcccaacgctaatgggctggggctgtatcccggacgatcatgaactgatggccgggatggtgggtctgcaaaccgggcatcgttacgagaaatacaccgaagggcgcaaaatcgttcatattgatattgagccgacgcaaattggtcgcgtgctgtgtccggatctcggtattgtctctgatgctaaagcggcgctgacactgctggttgaagtggcgcaggagatgcaaaaagcgggtcgtctgccgtgtcgtaaagaatgggtcgccgactgccagcagcgtaaacgcactttgctgcgcaaaacccacttcgacaacgtgccggtgaaaccgcagcgcgtgtatgaagagatgaacaaagcctttggtcgcgatgtttgttatgtcaccaccattggtctgtcacaaatcgctgcggcacaaatgctgcatgtctttaaagaccgccactggatcaactgtggtcaggctggtccgttaggctggacgattccggctgcgctaggggtttgtgccgctgatccgaaacgcaatgtggtggcgatttctggcgactttgacttccagttcctgattgaagagttagctgttggcgcgcagttcaacattccgtacatccatgtgctggtcaacagacctgcagcgaatggagctcaggggtcatgtcaccctgacgcgccggcggttttccgctcatctatcttcatacgaaaaagcgaagaaaaacttgtggtcacaatgaatgaattgagtgcgtcacgagcgttaccagaggaaaccatgcccggacgctttgaactaaaaccaaccctggagaaagtcttgcacgcgccggacaattttctcttcatggaccctctgccgccgatgcatcgtcgggggatcattattgccgccattgtattggcggtcggatttctgcttccatctgatgatacgcccaacgcgccggtggtgacgcgtgaagcgcagttagatattcagtcgcaatcacaaccgccgacagaagaacagctgcgggcgcaattagttaccccacaaaatgatcctgatcagaacctatacaggaaggccagccagaagagcagccgcaaactacccaaacgggacttaccccacatccttacgccatttagagcgcctatggcttcggtctgcgctaagcgtaaaggccaggttctacatcagcagtactcacttaagaaataccgctacaagcacatcgcggataacgtctgtcaatggttggatgaggtttttctccgaccaaaagaaatgtctgatattcataaactgacattcattgaaaagcgagaacgactaaagaattcggtcttcaaatcgctccatgacgtcaggactgtagaggatccaagtggtactcagctcgaagtcgtctcaaataacccgtgggatccgaagcgtcagttgctgaaatgggacggcactaagtggaccggctgggatattccggactacagcgcagcgcctccggaggccgtgccgtcgttgaataatccacaaacattcagcgagcagaagctggatgaggcgttatatcacggcgcggtcctgcgcgtgcgcccgaaagcgatgacggtggcggtgattatcgccggtctgctgccgattctgtggggaacgggggctggttcagaggtgatgagccggattgccgcgcctatgattggcggcatgatcaccgcacctttgctgtcgctgtttattatcccggcggcgtataagctgatgtggctgcaccgacatcggtggttaaagtgcaaatcggctcggcgaccacaatatcaaagcggctatacggatgatcggcatagccggagtgtaaaagcatcgcccacggcaggtttaccttcactcacccatgaacagcagcaaaaagctgtcgagcggatccaggaactgatggcacaagggatgagcagcggccaggcaatcgcgctggtggcagaagagctgcgtgccaaccactccggcgagcgaatcgtggcgcgttttgaggatgaagacgagtaa

SEQ ID NO: 7472 - DNA, 1063 bp, Homo sapiens
  SIMILAR (74)..(3): 421254mologous to Homo sapiens Human secreted protein, SEQ ID NO: 7344,accession number G03263,Smith-Waterman Score=68.
atgtttatccatttatcagtgcaaggacatgtggatgatttccaggttaaggtgaatatggatagaaccaacataaatattcgtgtacagatttgtttctgtgaatttaagtctttagttctcttagataagccaggtcgacaggaactcatcgatgacctcaacaaacgcacagacaattttttaacagactcaggtataagcgtttcagattggatcgatgcggctacatgggaagtgttttcatccctgcgcgaactggaacttctagggatcaagaacatacggctggcctcccaagatctacatggggtcattctcagttccgaaaccgtcgccgaagacatttggtgccgcatccttgatactgtgacgcgcaagggcgagcattctcgacgcattcacagtgctgatgacaagtcctacttacgaccagacctacttgagtggttcaagcagcgtgtcgaagatgaccaatctcggtcaggccgcaaaatctacgtcaaacgggacttaccccacatccttacgccatttagagcgcctatggcttcggtctgcgctaagcgtaaaggccaggttctacatcagcagtactcacttaagaaataccgctacaagcacatcgcggataacgtctgtcaatggttggatgaggtttttctccgaccaaaagaaatgtctgatattcataaactgacattcattgaaaagcgagaacgactaaagaattccgtcttcaaatcgctccatgacgtcagcgaatttttgggtcgagtgctgttgcacgcaactgatccggcagcaccacgaaagccagcctattccttgcatgctatacgtggaaaaagcaggggccgaaaaaattcttgaaaacgtgcatatcgttcgccgcgatccagaaggtgatcagctttggattggcttcagcgagttggtgactgatattaacattgccgtcagattgccggagatacggtatcagttgtacgaggacatttcggattgcatcgataccgcgcgcaaaaaaatcctcgacattaaagacgataactacctgctt

SEQ ID NO: 7473 - DNA, 180 bp, Homo sapiens
  SIMILAR (1)..(147): 1001254mologous to Escherichia coli No definition line found,accession number U00006,Smith-Waterman Score=263.
atgccgcgcgttaacatcggcttactgcatctgttgctgcaacatacctccgcctctctgacacttaatgagaactgcgatcccaccgtacgccacgacatggagcgttttttcctccgcacggttcccgacaacggaaattatgaggacctgcaggcatgcaagtttagacgcaattaa

SEQ ID NO: 7474 - DNA, 402 bp, Homo sapiens
  SIMILAR (1)..(150): 961254mologous to Escherichia coli No definition line found,accession number U00039,Smith-Waterman Score=236.
atgtttgatgtccagatcatggcacaaacgctggtgaacggagccgatagcttctccctgctggcgattccgttctttgtgctggcgggtgaaatcatgaatgcgggcggcttgtcaaaacgcattgttgaccagccgatgaaactgataaccctcagactatcctgtcgtcatggaagtgatatcgcggaaggaaaatacgatatgagtcgtctggcggcctttctcggtccaagatgtcggttcctaatcccaaaagtattgtgtcaaggtttccaaacaatgacgactggatgtggagagccagaacctggaaatgccaatgggcacagacaaaaagccccaacaggagcctgccctctagtcaataagccaagaggacagaaaagtttcagacagtaa

SEQ ID NO: 7475 - DNA, 405 bp, Homo sapiens
  SIMILAR (6)..(146): 971254mologous to Cloning vector pZC320 SopA,accession number U26464,Smith-Waterman Score=248.
ctactcatcttgctcaggatctggctctgaaggggctacgtgttttgctcgtggggggtaacgacccccagggaacagcctcaatgtatcacggatgggtaccagatcttcatattcatgcagaagacactctcctgcctttctatcgtctttcattgccatacggaactccggatgagcattcatcaggcgggcaagaatgtgaataaaggccggataaaacttgtgcttatttttctttacggtctttaaaaagccgtaatatccagctgaacggtcaactaaatttgaccatcggtaccttgggtgtttgcgaagcatcagaatgcggagacggtctttagcctcttcaatattaagtggaagatttagtatgtgcctttcctgtttagctttatcattcat

SEQ ID NO: 7476 - DNA, 309 bp, Homo sapiens
  SIMILAR (1)..(204): 1001254mologous to Escherichia coli AgaD,accession number AF228498,Smith-Waterman Score=332.
tcagtcggcgtgaaggcgatcgataaagtgcgagagaactcgcagatgattgcccgttcggcaaccatcctcgggatcacggtaatcggcgggctgatcgcttcgtatgtgcatattaacgtggtgacatcgtttgccatcgacaatacccacagcgttgcgctgcagcaggatttcttcgataaagtcttcccgaacattctctgtagttttggcctgctctctttgcttgctcctctcgtagcagaattcttctttcctcttgagactgtcctctctgtccaggtttaggacctggaagtcagccat

SEQ ID NO: 7477 - DNA, 516 bp, Homo sapiens
  SIMILAR (2)..(241): 861254mologous to Homo sapiens ribosmal protein small subunit,accession number L13802,Smith-Waterman Score=357.
tgatttgcagaatgatgaagttgcatttagaaaattaaagctgattattgaagatgttcagggcaaaagctacctgacgaacttccatggcatgaatcttacccatgacaaaatgtgttccatggtcaaaaaatggcagacagtgatcgaagctcatgttgatgtcaagactaccaatggttacttgctttgtctgttctgtgttggttttactaaaaaatgcaacaatcaaatatggaagaagatcttgttttgacaacaggcatcatttcccacctccatgagcctttcttggtggtaacagactatgaccagtaataggtttccatttctgcacccagttgggggtgatattaaaattacttaataatctgttagcatgaacatgaacaactgtattgttactcacagctttcattaccccttgtagctcccttgacccgggcaacacagtgccctcatcaaaccttccgctaggttgtgtcatatgaagagtgtgatgtttgatgcacgatg

SEQ ID NO: 7478 - DNA, 1188 bp, Homo sapiens
  SIMILAR (423)..(896): 511254mologous to Homo sapiens v-fos transformation effector protein,accession number M84711,Smith-Waterman Score=287.
atggagttttcaggacagccatggcagtcatgctatggctgtgtccagaatccagtgctagtgatattggcagtacaaactgaagtacttagtgcatatgtcagtaatgatgatattggtgttccaagcagaccacttctgctggattattttaagtattgtttctgcctgcatagcttcactcttcacaatagcaaagacatggagtcaacccaaatgaccatcaatgatagactggataaagaaaatgtggtacatatacaccatggaatactatgcagctgtaaaagagaaagagatcgtgtcttttgcagggacatgaatggaacccataatcctcagcaaactaacacaggaagagaaaaccaaacaccgcctattctaagtgggagcaccatggcggttttttttgaacaagctttcttacgacaggcggcaaaaagggatctcaagaagaaagtggttgatccattttctaagaaagattgttgtaatatgtaaagcaccctgctatgttcaatataagaaatattggaaaagacgttgggtcccccaggacccaaggaaccaaaattgcatcctgatggtctcaagggtccgtgtgtttgaaagtgagtcttgctgatttgcagcatgatgaagttgcatttagaaaattcaagctgattacttgaagatgttcagggtaaaaactgcctgactaacttccatggcatggatcttaccccgtgacaaaattgtgttccatggtcaaaaaatgggcagacaatgatttgaagctcaccgttgatgtcaagactacccgatgggttacttgcttcgtctgttctgtgttgggttttactaaaaaacgcaacaatcagatagggaagcctttttaggctcagccaccacagggtccgccaaatcgggaagaagatgatggaaatcatgacccgagaggtgcagacaaatgacttgaaagaagtggtcaataaattgattccagacagcattggaaaagacatagaaaaggcttgccaatctatttatcctctccatgatgtcttcgttagaaaagtaaaaatgctgaagaagcccaagtttgaattgggaaagctcatggagcttcatggtgaaggcagtagttctggaaaagccactggggacgagacaggtgctaaagttgaacgagctgatggatatgaa

SEQ ID NO: 7479 - DNA, 1143 bp, Homo sapiens
  SIMILAR (67)..(768): 651254mologous to Homo sapiens putative gene, multidrug resistance associated protein like,accession number AP001660,Smith- Waterman Score=664.
atggaggaaggcgaaggggaagcagacacttcttacaccgccggagcaggagaaacagagagagagcggggaagtgacagccgcagccgggctctcagccagcggccaggcgccccgcggaccatgctctccagtacgcagaacgcgggcggctcctatcagcgggtccgcggggcgcttgatacacaggagtggaagtggggagaggtgagtcctcgaaccctgaacgtggacggacgagcccttgtttcagtagccaacacacacgggacagacagaccggcgtacacactcaatcctcagagcagagatcagagatcaggagtaattactttaggctataagagacctttggaaagagaggatctttttgaactaaaggaaagtgattccttctgcactgcgtgtcccatctttgaaaaacaatggagaaaggaagttttaaggaatcaagagaggcaaaaagtaaaggccctcaacaaattggatgaggcactatgccctgggatcatccttactcagtctactgattcaaatgctaatctcttccagaaacagcctcacagacacacccagacatctggtagatggcaaattatcattttctgtgaacacagctcaaattttggctggaatggctatggctatgcagtggcacttcttgttgtagtctttttgcaaactctgattcttcagcaatatcaacgttttaacatgctcacctcagcaaaagttaagacagctgtaaatggactgatctacaaaaagctaggatggtcaggaaaagtgtcatggttaatattgcatgatgtgggtcatggaataatggaaggatacattgcatggggtaaaggctctgatgttagaataacttgggagaaaaaaagtacagaaatgcgtacaaggcctgctcagaaaatggccttacttttatcaaatgtttctcgacaaaagttttccactggggaaattattaacttgatgtcagcaactcatggacttgacagcaaacctcaatctcctctgagagagttacaaatggaagtcatcgaattttatcatttacttattcactcaaccagtattgaacaagcatgtatcttatgtcagccagtgtttcaggcacaggaagtacagcagtga

SEQ ID NO: 7480 - DNA, 410 bp, Homo sapiens
  SIMILAR (131)..(394): 971254mologous to Homo sapiens putative gene, multidrug resistance associated protein like,accession number AP001660,Smith- Waterman Score=436.
tcacaaagatcctggattcaaggaaatctgatgtttttctctgtttttttttccaattgtaatgtcggcaaagtcactgaactctctcggccttgtctcctcctctgtgaccgtgctggcgctgaactgactgtccgctgccaagggaagtgacagccgcagccgggctctcagccagcggccaggcgccccgcggaccatgctctccagtacgcagaacgcgggcggctcctatcagcgggtccgcggggcgcttgatacacagaaatgcagtccagagaaaagtgcctcatttttcagtaaagtgacatattcctgggttagcagagtaattactttaggctataagagacctttggaaagagaggatctttttgaactaaaggaaagtgatccttctgcactgcgtg

SEQ ID NO: 7481 - DNA, 864 bp, Homo sapiens
  SIMILAR (1)..(504): 681254mologous to Cricetulus griseus inosine-5'-monophosphate dehydrogenase,accession number J04209,Smith-Waterman Score=593.
atgacggactacctgatcaggggcggcaccgactatgtgcccgataactggctccccgcgcagcagctctttgccagcgccgactgcctcacctacgacgacttcctgattctcccaggattcacagacttcatagctgatgaggcggacctgacctcagccctgacccggaagatcacgctgaagactccgctcatttcctcccccacggacactgccgacatagccattgcaatggctctgatgggaggtattggtttcattcaccacaactgcaccccagagttccaggccaaggaggtgcggaaggtcaagaagtttgaacagggcttcatcacggacccggtggtgctgaccccctcgcacactgtgggtgatgtgttggaggccaagatgcggcatggcttctctggcatccccatcactgagacgggcaccataggcagcaagctgaagaacagagactaccctctggcctccaaggattcccacaagcagctactgcgtggggcagctgtgggcacccctgaggatgacaaataccgcctggacttgctcacccaggcgggggtagacgtcgtagtcttggacttgtcccaagggaactcggtgtatcagattgccacggtgcattacatcaaacagaagtacccccacctccaggtgattgggatgacagccgcccaggccaaaaacctgattgacgctgcggtggacgggctgcgcataggtatgggctgcggctccatctgcatcacccaggaagtgatggcctgcggtgggccccagggcactgcattgtacaaggtggccgagtatgccctgtgctttggtgtgtccatcatagccgatggcggcatctag

SEQ ID NO: 7482 - DNA, 621 bp, Homo sapiens
  SIMILAR (322)..(600): 721254mologous to Homo sapiens PRO2221,accession number AF116695,Smith-Waterman Score=326.
atgtgggaaattttggaacttcctagggacttgttgaatggctttgcccaaaatgctgatagcaatatggacaataaagtccaggctgaggtggccttggatggaaatggggaacttgttgggtactacagcaaagcctccgctggtgatacccaggcaaacagggtctggagtggacctccagcaaactccaacagacctgcagctgagggacctgaaaggaataccatcaacatcaacaaaaaggacatcaacaccaaaaccccatctgtaggtcaccgacatcaaagaccaaaggtagataaaaccacaaagacaaggagaaacaagagcagaaaagctgaaaattctaaaaaccagagtgcctcttatcttccaaaggactgcagctcttcgtcagcgatgaaacaaagctggatggagaatgactttgacgagttgacagaaggagccttcagaaggtcggtaataacaaacttctctgagctaaaggaggatgttcaaacccatcacaaggaagctaaaaaccttgaaaaaagattagataaatggctaactagaataaacagtgtagagaagaccttaaatgacctgatggagaatggcatgggaaatacgtga

SEQ ID NO: 7483 - DNA, 1629 bp, Homo sapiens
  SIMILAR (64)..(2): 521254mologous to Homo sapiens putative p150,accession number U93572,Smith-Waterman Score=52.
ttattttgagatatgtcccatcaataccttgagagtttttagcacgaagtgttgttgaattttgtcaaaggccttttctgcatctattgagataatcatatggtttttgtcattggttctgtttatatgtttgattatgtttattgatttgcatatgttgaaccagccttgcatcccagggatgaagcccacttgatcatggtggataagctttttgatgtgctgctggattcgatttgccagtattttattgaggatttttgcatcaatgttcatcagggatattgccctaaaattctctttttctgttgtgtctgtgccaggctttggtatcaggatgatgctggcctcataaaatgagttagggaggattccctctttttctattgattggaatagtttcagaaggaatggtgccagttcctccttgtacctctggtagaattcggccttgaatccatctggtcctggactttttttggttggtatgctattaattattgcctcaatttcagatcctgttattggtctattcagagactcaacttcttcctggtttagtcttgggagggtgtatgtgttgaggaatttatccgcttcttctagattttctagtttatttgtgtagaggtgtttatagtattctctgatggtagtttgtatttctttctctctggctgcccttaacattttttccttcatttcaactttggtgaatctgacaattatgtgtcttggagttgctcttctggaggagtatctttgtggcgttctctgtatttcctgaatttgaatgtttgcctgcgttgctagattggggaagttctcctgtataatatcttctttgccatgggttcgaacttcctcctttagctcggagtagtttgatcgtctgaagccttcttctctgaactcgtcaaagtcattctccatcctgctttgttccgttgctgatgaggagctgcgttcctttggtcttggtgatggtgacgtacagatggggttttggtgtggatgtcctttctgttggttagttttccttctaacagtcaggatcctcagctgcagatctgttggagtttgctggaggtccactccagaccctgtttgcctgggtatcagcagcggaggttgccctgaattatttcttggatgagaatctaagaaccctttcttggggtctggattgggacccctttctggtaacagaagtgatgttgtgctgattttgctgctatcctttcgcaggactggcaacgcctgcttcctcctctgagctgtcaagtaggaagtccgggctgctctgtctgcccttgactgtgtgcagccctgttctgggtgagactccttcttccaggcaggtagacacagtctcctgtgcagacaaaacccactcccatcactaccagaggagggggctttctgcccacccagcccttccctgtaattctgcaaaggcagttctgtcctgagtaacttgtggctttcatgggaagctaagaagacgtgccttgaggatcctttcgtgtctctgcagagagcagtattctttaacgggctccctgaggagcacagagtacttgcaagccagtgaacaggaatgagaaaatttccaagagaattgtccat

SEQ ID NO: 7484 - DNA, 969 bp, Homo sapiens
  SIMILAR (482)..(183): 511254mologous to Homo sapiens p40,accession number U93569,Smith-Waterman Score=226.
ttacgatttggcctgtttttgcagtggctggtacgggttgttcctttccgtgtttagtgcttccttcaggagctcttttagggcaggcctggtggtgacaaaatctctcagcatttgcttgtctgtaaaggattttatttctccttcacttatgaggcttagtttggctggatatgaaattctgggttgaaaactcttttctttcagaatgttgaatattggtccccactctcttctgacttgtagagtttctgctgagagatccgctgttagtctgatgggcttccctttgtgggtaacccgacctttctctctggctgcccttaaaattttttccttcatttcaacttggtgaatctgacaattatgtgtcttggagttgctcttctcgaggagtatctttgtggcattctgtgtatttcctgaatttgaatgctggcctgtcttgctaggttggggaagttctcctggataatatcctttggtctttgatgatggtgacgtacagatggggttttgctgtggatgtcctttctgtttgttagttttccttctaacagtcaggaccctcagctgcaggtctgttggagcttgctggaggtccactccagaccctgtttgcctgggtatcagcagcagaggcagttctaggagttttttggatgagtctttagggttttctaggtatacggtcatatcttcagcaaaaagcaacagtttgacttcctctttacccatttggatgcccttgatttctttctcttgtttgattgctctcgctagaacttctgataatgtgttgaatagaaatggtgaaaatgggcatccttgtgttgttccagttctcaggaggaatgctttcaacttttccccattcagtataatgttggctgtgggtttgtcatagatggcttttattaccttaaggtatgtcccttctatgcctattttgctgagggttttgatcat

SEQ ID NO: 7485 - DNA, 1326 bp, Homo sapiens
  SIMILAR (91)..(999): 781254mologous to Homo sapiens putative p150,accession number U93567,Smith-Waterman Score=1202.
cctccgctgctgataccaaggcaaacaggatctggagtggacctccagcaaactccaacagacctgcagctgagggtcctcactgttagaaggaaaactaacaaacagaaaggacatccacaccaaaactccatctgtacgtcaccatcatcaaagaccaaagactttaaaccaacaaagatcaaaagagacaaagaaggccactacataatggtaaagggatcaattcaacaagaagagctaactatcctaaatatatatacacccaatacaggagcacccagattcataaagcaagtccttagagacctacaaagagacttagactcccatacaataatagtgggagactttaacaccccactgtcaacattagacagttcaaagagacagaaggttgacaaggatatccaggaattgaactcagctctgtaccaagcagacctaacagacatctacagaactctccaccccaaatcaacagaatatacatttttttcagcaccacaccacacctattccaaaattgaccacatagttggaagtaaagcactcctcagcaaatgtaacagaacagaaattataacaaactgtctctcagaccacagtgcaatcagactagaactcaggattaagaaactcactgaaaaccgctcaactacatggaaactgaacaacctgctcctgaaagactactgggtacataacgaaatgaaggcagaaataaagatgttctttgaaaccaatgagaacaaagacacaacataccagaatctctgggacacaggcaaagctgcgtgtagagggatatttatagcaataaatgcccacaagagaaaccagaaaagatctaaaatggacaccctaacatcacaattaaaagaattagagaagcaagagcaaagacattcaaaagctagcagaagactaaaccaggaagaagttgaatctctgaataaaccaagaacaggctctgaaattgaggcaataattaacagcttaccaaccaaaaaaagtccaggagcagatggattcacagccgaattctaccagaggtacaaggaggagctgggaccattccttctgaaactattccaatcaatagaaaaagagggaatactccctaactcattttatgaggccagcatcatcctgataccaaagcctgacagagacacaacaaaaaaagagaattttaggccaatatgcctgatgaacatccatgcaaaaatcatcaataaaatactggcaaaccaaatccagcagcacatcaaaaagcttatccaccatgatcaagtgggcttcatccctaggatgcaaggctag

SEQ ID NO: 7486 - DNA, 2835 bp, Homo sapiens
  SIMILAR (607)..(1695): 921254mologous to Homo sapiens putative p150,accession number U93563,Smith-Waterman Score=1804.
atggatgaattcctcaacacatacaccctcccaagactaaaccaggaagaagttgaatctctgaatagaccaataacaggctctgaaattgtggcaataatcaatagcttaccaagaaaaaagagtccaggaccagatggattcacagccgaattctatcagaggtacaaggaggaactagtaccattccttctgaaactattccaatcaatagaaaaagagggaatcctccctaactcattttatgaggccagcatcatcctgataccaaagccaggcagagacacaaccataaaagagaattttagaccaatatccttgatgaacattgatgcaaaaatcctcaataaaataatactggcaaaccgaatccagcagcacatcaaaaagcttatccaccatgatcaagtgggcttcatccctgggatgcaaggctggttcaatatacgcaaatcaataaatgtaatccagcatataaacagaaccaaagacaaaaaccacatgattatctcaacagatgcagaaaaggcctttgacaaaattcaacaacccttcatgctaaaaactctcaagaaatttggtattgatgggacgtatctcaaaataagaataaaatacctaggaatccaacttacaagggatgtgaaggacctcttcaaggagaactacaagccactgctcaatgaaataaaagaggatacaaagaaatggaagaacattccatgctcatgggtaggaagaatcaacatcatgaaaatggccatactgcccaaggtaatttatagattcaatgccatccccatcaagctaccaatgactttcctcacagaattggaaaaaactactttaaagttcatatggaaccaaaaaagagcccgcattgccaagtcaatcctaagccaaaagaacaaagctggaggcatcacgctacctgacttcaaactatactacaaggctacagtaaccaaaacagcatggtactggtaccaaaagagagatatacatcaatggaacacaacagagccctcagaaataactccgcatatctacaaccatctgatctttgacaaacctgagaaaaacaagcaatggggaaaggattccctatttaataaatggtgctgggaaaactggctagccatatggagaaagctgaaactggatcccttccttacaccttatacaaaaattaattcaaggtggattaaagacttaaatgttagacctaaaaccataaaaaccctagaagaaaacctaggcattaccattcaggatataggcatgggcaaggacttcatgtctaaaacaccaaaagcaatggcaacaaaagccaaaattgacaaatgggatctcattaaactaaagagcttctgcacagcaaaagaaactaccatcagagtgaacaggcaacctacaaaatgggagaaaattttcacaacctactcatctgacaaagggctaatatccagaatctacaatgaactcaaacaaatttacaagaaaaaatcagacaaccccatcaaaaagtgggtgaaggacatgaacagacacttctcaaaagaagacatttatgcagccaaaaaacacatgaaaaaatgctcaccatcactggccatcagagaaatgcaaatcaaaaccacaatgagataccatctcacaccaccttcgctgctgatacccaggcaaacagggtctggagtggacctccagcaaactccaacagacctgcagctgaaggtcctgactgttagaaggaaaactaacaaacagaaagtacatccacaccaaaaccccatctgtacatcaccatcatcaaagaccaaagaactagaaaagcaagagcaaacacattcaaaagctagcagaaggcaagaaataactaagatcagagcagaactgaaggaaatagagacacaaaaaaaccttcaaaaaatcaatgaatccaggagctggtttttggaaaaggtcaacaaaattgatagactgctagcaagactaataaagaagaaaagagagaaggatcaaatagatgcaataaaaaatgataaaggggatatcaccaccgatcccacagaaatacaagctaccatcagagaacactataaacacctctacgcaaataaactagaaaatctagaagaaatggataaattcctggacacatacactctcccaagactaaaccaggaagaagttgaatctctgaatagaccaataacaggctctgaaattgaggcaataatcaatagcttaccaaccaaaaagagtccaggaccagatggattcacagccaaattctaccagaggtacaaggaggaactggtaccattccttctgaaactattccaatcaatagaaaaagagggaatcctccctaactcattttatgagtccagcatcatcctgataccaaagccgggaagagacacaaccaaaaaagagaattttagaccaatatccttgatgaacattgatgcaaaaatcctcagtaaaatactggcaaaccgaatccagcagcacatcaaaaagcttatccaccatgatcaagtgggctacatccctgggatgcaaggctggttcaacatatgcaaatcaataaatgtaatccagcatataaacagaaccaaagacaaaaaccacatgattatctcaatagatgcagaaaaggcctttgacaaaattcagcaacgtttcatcctgaaaactcttaatgaattaggtattgatgggacatatctcaaaataataagagctatctatgacaaacccacagccaatatcatactgaatagggaaaaactggaagcattccctttgaaaactggcaaaagatag

SEQ ID NO: 7487 - DNA, 1287 bp, Homo sapiens
  SIMILAR (793)..(1263): 911254mologous to Homo sapiens putative p150,accession number U93567,Smith-Waterman Score=711.
cctctgctgctgatacccaggcaaacagggtctggagtgtacctccaacaaactccaacagacctgcagctgagggtcctgactgttagaaggaaaactaacagaaaggacacccacatcaaaaccccatctgtcagtcaccgtcatcaaagaccaaaggtagataaaaccacaaagatggggaaaaaacagaacagaaaaactggaaactctaaaaatcagagcacctctcctcctccacaggaacacagctcctcaccagcaatggaacaaagaataaccaatgcagagaagtacttaaaggacctgatggagctgaaaaccacggcacaagaactacatgacgaatgcacaagcctcagtagcccattcgatcaactggaagaaagggtatcagtgatggaagatcaaatgaatgaaatgaagcgagaagagaagtttagagaaaaaagaataaaaagaaacgaacaaagcctcaaagaaatatgggactatgtgaaaagaccaaatctacctttgattggtgtacctgaaagtgacagagagaatggaaacaagttggaaaacactctacaggatattatccaggagaacttccccaatctagcaaggcatgccaacattcaaattcaggaaatacagagaatgccacaaagatactcctcgaaaagggcaaccccaagatatataattgtcagattcaccaaagttgaaatgaaggaaaaaatgttaagggcagccagagataaaagtctggttacccacaaagggaagctcatcagactaacagctgggaaatttatagcactaattgcccacaagggaaatcaggaaagatctaaaattgacaccctaacatcacaattaaaagaactagagaagcaagagcaaacacattcaaaacctagcagaaggcaagaaataactaagatcagagcagaactgaaggaaatagagacacaaacaacccttcaaaaaatcaatgaatccaggagctggttttttgaaaagatcaacaaaattgatagactgctagcaagactaataaagaagaaaagagagaaaaatcaaatagatgcaataaaaaatgataaaggggatatcaccactgatcccacagaaatacaaactaccatcagagaatactataaacaccactatgcaaataaactagaaaatctaaaagaaatgaataaattcctggacacatacaccctcccaagattaaagcaggaagaagttgaatctctgaatagaccaataaaggctctgaaattgaggcaataa

SEQ ID NO: 7488 - DNA, 1122 bp, Homo sapiens
  SIMILAR (628)..(1068): 931254mologous to Homo sapiens putative p150,accession number U93565,Smith-Waterman Score=735.
atgctatcaagtgtaggtctgctgttgacacacagaagaaagaagaaatccactgacactattaatgatgagtccctaaataaggagagagatatgacaggaaatccacacatctttcctcgataccaagagatttggcaagtttttgtgtcttcaggtaataactacatcacaactgccacggggccaacagctgttcctccgctgctgatacccaggcaaacagggtcaggagtggacctccagcaaactccaacagacctgcagctgaggctcctgactgttggaaggaaaactaacaaacagaaaggacatccacaccaaaaccccatctgtacgtcaccatcatcaaagaccaaagaaatacgaactaccatcagagaatactacaagcacctctatgcaaataaactggaaaatctagaagaaatggataaattccttgacacatacaccctcccaagactaaaccaggaagaagttgaatctctgcatagaccaataacaggctctgaaattgaggcaataattaatagcttaccaaccaaaaaaagtccaggaccagatggattcacagccgaattctaccagaggtacaaggaggagctgacaaacagagagccaaacatgagtgaactcccattcacaattgcttcaaagagaataaaatacctaggaatccaacttacaaggaacatgaaggacctcttcaaggagaactacaaaccacttctcaaggaaataaaagaggatacaaacaaatggaagaacattccatgctcatgggtaggaagaatcaatatcatgaaaatggccatactgcccaaggtaatttatagattcaccatccccatcaagttaccaatgactttcttcacagaattggaaaaaactacttcaaagttcatatggaaccaaaaaagagcccgtattgccaagtcaatcctaagccgaaagaacaaagctggaggcatcacgctacctgacttcaaactatactacaaggctacagtaaccaaaacagcatggtactggtaccaaaacagagatatagaccaatggaacagagccctcagaaataatgccacatatctacaactatccgatctttgtcaaatgtga

SEQ ID NO: 7489 - DNA, 3252 bp, Homo sapiens; identical to SEQ ID NO: 6598
  SIMILAR (595)..(2109): 891254mologous to Homo sapiens putative p150,accession number U93563,Smith-Waterman Score=2297.

SEQ ID NO: 7490 - DNA, 678 bp, Homo sapiens
  SIMILAR (91)..(675): 781254mologous to Homo sapiens ORF2 contains a reverse transcriptase domain.; ORF2,accession number M80341,Smith-Waterman Score=783.
cctccgctgctgatacccaggcaaacagggcctggagtggacctccagcaaactccaacagacctgcagctgagggtcctgactgttagaaggaaaaccaatgaacagaaaggacatccacaccaaaaccccatctgtacgtcaccatcatcaaagaccaaagactttaaaccaacaaagatcaaaagagacaaagaaggccattacataatggtaaagggagcaattcaacaagaagagctaattatcctacatatatatgcacccaatacaggagcacccagattcataaagcaagcccttagagactcacaaagagacttagactcccacacaataataatgggagactttaacacccctctgtcaacattagacagacccacgagacagaaagttaacaaggatatccaggaactgaactcagttctgcaccaagtggacctaatagacatctacagaactttccaccccaaatcaacagaatatacattcttctcagcaccacatcgcacttattccaaaattgaccacatagttggaagtaaagcactcctcagcaaatgtaaaagaggagaaattataacaaaaatcaaactagaactcaggattaagaaacagacgcaaaaccgctcaactacatggaaactgaacaaccttcttctgaatgactactga

SEQ ID NO: 7491 - DNA, 1047 bp, Homo sapiens
  SIMILAR (244)..(1029): 931254mologous to Homo sapiens putative p150,accession number U93564,Smith-Waterman Score=1317.
atggccgggtactcctctgagacaaaacctccagaggaacgatcaggcagcaacatttgctgttcaccaatatccgctgttctgcagcctccgctgctgatacccaggcaaacagggtctggagtggacctccagcaaactctgacagacctgcagctgagggtcctgactgttagaaggaaaactaacaaacagaaaggacatccacaccaaaatcccatctgtacgtcaccatcatcaaagaccaaaggaataaaatacctaagaatccaacttacaagggatgtgaaggacctcttcaaggagaactacaaaccactgctcaacaaaataaaagaagatacaaacaaatgcaagaacattccatgcttatgggtaggaagaatcaatatcatgaaaatggccatactgcccaaggtaatttatagattcaatgctatccccatcaagctaccaatgactttcttcacagaattggaaaaaactactttaaagttcatatggaaccaaaaaagagcccgcattgccaagtcaatcataagccaaaagaacaaagctggaggcatcatgctacctgacttcaaactatactacaaggccacagtaacgaaaacagcatggtactggtaccaaaacagagatatagaccaatggaacagaacagagccctcagaaataatgccatgtatctacaactgtctgatctttgacaaacctgagaaaaacaagaaatggggaaaggattccctatttaataaatggtgctgggaaaactggctagccatatgtagaaagctgaaactggatcccttccttacaccttatacaaaaattaattcaagatggattaaagacttaaatgttagatcaaaaaccataaaaaccctagaagaaaacctaggcaataccattcaggacataggcatgggcaaggacttcatgtctaaaacaccaaaagcaatggcaacaaaagccaaaattgacaaatgggatctaattaaactaaagagcttctgcacagcaaaagagaaactaccatcagagtga

SEQ ID NO: 7492 - DNA, 1650 bp, Homo sapiens; identical to SEQ ID NO: 2481
  SIMILAR (199)..(1062): 511254mologous to Mus musculus domesticus ORF2,accession number AF081110,Smith-Waterman Score=718.

SEQ ID NO: 7493 - DNA, 1020 bp, Homo sapiens
  SIMILAR (972)..(1019): 881254mologous to Homo sapiens putative p150,accession number U93574,Smith-Waterman Score=77.
atggcaatgcctccgctgctgatacccaggcaaacagggtctggagtggaccaccagcaaactccaacagacccgcagctgaggatcctgactgttagaaggaaaactaacacacagaaaggacatccacaccaaaaccccaactgtacatcaccatcatcaaagaccaaagagctaaaggaggaagttggaacccaacgcaaagaagttaaaaaccttgaaaaaagattagacgaatggctaactagaatagccaatgcagagaagtccttaaaggacctgatgcagctgaaaaccatggcacaagaactccaattagataaaactactttaaatttcatatggaaccaaaaacgagcctgcattgccaagacaatcctaagcaagaagaacaaagctggaggcatcaggctacctgacttcaaactgtactataaggctacagtaaccaaaacagcatggtactggcaccaaaacagatatatagaccaatggaacaggacagaggcctcggaaataatgccgcacatctacaaccatctgatctttgataaacctgacaaaaagaagcaatggggaaatgattccctatttaataaatggtgttgggaaaactggctagccatatgcagaaaactgaaattggaccccttccttacaacttctacaaaaattgactcaagatggattaaagacttaaaggtaaaacctaaaaccatagaaaccatagaagaaaacctaagcaataccattcaggacataggcatgggcaaagacttcatgactaaaacaccaaaagcaatggcaacaaaggccaaaattgacaaatgggatctaattaaactaaagagcttctgcacagcaaaagaaactaccatcagagtgaacacgcaacctacagaatggaagaaaatttgtgcaatctatctatctgacaaagggctaatatccagaatctataagaaacttaaatttacaagaaaaaaaacaaccccatcgaaaagtgggcaaaggatatga

SEQ ID NO: 7494 - DNA, 1260 bp, Homo sapiens; identical to SEQ ID NO: 2484
  SIMILAR (268)..(1257): 831254mologous to Homo sapiens p40,accession number U93567,Smith-Waterman Score=1399.

SEQ ID NO: 7495 - DNA, 2805 bp, Homo sapiens
  SIMILAR (1666)..(2580): 931254mologous to Homo sapiens putative p150,accession number U93563,Smith-Waterman Score=1454.
atgtatggcactggctacagagatgttgccggaaaatgggctattgatccagactccaagagagagttcttggatgtaacacaggaaggaattcaaggttgtgattttagtggaacctgcaggcagactttaagtatcttaacccagccattgagacagtggggcttagaaggtatcaagaaaccaaacagctggattataagtgaagagtcagtcagtaatggagggcctccgctgctgatacccaggcaaacagcgtctggagtggacctccagcaaactccaacagacctgcagctgagggtcctgactgttagaaggaaaactaacaaacagaaaggaatagcatcaacatcaacaaaaaggacatccacaccaaaaccccatctgtacgtcaccatcatcaaagaccaaagttacataaaaccacaaagatggggaaaaaacatagcagaaaagctgaaaattctaaaaatcagagtggctctctccctccaaaggaatgcagctcctcaccagcagtggaacaaagctggacggagaatgagtttgatgagttcacagaagaaggcttcagaagtgattgaaagtcaaatgaatgaaataaagggagaagagaagtttagagaaaaaagagtaaaaagaaacgaacaaagcctacaagaaatatgggactatgtgaaaagaccagatctacgtctgattggtgtacctgatagtgacggggagaatggaaccaggttggaaaacactctgcaggatattatccgggagaatttccccaacctagcaaggcaggccagcattcaaattcaggaaatacagagaacgccacaaagatactcctcaagaagagcaactccaagacacataattgtcagattcaccaaagttgaaatgaaggaaaaaatgttaagggcagccagagagaaagaactcaagattaagaaactcactcaaaactgcttaactacatggaaactgaacaacctgctcctgaatgactactgggtacataatgaaatgaagggagaaataaagatgttctttgaaaccaatgagaacatagacacaacataccagaatctctggcatacatttaaggcagtgtgtagagggaaatttatagcactaaatgcgcacaagagaaagcaggaaagatctaagattgacaccctagcatcacaattaaaagaaatagagaagcaagagcaaacacattcaaaagctagcagaagacaagaaataactaagatcagagtagaactgaaggagatagagacacaaaaaagccttcaaaaaatcaatgaatccaggagctggttttttgaaaagatcaacaaaattgatagaccactaccaagactaataaagaagaaaagagagaagaatcaaatagacacaataaaaaatgataaaggggatatcaccaccaatcccacagaaatacaaactatcagcagagaatactataaacacctctatgcaaataaactagaaaatctagaagaaatggataaattcctggacacatacaccctctcaggactaaacaaggaagaagttgaatctctgaatacatcaataacaggctctgaagttgaggcaataattaatagcataccaaccaaaaaaaagtccaggaccagatggattcacagccgaattctaccagagcttagcagagacacaacaaaaaaagagaattttagaccaatatccctgatgaacatcgatgtgaaaatcctcaataaaatgctggcaaacggaatccagcagcacatcaaaaagcttatccaccatgatcaagtgggcttcatccctgggatgcaaggctggttcaacatacacaaatcaataaatgtaatccagcatataaacagaaccaaggacaaaaaccacatgattatctcaatagatgcagaaaaggcctttgacaaaattcaacagcccttcatgctaaaaactctcaataaattagatattgatgggacatatctcaaaataataagagctatttatgacaaacccacagccaatatcatactgaatgggcaaaaactggaagcattccctttgaaaagcagcacaagacagggatgccctctctcaccacacctattcaacatagtgttggaagttttggccagggcaatcaggcaagagaaagaaataaagggtattcaattaggaaaagaggaagtcaaattgtccctgtttgcagatgacatgattgtatatttagaaaaccccatcatctcagcccaaaatctccttaagctgataagcaacttcagcaaagtctcaggatacaaaatcaatgtgcaaaaatcacaagcattcctatacaccagtaacagacaaacagagagtcaaatcatgagtgaactcccattcacaattgcttcaaagagaataaaatacctagaaatacaacttacaagggatgtgaaggacctcttcaaggagaactacaaaccactgctcaacgaaataaaagaggacacaaacaaatggaagaacattccatgctcatggataggaagaatcaatattgtgaaaatggccatattgcccaaggatgacaaaaaatgtgtcagtgatgatcatgatgctgacaatgacagtgacaatgacggcgataactttctgcaagtctcagcagcaaaatcttacatctctcattactttcctgtgataaggctcctcacagcatactggaggagactctccaacagccttgaaaaggcaaagggccatgatgtggaagggccatgtggcaaggaattagtagttggcctttag

SEQ ID NO: 7496 - DNA, 762 bp, Homo sapiens
  SIMILAR (513)..(4): 921254mologous to Homo sapiens p40,accession number U93564,Smith-Waterman Score=805.
ttacaatttggcatgattttgcagtggctggtaccggttgttcctttccatgttgagtgcttccttcaggaactcttttagggcaggtctggtggtgacaaaatctctcagcatttgcttgtctgtaaagtattttatttctccttcacttatgaagcttagtttggctgggtatgaaattctgggttgaaaattcttttctttaagaatgttgaatattggcccccactctcttctagcttgtagagtttctgccaagagatcagctgttagtctgatgggcttccctttgtgggtaacccaacctttctctctggctgcccttagcattttttccttcatttcagctttgctgaatctgacaattatgtgtcttggggttgctcttctggaggaatatctttctagtgttctctgtatttcctgaatttgaatgttggcctgccttgctagattggggaagttctcctgcataatatcctgcagagtgttttccaacttggttccattctcccctttggtctttgatggtgacatacagatgggtttttggtgtggatgtcctttctgtttcttagttttccttctaacagtcaggaccctcagctgcaggtctgttggagtctgctggaggtccactccagaccctgtttgcctgggtatcagcagcagaggctgcagaacagcagatattggtgaacagcaattgttgctgcctgatcgttcctctggaagttttgtctcagaggagtacccggccat

SEQ ID NO: 7497 - DNA, 483 bp, Homo sapiens
  SIMILAR (307)..(92): 751254mologous to Homo sapiens Human secreted protein, SEQ ID NO: 4473,accession number G00392,Smith-Waterman Score=279.
gttgtgattttagtggaacctgcaggcagactttaagtatcttaacccagccattgagacagtggggcttagaaggtatcaagaaaccaaacagctggattataagtgaagagtcagtcagtaatggagggcctccgctgctgatacccaggcaaacagcgtctggagtggacctccagcaaactccaacagacctgcagctgagggtcctgactgttagaaggaaaactaacaaacagaaaggaatagcatcaacatcaacaaaaaggacatccacaccaaaaccccatctgtacgtcaccatcatcaaagaccaaagttacataaaaccacaaagatggggaaaaaacatagcagaaaagctgaaaattctaaaaatcagagtggctctctccctccaaaggaatgcagctcctcaccagcagtggaacaaagctggacggagaatgagtttgatgagttcacagaagaaggcttcagaag

SEQ ID NO: 7498 - DNA, 1593 bp, Homo sapiens
  SIMILAR (89)..(3): 751254mologous to Homo sapiens p40,accession number U93569,Smith-Waterman Score=112.
tcaggtacaccaatcagacatagatttggtcttttcacatagtcccatatttcttggaggctttgtttcttttctttttattcttttttctctaaacttctcttctcgcttcatttcattcattttgtcttccatcgctgatatcctttcttctaattggttgcattggctactggggcttgtgcattcgtcacgtagttctcgtgctgtggttttcagctccatcaggtcctttaaggacttctctgcattggttattctagttatccattcgtctaattttttttcaaagtttttaacttctttggcattggttcgaacttcctcctttagctcggagtagtttgatcttctgaagccttcttctctcaactcgtcaaagtcattctccatccagctttgttccattgctggtgaggagctgtgttcctttggaggaggagaggtgctctgatttttagtttccggtttttctgctctgttttttcccccatctttggtctttgatgatggtgacgtacagatgggtttttggtattgatgtcctttctgtttgttcgttttccttctaacagtcaggaccctcagcagcaggtctgttggagtttgctggaggtccactccagaccctgtttgcctgggtatcagcagcggtggctgaagaacagtggatattggtgaaccgcaaatgctgctgcctgattgttcctctggaagttttgtctcagaggagtacccggccgtgtgaggtgtcagtccatccctgagatgccaggagatggctagggacaaaaaaagaagttgatgattattggcattaatagcaggaaccaccatggtcctcagtgacccgctctgcagaagatgccagcatcttaggtcactgagataatgaacaatcattttctcttttgcttcagaaaaggaaagggaagaataaaacttgtcaatagtagggtagagcaccaagcaggctcctggggtccctggtttcagtccttggttgctggacaatatttctggacctgctctgggccagatgggagcccacttccctgaaaggagagacccaagcctggcatcattcatcacaagctgactgaagagctcgtaggcaggctcaacaccagatggaagctgccaaggcttgggccttccaccctctgaagccacagcccatgctctatgttggccccattcagccatagctggagtggctggatcacagtgcaccaagtccctaggctcttgaatgctttgctgcttagaaatttcttctgcctgataccctaaatcacccctttcaagttcaaagttccacaaatctgtagggcaggagcaaaatgccaccagtctctttgctaaaacataacaagggtcacccttgctccatttcccaacaagtttctcatttctatctgagaacacctcagcctggacattattgtccataacactatcagaattttgggcaaagccattcaacaagtctctatgaagttccaaactttcccacattttcctgtcttcttctgagccctccaaactgttccaacctccgcctgttacccggttccaaagtcgcttccacat

SEQ ID NO: 7499 - DNA, 4563 bp, Homo sapiens
  SIMILAR (712)..(3318): 971254mologous to Homo sapiens Human cancer associated antigen precursor (MO-REN-46),accession number Y92241,Smith- Waterman Score=4306.
atgaaacatactttgataccaagaattaaaaatgcctgtctacaaatgtcttcccttgctgttcctgtaaattcattagtgtgcttaggaaagattttggaatacttggataagtggttggtacttgatggtatcctacccttcttacaacaaattccatccaaagagtctgcagtcctcatgggtattttaggcatttacaaatgtacttttactcataagttgggaatcaccaaagagcagctgactggaaaagtattgcctcatcttattcccctgagtattgaaaacaatcttaatcagttcaattctttcatttccatcataaaagagatgctgaataggttggagtctgaacataagactaagctggagcaacttcatataatgcaagaacaacagaaatctttggacataggaaatcaaatgaatgtttctgaggagacaaaagttacaaatattgggaatcagcaaattgacaaggtttttagccacattggagcagaccttctgactggcagtgattccgaaaataaagaggatggtgctttgaatgttcctcctgctggtgcgaagccaacccaacaaagacccacagatatgtctgcccttaataatctctttggccctcagaaacccaaagttagcatgaaccaattatcacaacagaaaccaaatcagtggcttaatcagtttgtacctcctcaagtttctccagctacgggcagttcagtaatgggaacacagatgaacatgataggacaatctgcctttgatgtctgctccaatgaggatctccctgaagttgagctggtgagtctgctagaagaacaactaccacagtataggctaaaagtagacactctctttctatatgaaaatcaagactggactcagtctccacaccagcggcagcatgcatctgatgctctctctccagtccttgctgaagagactttccgttacatgattctaggcacagacagggtggagcagatgaccaaaacttacaatgacatcgacatggttacacatctcctggcagagagggatcgtgatctggaactcgctgctcgaattggacaagctctcttaaagcggaaccatgtcttatctgagcagaacgaatccctggaggagcaattgggacaagcctttgatcaagttaatcagctgcagcatgagctatgcaagaaagatgagttacttcgaatcgtctccattgcttctgaagaaagtgaaactgattccagctgttctacacctcttcggttcaatgagtcctttagcttatctcaagggttgctgcagttggaaatgctgcaagaaaagctcaaggaactggaagaagagaatatggctcttcgatccaaggcttgtcacataaagacagaaactgttacctatgaagaaaaggaacaacagcttgtcagcgactgtgttaaagaacttcgtgaaacaaatgctcagatgtccagaatgactgaagaattgtcagggaagagtgatgagctgattcgataccaagaagagctttcctctcttttgtcacagattgtagaccttcagcacaaacttaaagaacatgtgattgagaaggaagaactaaaacttcacctgcaagcttccaaagatgcccaacggcaactgacaatggagctgcacgagttacaagacaggaatatggagtgtctaggaatgttacatgaatcccaagaagaaataaaggaacttcgtagtagatctggccctactgctcatctctacttctcccaatcatatggagcttttactggggaatctttggcagctgagattgaggggactatgcgtaaaaagctgagtttggatgaggaatcttctctctttaaacaaaaagcccaacagaagcgggtatttgataccgtcaggattgccaatgacacacggggccgctctatctcattcccagctctgttacccattccaggctccaaccgttcaagtgtcatcatgacagcaaaaccttttgagtctggtcttcagcaaacagaggacaaatcactcctgaaccaggggagcagctcagaggaggttgcagggagctcccagaagatgggccaaccaggaccctcaggagatagtgatttggctacagcactgcatcgccttagcttgcgtcgacaaaactatttaagtgagaagcagttctttgctgaagaatggcagcggaagatccaggttctggcagaccagaaggaaggagttagtggctgtgtcaccccgacagagagccttgcctctctctgcaccacccagtcagagatcacagacctcagcagtgccagttgccttcgaggttttatgccagaaaaattacaaattgtcaagccccttgaaggatcacaaactctgtatcactggcagcagcttgctcaaccaaacttgggaaccatccttgatccacgaccaggtgtcattactaaaggctttacccagttgcccggggatgctatttatcacatctcagatttagaagaggatgaagaggagggtattacttttcaggttcagcaacctcttgaagtggaagagaaactttcaacatccaagccagtaacagggatcttcctgccacccattacttcagcaggtggaccagttacagttgcaaccgccaacccaggaaagtgcctgtcgtgcacaaactcaacattcactttcaccacctgtagaatattacatccctctgacatcactcaggttacccccagctctgggttcccttcattatcctgtggaagtagcggtagcagttcatccaacacggctgtgaattctcctgccttgtcctatagactcagcattggtgagtccatcaccaaccgacgagattccactacaaccttcagtagcaccatgagcttggccaaacttctacaagagcgaggcatctctgccaaagtgtaccacagcccaatttcagagaaccccctccagcctctccctaaatccctggctatcccttccacaccaccaaattcaccatctcactcaccttgcccttctcctttaccctttgagcctcgagtgcatctctctgaaaattttttggcctctcgaccagctgagacattcctccaggagatgtatggcttgagaccctcccggaaccctcctgatgttggccagttgaagatgaacttagtggacaggctgaagagactggggatagccagagtggtcaagaaccctggtgcccaagagaatggaagatgccaggaggcagaaattggtcctcaaaaaccagattctgctgtttatttaaattcaggggctttgaccacgacctttgaagagcttcattttgagatcaagccccacgatgactgcacagtagagcaaatctatgagattttgaaaatctaccaactcatggaccacagtaacatggactgcttcatctgctgtatcctctcccatggagacaagggcatcatctatggcactgatggacaggaggcccccatctatgagctgacatctcagttcactggtttgaagtgcccttcccttgctggaaaacccaaagtgttttttattcaggcttgtcagggggataactaccagaaaggtatacctgttgagactgattcagaggagcaaccctatttagaaatggatttatcatcacctcaaacgagatatatcccggatgaggctgactttctgctggggatggccactgtgaataactgtgtttcctaccgaaaccctgcagagggaacctggtacatccagtcactttgccagagcctgagagagcgatgtcctcgacagtcacaatattatgtgatgtatttcagaggcgatgatattctcaccatcctgactgaagtgaactatgaagaaccagaagcagctgcatgtaatggcaagaccatcagactcccaggggagatggatttaaaaaccaccctcagtcatagaactgagcaaactcagaaactggaagacaaatgtcctgtgttgttttgcatagaaacaaggacacagcctccgctgctgatacccaggcaaacagggtctagagtggacctccagcaaactccaacagacctgcagctgagggtcctgactgttagaaggaaaactaacaaacagaaaggatatccacaccaaaaccccatctgtacgtcactgtcatcaaagaccaaagagaagtccttaaaggacctgatggagctgaaaaccatggcacaagaagtatgtgacaaatgcacaagcctcagtagccgattcgatcaactggaagaaagggtatcagtgatggaagatcaaatgaatgaaatgaagcaagaagagaagtttagaaaaaaaagaataagaagaaatgaacaaagcctccaagaaatatgggactatgtgaaaagaccaaatctacgtctgattggtgtacctgaaagtgacagggagaatggaaccaagttggaaaacactctgcaggatattatccaggagaacttccccaaccgagcaaggcaggccaacaatcagattcaggaaatacagagaacagcataa

SEQ ID NO: 7500 - DNA, 1359 bp, Homo sapiens
  SIMILAR (286)..(621): 721254mologous to Homo sapiens NAG13,accession number AF194537,Smith-Waterman Score=403.
atgttgacattgcgggatctgggatccaggtatagtgagattcgtggcccatgcctggggctgtctccgactcgggtggtaggcaaggaagagcttgtcatgtcgtacatggatggcacactcaatacgggagcttcacatatgagaaatcaacagcttcaggcacagctattactgtggatgtgtcttcactatcttcatctagcagatccccagttatttgtgcacgagaaaattgacttcattacctacaagacgtcattacctggtaaaatgtccagtgatcgagctttgaggaagcagcaacagttgaacaaccttgtctatgtggtaacaaatcaggccaaacctggtgacagaattgtggatttctgcagcgaaatacaaactaccatcagagaatactataaacacctctacgcaaataaactagaaaatctagaagaaatggataaattcctggacacatacaccctcccaagactaaatcaggaagaagttgaatctctgaatagaccaataacaggctctgaaattgaggcaataattaatagcttaccaaccaaaagaagtccaggaccagatggattcacagccgaattctaccagaggctaaaacagtgccgaaaagcacatctagacccagtgtctctcacacaccggagcggccccggagcgcgggaggaccggctgagtgacagcggagacgcgtcccgaggttgttggaacctgtcacagcacgccgccgtcacgtcgcccgagtctgaggagcggcgcatcaggaccctcagctgcaggtctgttggagtttgccggaggtccactccagaccctgtttgcctgggtatcagcagtggaggctgcagaacagtgaatattggtgaacagcaaatgttgctgcccgatcgttcctctggaagttttgtctcagaggggtaccgtccgtgtgaggtgtctgcccctactggggggtgccctccagttaggtgtctgatgatcaacactgtgtccttaataggtgtcaagtttactgaagtgtttgattcaataaacatatctgaacatctagagcttgcatgcctgcaggatcacaactccttgctagcaagggaacaaaactggacagaggatgagtttgacgaattaacagaagtaggcttcagaaggtgggtaataacaaactcctctgagctaaagaagcatgttctagtcagatgcaaggaagctaagaaccttgaaaaaacattagaggaattgctaactagaattaccagtttagagaagaacataaatgacctgatggagctgaaaaacacaacacaagaacttcgtgaagcatacacaagtatcaatagctga

SEQ ID NO: 7501 - DNA, 915 bp, Homo sapiens
  SIMILAR (827)..(913): 751254mologous to Homo sapiens p40,accession number U93564,Smith-Waterman Score=112.
atgcagatacggcaacagtggcgaaaagacttggatcacaacacccaagttcttcaaaagccttcccaagaaggatggcttcaaacaaacccagactgtgaagactacaatagatatttaattcttcaatgcctagacaacaatgaacatacggatggactgacacctcacacggccgggtactcctctgagacaaaacttccagaggaacaatcaggcagcagcatttgcggttcaccaatatccactgttcttcagccaccgctgctgatacccaggcaaacagggtctggagtggacctccagcaaactccaacagacctgctgctgagggtcctgactgttagaaggaaaacgaacaaacagaaaggacatcaataccaaaaacccatctgtacgtcaccatcatcaaagaccaaagatgggggaaaaaacagagcagaaaaaccggaaactaaaaatcagagcacctctcctcctccaaaggaacacagctcctcaccagcaatggaacaaagctggatggagaatgactttgacgagttgagagaagaaggcttcagaagatcaaactactccgagctaaaggaggaagttcgaaccaatgccaaagaagttaaaaactttgaaaaaaaattagacgaatggataactagaataaccaatgcagagaagtccttaaaggacctgatggagctgaaaaccacagcacgagaactacgtgacgaatgcacaagccccagtagccaatgcaaccaattagaagaaaggatatcagcgatggaagacaaaatgaatgaaatgaagcgagaagagaagtttagagaaaaaagaataaaaagaaaagaaacaaagcctccaagaaatatgggactatgtgaaaagaccaaatctatgtctgattggtgtacctga

SEQ ID NO: 7502 - DNA, 771 bp, Homo sapiens
  SIMILAR (771)..(304): 921254mologous to Cloning vector pZC320 SopA,accession number U26464,Smith-Waterman Score=777.
ttagttgactgtcagctgtccttgctccaggatgctgtttttgacaacggatgttttattgcctttgatgttcattaagaagcttggcgcaaatgttgcctttttatcctcgaagaagcctctgtttgtcatgtagcttgtgataaccacattgttgcctttggcttgcggcactttggtctttgatgatggtgacatacagatggggtttcggtgtggatgtcctttctgtttgttagttttccttctaacagtcaggaccctcagctgcaggtctgttggagtttgctggaggtccactccagaccctgtttgcctgggtatcagcagcagaggatcaggctcgaaccctttaagatcaacgttcttgagcagatcacgaagcatatcgaaaaactgcagtgcggaggtgtagtcaaacaactcagcaggcgtgggaacaatcagcacatcagcagcacatacgacattaatcgtgccgatacccaggttaggcgcgctgtcaataactatgacatcatagtcatgagcaacagtttcaatggccagtcggagcatcaggtgtggatcggtgggcagtttaccttcatcaaatttgcccattaactcagcctcaatacggtgcagagccagacaggaaggaataatgtcaagccccggccagcaagtgggctttattgcataagtgacatcgtccttttccccaagatagaaaggcaggagagtgtcttctgcatgaatatgaagatctggtacccatccgtgatgcat

SEQ ID NO: 7503 - DNA, 482 bp, Homo sapiens
  SIMILAR (236)..(421): 691254mologous to Rattus norvegicus salt-tolerant protein,accession number AB006914,Smith-Waterman Score=264.
gcccgacgttgcatgctgccgggcgccatggacgcgggattttcccgggtcgacgatttcgtggcttctccagtcgcgtctttctcactcactggggagcccggcggtggcggcacctttcgaggtagacccgctgagctgctagcccgccggccagcgagtgagaggtcggacagactgtggagccgacagactgaaggacagcggcaccgccagacggccagaaagttccgccatgagctggggcacggagctgtgggatcagttcgacagcttagacaagcatacacaatggggaattgacttcttggaaagatatgccaaatttgttaaagagaggatagaaattgaacagaactatgcgaaacaattgagaaatctggttaagaagtactgccccagacgttcatccaaagatgaagagccacggcttacctcgtgtgtagccttgtttaatatcacttaatgagttaaatgactat

SEQ ID NO: 7504 - DNA, 1961 bp, Homo sapiens
  SIMILAR (1329)..(1961): 901254mologous to Homo sapiens putative p150,accession number U93563,Smith-Waterman Score=979.
ttcccatgggaacctagagaaggactttccctatattccccacctctttgggcttcagcaaaagaaaatggacctcaagggagtcttcaagagctgcttcaaaatttactgttcatcaaagcacttgctgaagactggcttcatttcagaggctgtgctgtgttatggagaaggaggtgaaggagatacggtgcttaccatgaaggagaggtggccacatgaatgcatcgttttaatacagtgcaataagggcagactgacacctcacacggccagatactcctctgagacaaaacttccagaggaacgatcaggcagcagcatctgcggttcaccaatatccgctgttctgcagccaccgctgctgattcccaggcaaacagggtctggagtggacctccagcaaactccaacaaacctgcagctgagggtcctgactgttagaaggaaaactaacaaacagaaaggacatccacaccaaaaacccatctgtatgtcaccatcatcaaagaccaaagactttaaaccaacaaagatcgaaagagacaaagaaggccattacataatggtaaagggatcaattcaacaagaagagctaactatcctaaatatatatgcacccaatacaggagcacccagattcataaagcaagtcctgagtgacccacaaagagacttagactcccacacattaataatgggagactttaacaccccactgtcaacattagacagatcaatgagacagaaaggcaacaagggtatccaggaattgaactcagctctgcaccaagcagaccaaatagacatctacagaactctccaccccaaatcaacagaatatacaatcttttcagcaccacaccacacctattccaaaatcgaccacatagttggaagtaaagcattcctcagcaaatgtaaaagaacggaaattataacaaactgtctctcagaccacagtgcaatcaaactagaactcaggattaagaaactcattcaaaaccactcgactacatggaaactgaacaacctgctcctgaatcactactgggtacataacgaaatgaaggcggaaataaagatgttctttgaaaccaatgagaacaaagacacaacgtaccagaatctctgggacacactgaaagcagtgtgtagagggaaatttatagcactaaatgcccacaagagaaagcaggaaagatctaaaattgacaccctgacatcacaattaaaagaactagagaagcaagagcaaatacattcaaaagctagcagaaggcaagaaataactaagatgagagaagaactgaaggaaatagagacacaaaaaacccttcaaaaaaatcagtgaatccaggagctggttttttgaaaagttcaacaaaattgatagacggctagcaagactaataaagaagaaaagagagaagaatcaaatagacgcaataaaaaatgacaaacgggatatcaccactgatcccacagaaatacaaactaccatcagagaacactataaacacctctacgcaaataaactagaaaatctagaagaaatggataaattcctcgacacatacaccctcccaagactaaaccaggaagaagttgaatctctgaatagaccaataacaggctctgaaattgaggcaataattaatagcttaccaaccaaaaaaagtccaggaccagatggattaacagccaaattctaccagaggtacaaggaggagctggtaccattccttctgaaactattccaatcaatagaaaaagagggaatcctccctaactcattttatgaggtctgcatcatcctgataccaaagcctggcagaggcactacaaaaaaagagaattttagaccaatatccttgatgaacattgatgcaaaaatccttaataaaatactggcaaaccgaatccaacaactcatcaaaaagcttatccaccatgatcaa

SEQ ID NO: 7505 - DNA, 787 bp, Homo sapiens
  SIMILAR (338)..(784): 891254mologous to Homo sapiens p40,accession number U93569,Smith-Waterman Score=674.
cagagcagcccggacttcctacttgacagctcagaggaggaagcaggcgttgccagtcctgcgaaaggatagcagcaaaatcagcacaacatcacttctgttaccagaaaggggtcccaatccagaccccaagaaagggttcttagattctcatccaagaaataattcagggcaacctccgctgctgatacccaggcaaacagggtctggagtggacctccagcaaactccaacagatctgcagctgaggatcctgactgttagaaggaaaactaaccaacagaaaggacatccacaccaaaaccccatctgtacgtcaccatcatcaaagaccaaagcaaggcaggccaacattcaaattcaggaaatacagagaatgccacaaagatactcctcaagaagagcaactccaagatgcataattgtcagattcaccaaagttgaaatgaaggaaaaaatgttaagggcagccagagagaaaggtcaggttacccacaaagggaaccccatcagactaacagcagatctcttggtaaaaactctacaagccagaagagagtgggggccaatattcaacattctcaaagaaaagaattttcaacccagaatttcatatccagccaaactaagcttcataagtgaaggagaaataaaatcctttacagacaagcaaatgctgagagatttcggcaccaccaggcctgccctaaaagagctcctgaaggaagcactaaacatggaaaggaacaaccagtaccagccactgcaaaaacatgtcagattgtaa

SEQ ID NO: 7506 - DNA, 1167 bp, Homo sapiens
  SIMILAR (1092)..(1166): 841254mologous to Homo sapiens NAG13,accession number AF194537,Smith-Waterman Score=122.
atgttctttgaaaccaacgagaacaaagacaccacataccagaatctctgggacgcattcaaagcagtgtgtagagggaaatttatagcactaaacgcctacaagagaaagcaggaaagatccaaaattgacaccctaacatcacaattaaaagaactagaaaagcaagagcaaacacattcaaaagctggcagaagccaagaaataactaaaatcagagcagaactgaaggaaatagagacacaaaaaacccttcaagaaatcaatgaatccaggagctggttttttgaaaggatcaacaaaattgatagactgctagcaagactaataaagaaaaaaagagagaagaatcaaatagacacaataaaaaatgataaaggggatatcaccaccgatcccacagaaatacaaactaccatcagagaatactacaaacacctctacgcaaataaactagaaaatctagaagaaatggatacattcctcaaatgggccttaagcacaattgaaatacaggcctggagaagcaaacagcctccactgctgatactcaggcaaacagggtctggagtggacctccagcaaactccaacagacctgcagctgagggtcctgactgttagaaggaaaactaacaaacacaaaggacatccacaccaaaaccccatctgtacgtcaccatcatcaaagaccaaagaaaatctagaagaaacggataaattccttgacacatacactctcccaagactaaaccaggaagaagttgaatctctgaagagaccaataacatgctctgaaattgaggcaataattaatagtttaccaatcaaaaaaagtccaggaccagatggattcacagccaaattctaccagaggtacaaggaggagctggtaccattccttctgaaactattccaatcaacagaaaaagaggcaatcctccctaactcattttatgagaccagcgtcatcctgataccaaaacctggcagagacacaacaaaaaaagagaattttagaccaatatccctgaagaacatcgattcaaaaatcctcgataaaatactggcaaaccgaatccagcagcacatcaaaaagctatccaccatgatcaagtgggcttcatccctgggacgcaagcctggttcaacatatgcaaatcaataa

SEQ ID NO: 7507 - DNA, 2673 bp, Homo sapiens; identical to SEQ ID NO: 3747
  SIMILAR (97)..(1842): 901254mologous to Homo sapiens human homolog of Drosophila lethal discs large 1; Method: conceptual translation supplied by author,accession number U37707,Smith-Waterman Score=2629.

SEQ ID NO: 7508 - DNA, 690 bp, Homo sapiens
  SIMILAR (313)..(32): 1001254mologous to Homo sapiens Protein sequence encoded by clone p199-7 (PL mutet.rsT4),accession number P93369,Smith-Waterman Score=542.
tcaacaagatggtgaattgactagtgggtagatccacaggacgggtgtggtcgccatgatcgcgtagtcgatagtggctccaagtagcgaagcgagcaggactgggcggcggccaaagcggtcggacagtgctccgagaacgggtgcgcatagaaattgcatcaacgcatatagcgctagcagcacgccatagtgactggcgatgctgtcggaatggacgatatcccgcaagaggcccggcagtaccggcataaccaagcctatgcctacagcatccagggtgacggtgccgaggatgacgatgagcgcattgttagatttcatacacggtgcctgaacggccgggtactcctctgagacaaaacttccagaggaacgatcaggcagcaacatttgctgctcaccaatatccactgttctgcagcctccactgctgatacccaggcacacagggcctggagtggacctccagcaaacaccaacaaacctgcagctgagggtcctgactactctggccaggtgatgagaggctgtggccctcttgggaagagcagaagaaactttctcttccaactgatcctgacacttggctctgaggaagccctcaggctgctcagggtcccaggtgtgtgcctccacctggggctcaaccgctgagctctgtgactgcttcgctgtgccactgtgcat

SEQ ID NO: 7509 - DNA, 2317 bp, Homo sapiens; identical to SEQ ID NO: 6258
  SIMILAR (863)..(2296): 891254mologous to Homo sapiens putative p150,accession number U93563,Smith-Waterman Score=2181.

SEQ ID NO: 7510 - DNA, 1239 bp, Homo sapiens; identical to SEQ ID NO: 1384
  SIMILAR (1133)..(954): 811254mologous to Homo sapiens Human secreted protein HLYES38, SEQ ID NO:220,accession number Y86305,Smith-Waterman Score =247.

SEQ ID NO: 7511 - DNA, 834 bp, Homo sapiens
  SIMILAR (271)..(813): 631254mologous to Homo sapiens putative p150,accession number U93569,Smith-Waterman Score=573.
atgtgtaatgcacaagtcctggaatacatggggaaatcatcatcactactgaccagcgacttgcagcttgttcgagatgctctccgcagcctgcgcaacagcttcagtggccacgatcctcagcaccacactattgacagcttggagcagggcatttctagcctcatggagcgcctgcatgttatggagacgcagaagaaacaagaaagaaagcctccactggtgatacccaggcaaacagggtctggagtggacctccagcaaactccaacagacctgcagctgagggacctgactgttagaaggaaaactaacgaacagaaaggaatagcatcagcatccacaaaaaggacatctacaccaaaaccccatcgtaggtcaccaacatcaaagaccaaagcaccacattgcacttattctaaaatttaccacataattggaagtaaaacactcttcagcaaatgtaaaagaaaagaaatcacaacaaacagcctctcagaccacggggcaatcaaattagaactcaggattaagaaactcactcaaaatggcacaactacctggaaactggacaacctgctcctgaatgactgctggttaaataacgaaatgaaggcagaaataaagatgttctttgaaaccaatgagatcaaagacacaatgtacaagaatccctgggacacatttaaagcagtgtgtacaggggaatttatatcactaaatgcccacaagagaaagcaagaaagatctaaaattgacatccgaacatcacaattaaaagaactagagaagcaagagcaaacaaattcaaaactagtagaaggcaagaaataa

SEQ ID NO: 7512 - DNA, 915 bp, Homo sapiens
  SIMILAR (346)..(912): 871254mologous to Homo sapiens p40,accession number U93566,Smith-Waterman Score=810.
atggccatggacaaagacttcatgactaaaacaccaaaagcaatggcaacaaaagccaatattgacaaatgggatctaattaaactaaagagcttctgcacagcaaaagaaactatcatcagagtgaagaggtattcttctgagacaaaacttccagaggaacgatcaggcagcagcatttgcggttcaccaatatctgctgttctggagccactgctgctgatacccaggcaaacagggtctggagtggacctccagcaaactccaacagacctgcaactgagggtcctgactgttagaaggaaaactaacaaacagaaaggacatccacaccaaaaacgcatctgtacgtcaccatcatcaaagaccaaagagaagtccttaaaggacctgatggagctgaaaaccacggcacgagaactatgtgacgaatgcacaagcctcagtagccaacgtgatcaactggaagaaagggtatcagcaatggaagacgaaatgaatgaaatgaagcgagaagagaaggttagagaaaaaagaataaaaagaaacgaacaaagcctccaagaaatatgggactatgtaaaaagaccaaatctacgtctgattggtgtacctgaaagtgatggggagaatggaaccaagctggaaaacactctgcaggatattatccaggagaacttccccaatctagcaaggctggccaacattcaaattcaagaaatacaaagaacaccacaaagatactcctcaagaagagcaaccccaagacacataattctcagattcaccaaagttgaaatgaaggaaaaaatgttaagggcagccagagagaaaggtcgggttacccacaaagggaagcctgtcagactaacagctgatctgtcggcagaaactctacaagccagaagacagtag

SEQ ID NO: 7513 - DNA, 666 bp, Homo sapiens
  SIMILAR (337)..(513): 791254mologous to Homo sapiens Human secreted protein HLYES38, SEQ ID NO:220,accession number Y86305,Smith-Waterman Score =231.
  misc_feature (1)...(666): n = a,t,c or g
atggttgatgtctttggtgttggaagctgcgatggtctagagcagggtatcagaacctgggtcttgaggagtgtaggaggtggcctggaatgtcccaaagtatttgctgatgtggagccaggaggatgtatgatctcaggctttgaaactaaagaggatcagttcgacagcttagacaagcatacacaatggggaattgacttcttggaaagatatgccaaatttgttaaagagaggatagaaattgaacagaactatgcgaaacaattgagagaaaacagtgtagcacatttatatctcacagcacaaagagaatttaagctttctgaagaagaagtcanggtcaggaccctcagctgcaggtccgttggagtttgctggaggtccactccagaccctgtttgcgtgggtatcagcagtggaggctgcagaacagcggatattggtgaacagcaaatgctgctccctgatcgttcctctgaaagttttgtctcagaggagtacctggccatggtgtttccaaaaacggagccaaaacagcagaagaaggaggaggaggagaaaggggagctaagtccagacaaggaggttctgacaaaagagaaagaggaactgaagggcgaggagaaattttggcagtctttttccgttcagaaattattttag

SEQ ID NO: 7514 - DNA, 793 bp, Homo sapiens
  SIMILAR (596)..(790): 931254mologous to Homo sapiens Protein sequence encoded by clone p199-7 (PL mutet.rsT4),accession number P93369,Smith-Waterman Score=336.
atggagtttttcctcctgcttttgagaatcttttgtttcctgcttctaacaacctatgctcatatgtgtgagcaaagaaataacataaaactggaacttatatttaaagaggaagcagagtgtaaaactttgaaaaatgtgcagcccagctacgtggtagaaaagaaaaatccattttcaggggagaaattcaagctggctgcagaaattcgcataactaaaaggaaggcaaatgcttacacaatgggggaaaggcctcgatggcatttcagtgaccttcacagcagcccctctttacaggcccagagaggtctagaaggatataatgatcttgttggctgtgtccagggccctgctgtcctgcacagcctcagaacactgctcccttcatcccagaagcttgaactccagccatggctgaaaggggcccagctacagctgcaggtcagttggagtttactggaggtgcactccagaccctgtttgcctgggtatcagcagcggcggctgcagaacagtggatattggtgaaccgcaaatgctgctgcctgatcgttcctctggaagttttgtctcagaggagtacctggccgtgcataggcttggttatgccggtactgccgggcctcttgcgggatatcgtccattccgacagcatcgccagtcactatggcgtgctgctagcgctatatgcgttgatgcaatttctatgcgcacccgttctcggagcactgtccgaccgatttggccgacgaccaggcctgctcgcttcgctacttggagccactatcta

SEQ ID NO: 7515 - DNA, 1845 bp, Homo sapiens
  SIMILAR (530)..(1123): 941254mologous to Homo sapiens putative p150,accession number U93572,Smith-Waterman Score=950.
atgcagagctgcccagggagctccagactgggcgccgcagggacggggctgaacgcggggatcccggctgcgggcccagccgccatcttgcggccagaggggcctggggctgaactgcgccagcagggacctcagccaccgctgctgatacccaggcaaacagggtctggagtggacctccagcaaactccaatggacctgcagctgagggtcctgactgttagaaggaaaactaacaaacagaaaggacatccacaccaaaaacccatctgtacctcaccatcatcaaagaccaaagaaatacaaactaccatcagagaatactatcaacacctctacacaaataaactagaaaatctagaagaaatggataaattctttgacacatacaccctcccaagactaaaccaggaagaagttgaatctctgaatagaccaataacaggctctgaaattgaggcaataattaataacttaccaaccaaaaaaagtccaggaccagatggattcacagccgatttctaccagagtgttggaagttctggccagggcaatcaggcaggagaaggaaataaagggcattcaattaggaaaagaggaagtcaaattgtccctgtttgcagatgacatgattgtatatctagaaaaccccatcgtctcagcccaaaatctccttaagctgacagccaacttcagcaaagtctcaggatacaaaatcaatgtgcaaaaatcacaagcattcttatacaccaataacagacaaacagagagccaaatcatgagtgaactcccattcacaatggcttcaaacagaataaaatacctaggaatccagcttacaagggatgtgaaagacctcttcaaggagaactataaaccactgctcaatgaaataaaagaggatacaaacaaatggaagaacattccatgctcatgggtaggaagaatcaatatcatgaaaatggccatactgcccaaggtaatttatagattcaatgccatccccatcaggctaccaagaactttcttcatagaattggaaaaaactactttaaagttcatatggaaccaaaaaagggcccacattgccaagtcaatcctaagccaaaagaacaaagctggagatatgtgaaacagagcaagaaaatagctgtctatgcagaaagaagcaggtgctcaccaggcactgaatttgctggcaccttgatcttggacttcccatcctccagaactgcaccctccagtaggggcagactgacgcctcacacggccaggtacccctctgagacaaagcttccagaggaacgatcaggcagcaacatttgctgttcagcaatattcgctgttctgcagcctctgctgctgatatccaggcaaacagggtctggagtggacctccagcaaactccaacagacctgcagctgagggaacgcagctcctcgccagcaacggaacaaagctggatggagaatgactttgacgagttaagagaaggcttcagacgatcaaactactccaagctaaaggaggaagttcaaacccattgcaaagaagctaaaaaccttgaaaaaagattagacgaatggataactagaataaccaatgtagagaagtccttaaatgacctgatggagctaaaaaacatggcaaaagaactacgtgatgaacgcacaagcttcagtagcgaattcaatcaactggaagaaagggtatcagtgattgaaaatcaaatgaacgaaatgaagcgagaagagaagtttagagaaaaaagagtaaaaagaaatgaacaaagcctccaagaaatatgggactatgtgaaaagaccagatgagatctacatctga

SEQ ID NO: 7516 - DNA, 2448 bp, Homo sapiens
  SIMILAR (2397)..(2447): 641254mologous to Homo sapiens putative p150,accession number U93563,Smith-Waterman Score=68.
atgaaagtccagaagcttctggcagccaccttttccatcacagtacagccagccttggggggcagactgacacctcacacggccgggtactcctctgagacaaaacttccagaggaacgatcaggcagcagcatttgctgttcaccaatattcgctgttctgcagcctcaactgctgatatccaggcaaacagggtctggagtggacctctggcaaactccaacagacctgcagctgagggtcctgtctgttagaaggaaaactaacaaacagaaaggacatccaccccaaaaacccatctgtacgtcaccatcatcgaagaacaaagttgcaaagctaacagctccttatgagaactcaaaaggcactccttatgttcccagcaataaagatctaaggcccaacagatttgtgagtatccaagagatcgaattctttcttctgaggggggcaagaattgaggttgttgcagacccgtatagaagtgaatttgccactgatgcagaaaaagcagttgacaaaatccaccatctctttatgattaaaaccctcagcaaaatggacattaaagggacgtaccttaaggtaataaaaatcatctatgacaaacccacagccaacatcatactgaatggggaaaagtttaaagcattccctcagagaactggagcaaaacaaggatgcccattttcaccatttctattcaacacattatcagaagttctagcgagagcaatcaaacaagagaaagaaatcaagggcatccaaatgggtaaagaggaagtcaaactgttgctttttgctgaagatatgaccgtatacctagaaaaccctaaagactcatccaaaaaactcctagaactgcctctgctgctgatacccaggcaaacagggtctggagtggacctccagcaagctccaacagacctgcagctgagggtcctgactgttagaaggaaaactaacaaacagaaaggacatccacagcaaaaccccatctgtacgtcaccatcatcaaagaccaaagacagatcaatgagacagaaagttaacaaggatatccaggaattgaactcagctctgcaccaagcagacctgatagacatctacagaactctccaccccaaatcaacagaatatacattcttctcagaaccacaccacacctgttccaaaattgaccacatagttggaagtaaagctctcctcaggaaatgtaaaagaacagaaattataacaaactgtctctcagaccacagtgcaatcaaactagaactcaggattaagaaacgcacgcaaaaccgctcaactacatggaaactgaacaacctgctcctgaatgactactgggtacataacgaaatgaaggcagaaataaagatcttctttgaaaccaaagagaacaaagacacaacataccagaatctctgggatgcattcaaagcagtgtgtagagggaaatttatagcactacatgcccacaagagaaagcaggaaagatctaaaattgacacactaacatcacaattaaaaggaccagagaagcaagagcaaacacattcaaaaactagcagaaggcaagaaataactaagatcagagcagaactgaaggaaatagagacaccaaaaacccttcaaaagctcaatgaatccaggagctgtttttttgaaaagatcaacaaaattgatagaccactagcaagactaataaagaagaaaagagagaagaatcaaacagatgcaataaaaaatgataaaggggatatcaccaccgatcccacagaaacacaaactaccatcagagactaccataaacacctctacgcaattaaactagaaaatctagaagaaatggataaattcctcgacacatacactctcccaagactaaaccaggaatctctgaatagaccaataacaggctctgaaattgaggcaataattaatagcttaccaaccaaaaaaaagtacaggaccagacggattcacagccgaattctatcagaggtacaaggaggagctgtgttggaagttctggccagggcaatcaggcaggagaaagaaataaagtgtattcaattaggaaaagaggaagtcaaattgtccctgtttgcagacgacatgattgtatatctagaaaaccccactgtttcagcccaaaatctccttaagctgataagcaacttcagcaaagtctcacgatacaaaatcaatgtgcaaaaatcacaagcattcttatacactaataacagacaaacagagagccaaatcatgagtgaactcccattcacaattgcttcaaagagaataaaatacctaggaatccaacttacaagggatgtgaaggatctcttcaaggagaactacaaaccactgctcaacgaaataaaagaggacacaaatggaagagcattccatgcccacggattggaagaatcaatatcatga

SEQ ID NO: 7517 - DNA, 4476 bp, Homo sapiens
  SIMILAR (3823)..(4473): 911254mologous to Homo sapiens putative p150,accession number U93574,Smith-Waterman Score=999.
ttatggtgatgtacagatggggttttggtatggatgtcctttctgtttgttagttttctttctaacggtcaggaccctcagctgcaggtctgttggagtttgctggaggtccactccagaccctgtttgcctgggtatcaccagcggaggcttttcaatttggatgccctttatttctttctcttgtctaattgctccagacattacttccactactatattgaaaaacagcagtaaaagtgggcattcttgtcttgttccagtcagcatgtcgttttttgactttttagtaattgccattctaactggtgcaagttggtatctcagcgtgattttgatttgcatttctctaatgatcagtgatgttgagctttttttcatatgttcatcagcctcatgtatgtctgcttttgagaagtatctgttcatgtcctttgcccactttttaatagggttgtttgcttttttcttgtaaatttgtttgagttctttgtagattctggatattagccctttgtcagataagtagattgcaaaaatgttctcccattctgtaggttgcctattcactctgacggtagtttcttttgctgtgcagaagctctttagtttaattagatcccatttgtcaattttggcttttgttgccattgcttttggtgttttagacatgaagtcctttcccatgcctatgtcctgaatggtattgcctaggttttcttctagggtttttatggttttaggtctaacatttaagtttttaatccatcttgaattaatttttctacaaggtgtaaggaagagatccagtttcagctttctacatacggctagccagttttcccagcaccatttattaaataggaaatcctttccccatttcctgcttttgtcagatttgtcaaagatcagatagttgtagatgtgtggcattatttctgagggctctgttctgttccaatggtctatatcgctgttttggtaccagtaccatgctgttttggttactgtagccttgtagtatagtttgaagtcaggtagcgtgatgcctccggctttgttcttttggcttaggattgtcttggcaatgcgggctcttttttggttccatatgaactttaaagtagttttttccaactctgtgaagaaagttatgggtagcttgatggggatagcattgaatctataaattaccttgggcagtatggccattttcacaatattgattcttcctatccatgagcatggaatgttcttccatttgtttgtgtcctcttttatttcattgagcagtggtttgtagttctccttgaagaggtccttcacatcccttgtaagttgtattcctaggtattttattctctttgaagcaattgtgaatgggagttcactcatgatttggctctctgtctgtctgttattggtgtataggaatgcttgtgatttttgcacattgattttgtatcctgagacttcgctgaagttgcttatcagcttaaggagattttgggctgagacgatggggttttctaaatatacaatcatgtcatctgcaaacagggacaatttgacatcctcttttcctaattgaataccctttatttctttctcttgcctgattgccctggccagagcttccaacactatgttgaataggagtggtgagagaggacatccctgtcttgtgccagtcttaaaagggaatgcttccagtttttgcccattcagtatgatattggctgtgggtttgtcataaatagctcttattattttgagatatgtcagatatgtcccatcaatacctagtttattgagagtttttagcataaagggctgttgaattttgtcaaaggccttttctgcttctattgagataatcatgtggtttttgtctttggttctgtttatatgatggattacgtttattgatttgagtatgttgaaccagccttgcatcccagggatgaagccaacttgatggtggtggataagctttttgatgtgctgctggatttggtttgccagtattttattgaggatttttgcatcgatgttcatcagggatattggtctaaaattctctttttttgttgtgtctctgccaggctttgatatcaggatgatgctggcctcataaaatgaattagggaggattccctctttttctattgattggaatagtttcagaaggaatggtaccagctcctctttgtacctctggtagagttcagctgtgaatctgtctggtcctggactttttttggttggtagactattaattattgcctcaatttcagaacctgttattggtctattcacagattcaacttcttcctggtttagtcttgggagggtgtatatgtccaggaatttatccatttcttctaggtgttctagtttatttgcatagaggtgtttatagtattctctgatggtagtttgtatttctgtgggattggtggtgatattccctttatcattttttattgcatctatttgattcttctctattttcttctttattagtcttgctagcagtctatcaattttgttgatcttttcaaaaaaccagctcctggattcattgatttttttgaagggctttttgtgtctctatttccttcagttctgctctgatctggcctttggtctttgatgatggtgacgtacagatggggttttggtgtggatgtcctttctgtttgttaagttttcctttctaacagtcaggaccctcagctgcaaggtctgttggagtttgctggaggtccactccagaccctgtttgcctgagtatcagcagtggtggctgcagaacagctgatattggtgaactgcaaatgctgctgcctgattgttcctctggaacttttgtctcagaggagtacccggccatgtgaggtgtcagtctgcccctactggggggtgcctcccagttaggctgctcgggggtcagggacccacttgaggaggcagtctgcccattttcagatctccagctgcgtgctgggagaaccactgctctcttcaaagctgtcagacagggacatttaagtctgcagaggtaactgctgtctttttgtttgtctgtgcccatattgccatgtaaaatcaaagtcctgagggaggagccaagatggccgaataggaacagctccagtctacagcccccagcatcagcgacgcagaagacgggtgatttctgcattaccaactgagcctccactggtgatacccaggcaaacagggtttggagtggacctccagcaaactccaacagacctgcagctgagggtcctgactgtgagaaggaaaactaccaaacaggaaggacattccaccaaaaccccatctgtacgttaccatcatcaaagaccaaaggaagataaaaccacaaagatggggagaaaccagagcagaaaagctgaaaattctaaaaatgagagcgcctcttctcctccaaaggaatgcagctcctcgccagcaacagaacaaagctggatggagaatgactttgacaagtacacagaagtaggcttcagacaactggtaataacaaacttctctgagctaaaggaagatgttcaaacccatcacaaagaagctaaaaatcttgaaaaaagattagacgaatggctaactagaataaacagcatagagaataccttaattgatctgatggagctgaaaaccatggcacgagaactacgtgactcatgcacaagcttcagtagacaattcgatcaagtggaggaaagggtatcagtgattgaagatcaaatgaacgaaatgaagcgagaagagaagtttagagaaaaaaagatgctggaagttctgcccagggcaatcaggcaggagaaagaaataaagggtattcaattaggaaaagaggaagtcaaattgtccctgtttgcagataacatgactgtatatttagaaaaccccatcatctcagcccaaaatctccctaagctgataagcaacttcagcaaagtctcaggatataaaatcaatgtgcaaaaatcacaagcattcctatacaccaataacagacaaacagagagccaaatcatgagtgaactctcattcacaattgcttcaaagagaataaaatacctaggaatccaacttaaaagggatgtgaaggaactcttcaagaactacaaaccactgctgaaggaaataaaggaagacacaaacaaatggaagaacatcccatgttcatgggtaggaagaaccaatatcgtgaaaatggccatactgcccaagataatttatagattcaatgctatccccatcaagccaccaatgactttctttacagaattggaaaaaactactttaaagttcataaggaaccaaaaaagagcccacattgccaagacaatcctaagcaaaaagaacaaagctggaggcatcatgctacctgacttcaaactatactacaaggctacagtaacaaaaacagcatggtaa

SEQ ID NO: 7518 - DNA, 573 bp, Homo sapiens
  SIMILAR (1)..(357): 751254mologous to Homo sapiens KIAA1470 protein,accession number AB040903,Smith-Waterman Score=451.
atgtctgcagcatgtgggcagaactacaccttggccttgatggaaatgggctccgtgtttgcgtttggggagaacaagatggggcagctgggccttggcaacctgacagacactatccccagccccgcacagataatatacaatggccagccaattaccaaaatggcctttggggctgaattcagtatgataatggactgcaaaggaaacctctattcctttgggtgccatgaatatggtcagctgggacacaactcggatgggaagttcatcgcccgggcacggcggacagatggctatggccggctgggccacgcagagcaggatgagatggtcccccacctggtgaagctgtttgacttccctggacatcgggtgtcccagatctatactggttacacctgctcctttgccatcagtgaagtgggtggtctgtttttccagggggccaccaacacctcccgtgaatctaccacatacccaaaagcagtgcaggacctctgtggctggataatccagagcctggcttgtgggaagagcagcatcattgtggccaccgagagagcaccatag

SEQ ID NO: 7519 - DNA, 1407 bp, Homo sapiens
  SIMILAR (115)..(1404): 941254mologous to Homo sapiens KIAA1470 protein,accession number AB040903,Smith-Waterman Score=2115.
atgagcctgggcttagcaagtgagcggctgtgggcaggtttggggttgcccgcattgccacttgccgatgagggaggggagtgtggggagactctgttcgtgtggaggtcacagaaacttgaagggtcaaagtgcaaagggcagcttttgatttttggggcaaccaactgggacttgattggtcgaaaagaagtgcctaaacagcaagctgcttaccgcaatctcggtcagaatttgtgggggccccacagatatgggtgcctggcgggggtccgggtgcggacagtggtctcgggctcgtgtgctgcacacagcctcctcatcaccacggaagggaagctgtggagctggggtcgaaatgagaaggggcagctgggacatggtgacaccaagagagtagaagcccctagactcatcgagggtcttagccacgaagtgattgtgtctgcagcatgtgggcggaaccacaccttggccttgacggaaacgggctccgtgtttgcgtttggggaaaacaagatggggcagctgggccttggcaaccagacagacgctgttcccagccccgcgcagataatgtacaacggccagccaattaccaaaatggcctgtggggctgaattcagtatgataatgggactgcaaaggaaacctctattcctttggggtgccctgaatatgggtcagctggggacacaactcaggatggggaagtttcattcgcccggggcacagcggatagagtacgactgtgaactagttccccggcgagtggccatcttcattgagaagacgaaagatggacagattctgcctgtaccaaacgtggttgtacgagacgtggcctgtggcgctaaccacacgctggtcctggactcccagaagcgagtcttctcctggggctttggtggctatggccggctgggccacgcagagcagaaggatgagatggtcccccgcctggtgaagctgtttgacttccctgggcgtggggcttcccagatctatgctggttacacctgctcctttgctgtcagtgaagtgggtggtctgtttttctggggggccaccaacacctcccgtgaatctaccatgtacccaaaagcagtgcaggacctctgcggctggagaatccggagcctggcttgtgggaagagcagcatcattgtggccgccgatgagagcaccatcagctggggtccgtcaccgacctttggggaactgggctacggggaccacaagcccaagtcttccactgcagcccaggaggtaaagactctggatggcattttctcagagcaggtcgccatgggctactcacactccttggtgatagcaagagatgaaagtgagactgagaaagagaagatcaagaaactgccagaatacaacccccgaaccctctga

SEQ ID NO: 7520 - DNA, 477 bp, Homo sapiens
  SIMILAR (142)..(354): 981254mologous to Homo sapiens tropomodulin 2,accession number AF177169,Smith-Waterman Score=359.
atggtggcagaggatgcatctgtgggaagcacagaatgccttgctgctcacagaaccccactagctccgagtatagtgaccctgatttttccttacaatcatgcctgctttggagactctagagaggtggctatgtccccagggagagtctttatccctaaagaaaagcctatagaaactcgtaaagaagaaaaagtgacccttgacccagaactggaagaagctttggccagtgcctctgacaccgaactctatgatcttgcagctgtccttggagtacacaatttgctcaacaatccaaagttcgatgaagaaacagccaacaataaaggtggcaaaggacctgtcagaagtaagttgatgtgcaatctgtggttttgtaaagctttggagcctccagagttgctggatcacttgggctttgagcaatcaaaccagaacagagcagctgacaatgagagctccatctggcggtga

SEQ ID NO: 7521 - DNA, 1218 bp, Homo sapiens
  SIMILAR (820)..(1215): 871254mologous to Homo sapiens syncytin precursor,accession number AF208161,Smith-Waterman Score=575.
atgcttatagaaggacacctagtatggggtaatcccctccaggaaaccaagccccagtactcagaagaagaaatagaatggggaacctcacggggacatagtttcctcccctcaggatggctagccaccaaagaaggaaaaatacttttgcctgcagctaaccaatggaaattacttaaaacccttcaccaaacccttcacttaggtattgatagcacccatcagatggccaaatcattatttactggaccaggccttttcaaaactatcaagcagatagtcagggcctgtgaagtgtgccaaagaaataatcccctgccttatcgccaagctccttcaggagaacaaagaacaggccactacccaagagaagactggcaactagattttacccatatgcccaaatctcagggatttcagtatctactagtttgggtagatactttcactggttgggcagaggccttcccctgtaggacagaaaaggcccaagaggtaataaacgttcatgaaataattcccagattcggacttccccaaggcttacagagtgacaatggccctgctttcaaggctacagtaacccaaggagtatcccaggtgttagccttactaagaatccgaaactctccccaaaaagcaggacttagtccatacaaaatgctgtatggacggcccttcctaaccaatgaacttgggcttgaccgagagacagccaacttagttgcagacatcatctccttagccaaatatcaacaggttcttaaaacattacagggagcctgtccccaagaagagggaaaggaactattccaccctgtggcccctatgcccatctacactgaacaagatttatacaatcatgtcatacctaagccccgcaacaaaagagtacccattcttccttttgttattggagcaggagtgctaggcggagtagctactggcattggcggtatcacaacctctactcagttctactacaaactgtctcaagaactaaatggtgacatggaatgggtcgctgataccctggtcaccttgcaagatcaacttaactccctagcagcagtagtccttcaaaatcgaagagctttagacttgctaaccgcggaaagcgggggaacctttttatttttagaggaaaaatgctgttgttatgttaatcaatccggaatcatcaccgagaaagttaaagaaattcaaggtcgaatataa

SEQ ID NO: 7522 - DNA, 1929 bp, Homo sapiens
  SIMILAR (1)..(861): 801254mologous to multiple sclerosis associated retrovirus polyprotein,accession number AF009668,Smith-Waterman Score=1223.
atgcctgaaagccccactcccttgttagggagagacattctagcaaaagcaggggccattatacacctgaacataggagaaggaacacctgtttgttgtcccctgcttaaggaaggaattaatcctgaagtctgggcaacagaaggacaatatggacgagcaaagaatgcccatcctgttcaagttaaactaaaggattctgcctcctttccctaccaaaggcaatacccccttagacctgaggcccaacaaggactccaaaagattgttaaggacctaaaagtgcaaggcctagtaaaaacatgcaatagcccctgcgatactccaattttaggagtacagaaacccaatggacagtggaggttggtgcaagatctcaggattatcgatgaggccattgtccctctatacccagctgtacctaacccttatactctgctttcccaaataccagaggaagcagagttgtttacagtcctggaccttaaggatgcctttttctgcatccctgtacatcctgagtctcaattcttgtttgcctttgaagatccttcaatcccaatgtctcaactcacctggactgttttaccccaagggttcagggatagtccccatctatttcaccatacattagcccaagacttgagccagttctcatacctggacactcttgtcctttgcctcccgttgagaaaccaacaggagtgccatcaagccacccaagtgctcttaaatgtcctcgctacctgtggctacaaggtttccaaacaaaaggctcagctctgctcacagcaggttaaatacttaggggtaaaattatccaaagggaccagggccctcaacaatgaagaacagatagaacataactgtcaacaagtaattgctcaaacctacgccactcgaggggaccttctagaggttcccttgactgatcccaacctcagcttgtatactgatggaagttcttttgtagaaaaaggacttcaaaaaggggggtatgcagtggtcagtgataatggaatacttgaaagaaatcccctcactccaggaactagtgctcagctggtggaactaatagccctccctcgggcactagaattaggagaaggaaaaaggggctcatcagaatctatatgcttcctctcattcttagtgccccctatgaccatctacactgaacaggatttatacaatcatgtcgtacctaagccccgcaacaaaagagtacccattcttacttttgttgtgggagcaggagggttaggcggattaggtactggcattggcggtatcacaacctctactcagttctactacaaactatctcaagaactaaatggtgacatggaatgggttgctgactccctagtcaccttgcaagatcaacttaactccctagtagcagtagttcttcaaaatcgaagagctttagacttgctaaccgccaaaagagggggaacctgtctatttttaggggaagaatgctgttattatgttaatcaatccggaatcgtcacagagaaagttaaagaaattagagatcaaatacaacgcagagcagaggagcttcaaaacaccggaccctggggccttgtcagccaatggatgccctggattctccccttcttaggacctctagcagctataatattgttattcctctttggaccctgtatctttaacctccttgttaagtttgtctcttccaaaattgaagctgtaaagctacaaatcattcttcaaatggagccccagatgcagtccatgactaaatctaccacggacccctggaccagcctgctagcccatgctctgatgttaatgacatcaaaggcacccctcctgaggaaatctcaactgcacaacacctactatgccccaattcagcaggaagcagttagagcggtcatcagccaacctccccaatag

SEQ ID NO: 7523 - DNA, 1341 bp, Homo sapiens
  SIMILAR (637)..(1338): 921254mologous to Homo sapiens syncytin precursor,accession number AF208161,Smith-Waterman Score=1128.
atggcaaagattaaagaaagaaatccatacaatgaagaaaatatagaacataactgtcaacaagtaattgctcaaacctatgccgctcgaggggaccttctagaggttcccttgactgatcccagcctcaacttgtatactgatggaagttcctttgtagaaaaaggacttcgaaaagtggggtatgcagtggtcagtgataatggaatacttgaaagtaattccttcactccaggaactagtgctcagctggcagaactaatagccctcagtcaggcactagaattaggagaaggaaaagggacagaaaaggcccaagaggtaataaaggcactagttcatgaaataattcccagatgcggacttccccgaggcttacagagtgacaatggccctgctttcaaggcaacagtaacccagggactatcgcagatgtcagatacatcctgggaaggacgctacccggtcattttatctaccccaaccgcggttaaagtggctggagtggagtctaggatacatcacactcgagtcaaaccctggctactgccaaaagaacccggaaatccaggagacaacgctagctattcctgtgaacctctagaggatctgggcctgctcttcaagcaacaaccgccacatatttcaatccctgtacctgaacaatggaacaacttcagcacagaaataaacaccacttccattttagtaggacctcttgtttccaatctggaaataacccatacctcaaacctcacccgtgtaaaatttagcaatactatagacacaaccaactcccagtgcatcagatgggtaactcctcccacacaaatagtctgcctaccctcaggaatattttttgtctgtggtacctcagcctatcactgtttgaatggcttttcggaatctatgtgcttcctctcattcttagtgcaccctatgaccatctacactgaacaagatttatacaattatgtcgtacctaagccccgcaacaaaagagtacccattcttccttttgttatccgagcaggaatgctaggcagattaggtactggcatgggcagtatcacaacctctactcagttctactacaaactatctcaagaactaaatggtgacatggaacgggttgccgactccctggtcaccttgcaagatcaacttaactccctagcagcagtagtacttcaaaatcgaagagctttagacttgctaactgcagaaagagggggaacctgtttatttttaggggaagaatgctgttattatgttaatcaatctggaatcatcactgagaaagttaaagaaattcgagatggaatacaacgcagagcatag

SEQ ID NO: 7524 - DNA, 846 bp, Homo sapiens
  SIMILAR (513)..(412): 761254mologous to multiple sclerosis associated retrovirus polyprotein,accession number AF009668,Smith-Waterman Score=146.
cctttgccactacatcaatttccttagtcaggtatgccacaggttgcaagctcatccctcggatctgtgtaaggactcctagagctattcctgttttttctgtgacatatgaagaaaagtcttgccctgttggcaaacttaacactggggcttgggttagggcctggaaagccacttctacttcagttgtccatcttactaaatgggtattggctttctgagtttccttaattagtgtatttaatgacctggctatttcgccatacctgggaatccattttcggcagaaacctattacgccaaggaatccccttagttgctttagggttttgggatgaggataagccagtataggctggatgtgttcctcactgagggccctggtgcctttggataattttagccctaagtaacctgctgtgagcagagttgagcctttggtttggaaaccatgtagccacaggtagcgaggaaattgaagagcgcttgggtggcttgatggcacaaggtttctccactgtctgttgggtttctgtactcctaaaattggagtactgcaggggttactgcatggttttactaggccttgggcttttaggtccttaacaatcttttggagtccttgttgggccttgggtctgagggggtactgcctttggtagggaaaggaggtggaatcctttagtttaacttgaacaggacgggcattctttgctcgtccatattgtccttctgttgcccagacttcaggattaattccttcctcaagcaggggacaacaaacgggtgttccttctcctatgttcaggtgtataatggcccctgcttttgctagaatgtctctcc

SEQ ID NO: 7525 - DNA, 611 bp, Homo sapiens
  SIMILAR (399)..(4): 871254mologous to Homo sapiens syncytin precursor,accession number AF208161,Smith-Waterman Score=575.
ttatattcgaccttgaatttctttaactttctcggtgatgattccggattgattaacataacaacagcatttttcctctaaaaataaaaaggttcccccgctttccgcggttagcaagtctaaagctcttcgattttgaaggactactgctgctagggagttaagttgatcttgcaaggtgaccagggtatcagcgacccattccatgtcaccatttagttcttgagacagtttgtagtagaactgagtagaggttgtgataccgccaatgccagtagctactccgcctagcactcctgctccaataacaaaaggaagaatgggtactcttttgttgcggggcttaggtatgacatgattgtataaatcttgttcagtgtagatgggcataggggccacagggtggaatagttcctttccctcttcttggggacaggctccctgtaatgttttaagaacctgttgatatttggctaaggagatgatgtctgcaactaagttggctgtctctcggtcaagcccaagttcattggttaggaagggccgtccatacagcattttgtatggactaagtcctgctttttggggagagtttcggattcttagtaagg

SEQ ID NO: 7526 - DNA, 902 bp, Homo sapiens
  SIMILAR (705)..(4): 921254mologous to Homo sapiens syncytin precursor,accession number AF208161,Smith-Waterman Score=1128.
ctatgctctgcgttgtattccatctcgaatttctttaactttctcagtgatgattccagattgattaacataataacagcattcttcccctaaaaataaacaggttccccctctttctgcagttagcaagtctaaagctcttcgattttgaagtactactgctgctagggagttaagttgatcttgcaaggtgaccagggagtcggcaacccgttccatgtcaccatttagttcttgagatagtttgtagtagaactgagtagaggttgtgatactgcccatgccagtacctaatctgcctagcattcctgctcggataacaaaaggaagaatgggtactcttttgttgcggggcttaggtacgacataattgtataaatcttgttcagtgtagatggtcatagggtgcactaagaatgagaggaagcacatagattccgaaaagccattcaaacagtgataggctgaggtaccacagacaaaaaatattcctgagggtaggcagactatttgtgtgggaggagttacccatctgatgcactgggagttggttgtgtctatagtattgctaaattttacacgggtgaggtttgaggtatgggttatttccagattggaaacaagaggtcctactaaaatggaagtggtgtttatttctgtgctgaagttgttccattgttcaggtacagggattgaaatatgtggcggttgttgcttgaagagcaggcccagatcctctagaggttcacaggaatagctagcgttgtctcctggatttccgggttcttttggcagtagccagggtttgactcgagtgtgatgtatcctagactccactccagccactttaaccgcggttggggtagataaaatgaccgggtagcgtccttcccaggatgtat

SEQ ID NO: 7527 - DNA, 2678 bp, Homo sapiens; identical to SEQ ID NO: 3050
  SIMILAR (1662)..(1955): 941254mologous to Homo sapiens NAG13,accession number AF194537,Smith-Waterman Score=482.

SEQ ID NO: 7528 - DNA, 459 bp, Homo sapiens
  SIMILAR (381)..(458): 881254mologous to multiple sclerosis associated retrovirus polyprotein,accession number AF009668,Smith-Waterman Score=120.
atggccgtgcggtataccgacgagaacgtactgagaaagggaacgagggaagcggggacgatgatgcgcttacgaggcacgaccgagtgctgcgccgattttgcggcatgggatgttacgcacgacgcactgcgcgcgacaggtggagaattgcctggcgcgcaggtgatgttaaccacaaccgaatgcgggagacatgtggacttttgtgaccgggccgtgtggctgccgcgcatgtgggggtacccactggccttacctggagagatgaggaaattgtacaccgtgcgtatggcggggagagacattctagcaaaagcaggggccattatacacctgaacataggagaaggaacacctgttcgttgtcccctgcttgaggaattaatcctgaagtctggaaaacagaaggacaatataggcaagcaaagaatgcccgtcctgttcaagttaaactaa

SEQ ID NO: 7529 - DNA, 910 bp, Homo sapiens
  SIMILAR (28)..(909): 731254mologous to multiple sclerosis associated retrovirus polyprotein,accession number AF009668,Smith-Waterman Score=1108.
gatacttctcccagccactaagttatgaactggggagctttattcttttcacatgcttttctaattatgcttgaaagccccactaccttgttagggagagacattctagcaaaagcaggggccattatacacctgaacataggagaaggaacacccgtttgttgtcccctgcttgaggaaggaattaatcctgaagtctgggcaacagaaggacaatatggacgagccaaagaatgcccgtcctgttcaagttaaactaaaggattctgcctcctttccctaccaaaggcaatacccccttagacctgaggcccaacaaagggcttccaaaagattgttaaggacctaaaagcccaaggcctagtaaaaccatgcaatagcccctgcagtactccaattttaggagtacagaaacccaacggacagtggaggttagtgcaagatctcaggattatcgatgaggccattgtccctctatacccagctgtacctaacccttatactctgctttcccaaataccagaggaagcagagttgtttacagtcctggaccttaaggatgcctttttctgcatccctgtacatcctgagtctcaattcttgtttgcctttgaagatccttcaatcccaatgtctcaactcacctggactgttttaccccaagggttcagggatagtccccatctatttcaccatacattagcccaagacttgagccagttctcatacctggacactcttgtcctttgcctcccgttgagaaaccaacaggagtgccatcaagccacccaagtgctcttaaatgtcctcgctacctgtggctacaaggtttccaaacaaaaggctcagctctgctcacagcaggttaaatacttaggggtaaaattatccaaagggaccagggccctca

SEQ ID NO: 7530 - DNA, 1307 bp, Homo sapiens
  SIMILAR (265)..(852): 831254mologous to multiple sclerosis associated retrovirus polyprotein,accession number AF009668,Smith-Waterman Score=861.
atgaaattgtcagcagactcaataatcaccctaaggggcatcattctggatgccgacattctctatgatggaaagggactgaaagaactcagcctagctctaggactcacccctgagcacaaaggcaatgttgggcacgctggtaaaggaccactagaatccagcagcccggacccctttctttgtgatcaagaaaggcgggaaaagggggagagacattctagcaaaagcaggggccattatacacctgaacataggagaacacccgtttgttgtcccctgcttgaggaaggaattaatcttgaagactgggcaacagaaggacaatatggacgagcaaagaatgcccgtcctgttcaagttaaactaaaggattctgcctcctttccccaccaaaggcagtacccccttagacccgaggctcaacaaggactccaaaagattaaggacctaaaagcccaaggcctagtaaaagcatgcaatagcccctacaataatccaactttaggagtacagaaacccagtggacagtggaggttagtgcaagatctcaggattatcaatgaggtcactgtccctctatacctagctgtacctaacccttatattctgctttcccaaataccagaggaagcagagtggtttacagacctggaccttaaggatgcctttttctgcatccctgtacatcctgactctcaattcttatttgcctttgaagatccttcaaacccaatgtctcaactcacctggactgtttcaccccaagggttcagggatagcccccatctatttggccaggcattagcccaagacttgagccggttctcatacctgggcactcttgtcctttggccatgcatttcaatccctgtacctgaacaatggaacaactacagcacagaaataaacaccacttccgttttagtaggacctcttgtttccaatctggaaataacccatacctcaaacctcacctgtgtaaaatttagcaatactgtagacacaaccaactcccaatgcatcagtgcccccatgaccatttacactgaacaagatttatacaattatgttgtacctaagccccacaacaaaagagtactcattcttccttttgttatcggagcaggagtgctaggtggactaggttctggcattggcggtaccacaacctctactcagttctactacaaactatctcaagaactcaatggtgacatggaatgggttgccgactccctggtcaccttgcaagatcaacttaacttcctagcatcagtagtccttcaaaattgaagagctttaga

SEQ ID NO: 7531 - DNA, 3831 bp, Homo sapiens
  SIMILAR (262)..(858): 851254mologous to multiple sclerosis associated retrovirus polyprotein,accession number AF009668,Smith-Waterman Score=895.
atgcctcttctccaaatgattgcaacacctctccagcaatctctgatttctacggaggatgagatggatgaattgacagaagtaggctttgaaaggtgggtaataacaaacttcactgaggaacccagcccagctctaggattcacccctgagcacaaaggcaatgttgggcatgctggtaaaggaccactagaatccagcagcccagacccctttctttgtggtcaagaaaagcaggaaaagggtgcaggactgctacatcggcagtacccccttagacttgaggccaaacagggactcaaaaaaattgttaaggacctaaaagcccaaggcctagtaacaccatgcagtagcccctgcaatactccaactttagcagtacagaaacccaacggacagtggaggttagtgcaagatctcaggattatcaatgaggctgttgtccctctatacccagctgtacctaacccttacattctgctttcccaaataccagaggaagcagagtggtttacagtcctggaccttaaggatgcctttttctgcatccctgtacatcctgactctcaattcttgtttgcctttgaagatccttcaaacccaatgtctcaactcacctggactgttttaccccaagggttcagggatagcctccatctatttggccaggcattagcccaagacttgagccagttctcatacctggacactcttgtccttcagtatatggatgatttacttttagtgacccattcagaaaccttgtgccatcaagccacccaagcgctcttcaatttcctcgctacctgtggctacatggtttccaaaccaaaggctcaactctgctcacagcaggttacttagggctaaaattatccaaaggcaccagggccctcagtgaggaacacatccagcctatactggcttatcctcatcccaaaaccctaaagcaactaaggggattccttggcgtaataggtttctgccgaaaatggattcccaggtatggcgaaatagccaggtcattaaatacactaattaaggaaactcagaaagccaatacccatttagtaagatggacaactgaagtagaagtggctttccaggccctaacccaagccccagtgttaagtttgccaacagggcaagacttttgttcatatgtcacagaaaaaacaggaatagctctaggagtccttacacagatccgagggatgagcttgcaacctgtggcacacctgactaaggaaattgatgtagtggcaaagggttgacctcattgtttacgggtagtggtggcagtagcagtcttagtatctgaagcagttaaaataatacagggaagagatcttactgtgtggacatctcatgatgtgaatggcatactcactgctaaaggagacttgtggctgtcagacaactgtttacttaaatgtcaggctctattacttgaagggccagtgctgcgactgtgcacttgtgcaactcttaacccagccacatttcttccagacaatgaagaaaagataaaacataactgtcaacaagtaatttctcaaacctatgccactcgaggggaccttttagaggttcctttgactgatcccgacctcaacttgtatactgatggaagttcctttgtagaaaaaggacttcgaaaagtggggtatgcagtggtcagtgataatggaatacttgaaagtaatcccctcactccaggaactagtgctcagctagcagaactaatagccctcacttgggcactagaattaggagaagaaaaaagggcaaatataatacagactctaaatatgcttacctagtcctccatgcccatgcagcaatatggaaagaaagggaattcctaacttctgagagaacacctatcaaacatcaggaagccattaggaaattattattggctgtacagaaacctagagaggtggcagtcttacactgccggggtcatcacaaaggaaaggaaagggaaatacaagagaactgccaagcatatattgaagccaaaagagctgcaaggcaggaccctccattagaaatgcttattaaacttcccttagtatagggtaatcccttccgggaaaccaagccccagtactcagcaggagaaacagaatggggaacctcacgaggcagttttctcccctcgggacggttagccactgaagaagggaaaatacttttgcctgcaactatccaatggaaattacttaaaacccttcatcaaacctttcacttaggcatcgatagcacccatcagatggccaaatcattatttactggaccaggccttttcaaaactatcaagcagatagtcagggcctgtgaagtgtgccagagaaataatcccctgccttatcgccaagctccttcaggagaacaaagaacaggccattaccctggagaagactggcaactgattttacccacaagcccaaacctcagggatttcagtatctactagtctgggtagatactttcacgggttgggcagaggccttcccctgtaggacagaaaaggcccaagaggtaataaaggcactagttcatgaaataattcccagattcggacttccccgaggcttacagagtgacaatagccctgctttccaggccacagtaacccagggagtatcccaggcgttaggtatacgatatcacttacactgcgcctgaaggccacagtcctcagggaaggtcgagaaaatgaatgaaacactcaaaggacatctaaaaaagcaaacccaggaaacccacctcacatggcctgttctgttgcctatagccttaaaaagaatctgcaactttccccaaaaagcaggacttagcccatacgaaatgctgtatggaaggcccttcataaccaatgaccttgtgcttgacccaagacagccaacttagttgcagacatcacctccttagccaaatatcaacaagttcttaaaacattacaaggaacctatccctgagaagaggaaaagaatattccacccaagtgacatggtattagtcaagtcccttccctctaattccccatccctagatacatcctgggaaggaccctacccagtcattttatctaccccaactgcggttaaagtggctggagtggagtcttggatacatcacacttgagtcaaatcctggatactgccaaaggaacctgaaaatccaggagacaacgctagctattcctgtgaacctctagaggatttgcgcctgctcttcaaacaacaaccaggaggaaaaatcgaagctgtaaaactacaaatggagcccaagatgcagtccaagactaagatctaccgcagacccctggaccggcctgttagcccacgatctgatgttaatgacatcaaaggcacccctcctgaggaaatctcagctgcacaacctctactacgccccaattcagcaggaagcagttagagcggtcgtcggccaacctccccaacagcacttaggttttcctgttgagatgggggactgagagacaggactagctggatttcctaggctgattaagaatccctaagcctagctgggaaggtgaccacatccacctttaaacacggggcttgcaacttagctcacacctgaccaatcagagagctcactaaaatgctaattaggcaaagacaggaggtaaagaaatagccaatcatttattgcctgagagcacagcaggagggacaatgatcgggatataaacccaagttttcgagccggcaacggcaaccccctttgggtcccctccctttgtatgggagctctgttttcatgctatttcactctattaaatcttgcaactgc

SEQ ID NO: 7532 - DNA, 872 bp, Homo sapiens
  SIMILAR (195)..(362): 331254mologous to Arabidopsis thaliana Pto kinase interactor, putative,accession number AC079829,Smith-Waterman Score=64.
agtgtctgttcttgactctttcttgcggatgcacctctgattctgtaagatcaagatgggggcatccgtacatctctagttgtgctgcaatatgccagcagctcaacatcgagaacgagcgagtaacgaatccaggcatggagggtgctgtcctccacttggctgctaagctcggccctccgcatgatgccttcacaactccccaagaagcggtgctgtctgctccttcggccttgccctcctctgccgccacatccctcctttcccttctcaccccacaacagatgttttgctccaagacagctgggcctaagcccttcagttcgaatcctcatccaagactgaaagctcctacatcttcctgtcactttagccacaagctgcaccgtctggaaatgcccactgctactagggacacaggcgaggccggacagtgccggaggacccggggtgcctctctccacgtgcgcggcctcacaggacaagcggcacctccagtccaccctcgctccagccctcccgtactatacccccggcatcctctgccccgaagcagggagatgccgggagccctccctaccaggctgtaccggagaaaaacaaacctggagccacaccgcgcacatgcgcagaaagcccaaagcggctcccgcgaccggggccaaaaagtttcttatgaattacatctccctgatgatttggctgtcctcaacatttcctcgtttggcagaattcaggtgtggaatttctccagacacggtcggttcctgtggcccgctgccgcggcggcaccacctccacttgcgctgtggctccacttgcttggttctggtccactggacgctcaccctgagaaaacacgctggacatga

SEQ ID NO: 7533 - DNA, 807 bp, Homo sapiens
  SIMILAR (34)..(297): 421254mologous to Homo sapiens bA42M11.1 (alpha thalassemia/mental retardation syndrome X-linked (RAD54 (S. cerevisiae) homolog)),accession number AL121874,Smith-Waterman Score=141.
atggactgcttcaggctactgcactccagcctgcgcaacagatctagatctttctttaaaaaaaagaggaagaagaagaaggaggaggaggagaaggagaagaaaagaagaagaagaagaagacggaggaggaggaggaagaagaggaggagaggaagaagagaggaggaagaaggagaagaagaaggagaggaagaagaggaggaggaggagaaggaagaaagaactggtgctggagacagcagtgaggatgaggggtttgatgagatcccatccccaggggattccagacagaaaacggaaggaaatgcagcaaacatcatttcaggctgtgatcagcgttatgaggaaagtgagatggatttagggactagaggaattgtctcaggccatagatatatcttcactttccgtgtgagtcctttggaggccatcggggagctgctgttccccttcagcgtggctcctgctcagggaggtcttggcttccgcagggtggaccagcttgcactgcctatgggtgcgcagtccctggaacgccctttctgtgtggatggaggctcacgacccccgcttaattatgccgtgtcctccgttgaagacctcctcaatgggaacaattttaaatgccccactactctaagaaccattgaaatcacagttggaaacctcataatttcaccaaggcagaagcaattaaatgcaaacattggcaaaaattttaacgctgcagaaaatcacgaaaatgccaagaccacgactcgttccagcaccgtgggggctgacacccatctcactgctggataa

SEQ ID NO: 7534 - DNA, 372 bp, Homo sapiens
  SIMILAR (5)..(73): 521254mologous to Homo sapiens Human activin receptor,accession number R29583,Smith-Waterman Score=68.
  misc_feature (1)...(372): n = a,t,c or g
tttcttcccaccctgtcttctcccctaggtgggtcctgagcccccacccccaatcccagtgctacacctgaggttctggagctcaaaatctgacagcctctcccccattctgtgtgtgtcggggggacagagggaaccatttaagaaaagataccaaagtagaagtcaaaagaaagacatgttggctannnnnnnnnnnnnnnnnnnnnnnnnnnnnnnnnnnnnnnnnnnnnnnnnnnnnnnnnnnnnnnnnnnnnnnnnnnnnnnnnnnnnnnnnnnnnnnnnnnnnnnnnnnnnnnnnnnnnnnnnnnnnnnnnnnnnnnnnnnnnnnnnnnnnnnnnnnnnnnnngcctagatgttcaagagggtgaa

SEQ ID NO: 7535 - DNA, 3015 bp, Homo sapiens
  SIMILAR (660)..(785): 301254mologous to Homo sapiens dJ964F7.1 (novel protein (disintegrin and metalloproteinase)),accession number AL356755,Smith-Waterman Score=43.
cacgtgggtgcctctgacccggacgcgggtcccgggtggggcggcctcacctcccggccccgcctggtcacgccgcgctccgcccccaggggccgcgccttccagggcgccacagtgggcctggcgcccgtcgagggcatgtgccgcgccgagagctcgggaggcgtgagcacggaccactcggagctccccatcggcgccgcagccaccatggcccatgagatcggccacagcctcggcctcagccacgaccccgacggctgctgcgtggaggctgcggccgagtccggaggctgcgtcatggctgcggccaccgggtacgcgggtggggggtcggggctgcggcggggcggctagtcctggggacttcctccgctgcgtttctttggtcgtccctcagtttcctcttctgtaaaatggggataatgatcatagtgtccgcttcagggtggtttatgaggcttaaagggaagaagctcaggcaaagtggattctcaacggtatgaagattattttccgagtaacctggcgaggttactcctacaccgggaggagcaccgtcgggtcgcgattccaccttgggtcccgggctgctcactattggggcctcatcgtcccctgtcccgcttgttgtgtgactttgcgcgggttacttcccctctctgggctctgcgcgtctggcggctgtagccaagcccaggggtggggatcagagaagcgcgggggttgggggactgtccctccatgcccaatgccctccccgtgccggtaggcacccgtttccgcgcgtgttcagcgcctgcagccgccgccagctgcgcgccttcttccgcaaggggggcggcgcttgcctctccaatgccccggaccccggactcccggtgccgccggcgctctgcgggaacggcttcgtggaagcgggcgaggagtgttactgcgtttcctggccaggagtgccgcgacctctgctgctttgctcacaactgctcgctgcgcccgggggcccagtgcgcccacggggactgctgcgtgcgctgcctgctgaagccggctggagcgctgtgccgccaggccatgggtgactgtgacctccctgagttttgcacgggcacctcctcccactgtcccccagacgtttacctactggacggctcaccctgtgccaggggcagtggctactgctgggatggcgcatgtcccacgctggagcagcagtgccagcagctctgggggcctggctcccacccagctcccgaggcctgtttccaggtggtgaactctgcgggagatgctcatggaaactgcggccaggacagcgagggccacttcctgccctgtgcagggagggatgccctgtgtgggaagctgcagtgccagggtggaaagcccagcctgctcgcaccgcacatggtgccagtggactctaccgttcacctagatggccaggaagtgacttgtcggggagccttggcactccccagtgcccagctggacctgcttggcctgggcctggtagagccaggcacccagtgtggacctagaatggtttgcaatagcaaccataactgccactgtgctccaggctgggctccacccttctgtgacaagccaggctttggtggcagcatggacagtggccctgtgcaggctgaaaaccatgacaccttcctgctggccatgctcctcagcgtcctgctgcctctgctcccaggggccggcctggcctggtgttgctaccgactcccaggagcccatctgcagcgatgcagctggggctgcagacagggaccctgcgtgcagtggccccaaagatggcccacacagggaccaccccctgggcggcgttcaccccatggagttgggccccacagccactggacagccctggcccctggaccctgagaactctcatgagcccagcagccaccctgagaagcctctgccagcagtctcgcctgacccccaagcagatcaagtccagatgccaagatcctgcctctggtgagaggtagctcctaaaatgaacagatttaaagacaggtggccactgacagccactccaggaacttgaactgcaggggcagagccagtgaatcaccggacctccagcacctgcaggcagctttggaagtttcttccccgagtggagcttcgacccacccactccaggaacccagagccacattagaagttcctgagggctggagaacactgctgggcacactctccagctcaataaaccatcagtcccagaaggcaaaggtcacacagcccctggacctcccttcaccagtgggagggttgggtagtgctggccattcccaaaagggcttctgtcctgggagtctggtgtgtctcctacatgcaatttccacggacccagctctgtggagggcatgactgctggccagaagctagtggtcctggggccctatggttcgactgagtccacactcccctggagcctggctggcctctgcaaacaaacataattttgggggaccttccttcctgtttcttcccaccctgtcttctcccctaggtggttcctgagcccccacccccaatcccagtgctacacctgaggttctggagctcagaatctgacagcctctcccccattcttgtgttgtgttcggggggacagagggaaccattttaaggaaaagattaccaaagtagaaagtcaaaaagaaagacatgttggctataggcgtggtggctcatgcctataatcccagcactttgggaagctggggtaggaggatcaccagaggccaggaggtccacaccagcctgggcaacacagcaagacaccgcatctacagaaaaattttaaaattagctgggcgtggtggtgtgtacctgtaggcctagctgctcaggaggctgaagcaggaggatcacttgagcctgagttcaacactgcagtgagctatggtggcaccactgcactccagcctgggtgacagagcaagaccctgtctctaaaataaattttaaaaagacatatta

SEQ ID NO: 7536 - DNA, 462 bp, Homo sapiens
  SIMILAR (2)..(253): 961254mologous to Mus musculus 84 kD heat shock protein,accession number M18186,Smith-Waterman Score=407.
tgagctcttctctgagctggcagaagacaaggagaactacaagaaattctatgaggcattctctaaaaatctcaagcttggaatccacgaagactccactacccgccgccgcctgtctgagctgctgcgctatcatacctcccagtctggagatgagatgacatctctgtcagagtatgtttctcgcatgaaggagacacagaagtccatctattacatctctggtgagagcaaagagcaggtgcccctgtcccacctggctccccctgctggtgtatagtgtttttttccctctcctgtccttgtgttgaaggcagtaaactaagggtgtcaagccccattccctctctactcttgacagcaggattggatgttgtgtattgtggtttattttattttcttcattttgttctgaaattaaagtatgcaaaataaagaatatgccgtttttatacaaaaaaa

SEQ ID NO: 7537 - DNA, 1269 bp, Homo sapiens
  SIMILAR (448)..(861): 781254mologous to Danio rerio heat shock protein hsp90beta,accession number AF068772,Smith-Waterman Score=584.
atgaagctgagatggaagctggggccagatgtgaaggtggaggggaaaggtgagtgctattgcaaacaacattcagcaaggaccccgctgacaagagagcatttgcgcatagggctgaaaaagatgcctgaggaagtgcaccttggagagaaggaggtggagacttttgcctttcaggcagaaattgcccaactcatgtctcttatcatcaataccttctattccaacaaggagattttcctttgggagttgatctctaatgcttctgatgccttggacaagattcgctatgaaagcctaacagacccttccaagttggacagtggtaaagagctgaaaattgacatcatccccaatactcaggaacataccctgactttggtagacacaggcattggcatgaccaaagctgatctcataaataatttgggaaccattgccaagtttcaagatcagacagagtacttagaagagatgcaggtcaaagaagtagtggagaagcactctcagttcctaggctatcccatcaccctttatctggagaaggaacgagagaaagaaattagtgatggtaaggcagaggaagagaaaggtgagaaagaagaggaaaataaagatgacgaagaaaagcccaagatcgaagatgtgggttcagatgaggaggatgacagtggtaaggataagaagaagaaaactaagaagatcaaagagaaatacattgatcaggaagaactaaacaagaccaagcctatttggaccagaaacactgaagacatcacccaagaggagtatggagaattctataagagcctcaccaatgactggaaagaccacttggcagtcaggtacttttctgtagaagagtatgtttctcgcatgaaggagatacagaagtccatctattacatcactggtgagagcaaagagcaggttgccaactcagcttttgtggagcaagtatggaagcgggactccagggtggtatatatgaccgagcccattgatggctaccaactcaaggagtttgatgggaagagcctggtctcagttaccaaggagggcctggagctacctgaggatggggaggagaagaagagaatggaagagaggaaggcaaagtttgagaacctctgcaagttcatgaaagaaactttagataagaaggttgagatggtgacagtctccaacaggcttgtgtcttcatcctgctgcattgtgaccagcacctacagctggacagccaatatggagcagatcatgaaagcctag

SEQ ID NO: 7538 - DNA, 478 bp, Homo sapiens
  SIMILAR (34)..(135): 581254mologous to Euphorbia esula heat-shock protein 80,accession number AF221856,Smith-Waterman Score=117.
ctccagcagagtcaaatttttgaaattcattcgcaaaaaaccattgttaagaagtgccttgatctcttctttgagttggcagaagaaaaggagaattacaagaatttctttgaggcattctctaaaaatcttcaagcttggaatccacgaagactccactaaccgccgccgcctgtctgagctgctgcgctatcatacctcccagtctggagatgagatgacatctctgtcagagtatgtttctcgcatgaaggagacacagaagtccatctattacatcactggctccccctgctggtgtctagtgtttttttccctctcctgtccttgtgttgaaggcagtaaactaagggtgtcaagccccattccctctctactcttgacagcaggattggatgttgtgtattgtggtttattttattttcttcattttgttctgaaattaaagtatgcaaaataaagaatatgccattatatc

SEQ ID NO: 7539 - DNA, 862 bp, Homo sapiens
  SIMILAR (448)..(861): 671254mologous to Brugia pahangi heat shock protein 90,accession number AJ005785,Smith-Waterman Score=498.
atgaagctgagatggaagctggggccagatgtgaaggtggaggggaaaggtgagtgctattgcaaacaacattcagcaaggaccccgctgacaagagagcatttgcgcatagggctgaaaaagatgcctgaggaagtgcaccttggagagaaggaggtggagacttttgcctttcaggcagaaattgcccaactcatgtctcttatcatcaataccttctattccaacaaggagattttcctttgggagttgatctctaatgcttctgatgccttggacaagattcgctatgaaagcctaacagacccttccaagttggacagtggtaaagagctgaaaattgacatcatccccaatactcaggaacataccctgactttggtagacacaggcattggcatgaccaaagctgatctcataaataatttgggaaccattgccaagtttcaagatcagacagagtacttagaagagatgcaggtcaaagaagtagtggagaagcactctcagttcctaggctatcccatcaccctttatctggagaaggaacgagagaaagaaattagtgatggtaaggcagaggaagagaaaggtgagaaagaagaggaaaataaagatgacgaagaaaagcccaagatcgaagatgtgggttcagatgaggaggatgacagtggtaaggataagaagaagaaaactaagaagatcaaagagaaatacattgatcaggaagaactaaacaagaccaagcctatttggaccagaaacactgaagacatcacccaagaggagtatggagaattctataagagcctcaccaatgactggaaagaccacttggcagtcaggtacttttctgtagaag

SEQ ID NO: 7540 - DNA, 621 bp, Homo sapiens
  SIMILAR (3)..(401): 721254mologous to Homo sapiens chaperone protein HSP90 beta,accession number AF275719,Smith-Waterman Score=461.
  misc_feature (1)...(621): n = a,t,c or g
tgataccagagttcncaattttaccgtggtgtggtgactctgggactgcccctgaacatctcccgagaaatgctccagcagagcaaaatcttgaaagtcattcgcaaaaacattgtttaagaatgccctttgagctcctctctgagctggcagaagacaaggagaattacaagaaattctatgaggcattctctaaaaatctcaagcttggaatccacgaagactccactaaccgccgccgcctgtctgagctgctgcgctatcatacctcccagtctggagatgagatgacatctctgtcagagtatgtttctcgcatgaaggagacacagaagtccatctattacatcactggtgagagcaaagagcaggtggccaactcagcttttgtggagcgagtgcccctgtcccacctggctccccctgctggtgtctagtgtttttttccctctcctgtccttgtgttgaaggcagtaaactaagggtgtcaagccccattccctctctactcttgacagcaggattggatgttgtgtattgtggtttattttattttcttcattttgttctgaaattaaagtatgcaaaataaagaatatgccgtttttatacaaaaaaaaa

SEQ ID NO: 7541 - DNA, 3017 bp, Homo sapiens
  SIMILAR (2691)..(1600): 391254mologous to Mus musculus 84 kD heat shock protein,accession number M18186,Smith-Waterman Score=341.
  misc_feature (1)...(3017): n = a,t,c or g
ctttttttttccctgaagcctttaatttttgggggggggttgggcccaatttgtcccccccccaaaaaaagggttttttccaaaaattcccaagggggtttttatttggccccccataaggaaaaaaatttttctttccctgcccgggtaaaatttggcccccccaagggttcttttaaacggccccccnnnnntntnnngggaataaaaacggcatattcgtttattgtgcatacgtttaatttcagaacaaaattgaagaaaataaaataaaccacaatacacaacattccaatcctgcttgtcaagagtagagagggaatggggcttgacacccttagtttacttgccttcaacacaaggacaggagagggaaaaaaacacgtagacaccagcagcggggagcccaggtggggacagggggcactccgaggctgacagtggggagccccatgggggacacctattacaaggggcaccaaagttttcccacttttggaacttccttaacctaattcgactttctttcccatgcggagaccgcatccttcatccgcccttcgagaggggggggatcttcatcagggaactgccagcatttggggttcctcttggctggccactttcatctttcatccaataccttaggacctagctttgattcatggcgatagatgccggttgggagtggggtctggggggatcctcaaggggaaaagccagaagattagcaggggcgggttttcaaacagccagcagcaccaccagggtcctttaactgcccttatcatttcttggtcgggcctcagcctttctggcccgcagcgtctccacaaaatgggggtgggtcagggggtgattctcaaggtgcttttttgcccatcatatagccccatgggggggagttgtcccgaagtgccctgggcttttcatgatcccgctcaattaatgcctgacccgcccctaggtgcttgtgaccaatgcaggcaaggtgaagacacaaagtctatttggagattgtcacctttcttcaacccttcttatctaaggatttctttcatgagcttgcagaggttctcaaaacttttgccttgctctcttccatcttcttcttcttcctccttcatccttcaggcaagctccaagacccttcctttggtaactgagacccaggctcttcccatcaaaattccttggagctgctgcacacaagtactcgttcaatggggctcgggtcatatatacccacctcggaagccccgtttccggcactcgctccaacaaaaagctgagttggccacctgctctttgcttctcaccaagtgatgtaatagatggacttctgtgtctcccttcatgcggagaaacattacttctgacaggaggatgtcatctcatctccaggactgggaggttatgatagcgcaagcaggctcaagacaggctggctggctggttagtggagtcctccgtggattcccaagcttggagatttttaagagaaatgccctccatagaatttcttgtaattctcccttgtccttctgcccagcctcagagaaagagctcaaggcacttccttaacaatgtttttgcggaaatgactttcaaagatttttgctactgctggagcatttcatcgggaggatgttcaggggcagatccttcagagtcaacccacacccacgggattaaaattgagatactctggtatccaactcatcacaagctgtccatgatgaacacacggcggaccataggagttggaatggttggttctttttcttcttggttctcaaaaaggtcaaaagggagcccggacggagggaataaatagcaaatgcccctggaatttccaaactgaccttctacaggaaaagtgcttggactgccaaagtggtcttccccaagtcattaagtgaggctcttgtagaattctcccatactcctcttggggtgatgtcatcagggtttctggtccaaatagggcttgggtcttggtttaagttccttccctggatcaaatgtaattcctctttggatcttccttaagttttcttcttctatatccttaccgatgtcatcctcctcatctgaacccacatcttcgatcttggggtttttcttcatcatctttatcttcctcttctttcccaacctttctcttacctactggcctcatcatcaactaatttccttctactacgttccttcatccaaataaagggtgatgggatagcctatgaactgagaatggcttcttcactacttcttgggacccgcctctcttctaggtactctgtctggatcttctttaagatggaggatcacttggggtaccccttgccaatgtggctcatccatggtcagcacgcacagtgaaggaacctccagcagaagactcccaagcatactgttcatcatcgttgtgcttttgtgatcacaaccactttctctgcccaccaagtagggcaggaataaaagccaactcccccactgccccaatccatgggagatgtctgcacccagccttgaagagcctccatggaatgcttttagggtaccaggacttgggcaatgggttccccaaatttatttatggaggatcagctttggtcatgcccaatgccctgtgtcctacccaaagtccagggtacggttccctgaagggttggggatgatgtcaaatttttcagctctttaccaactgtcacaactttcgaagggtcttgtcaggcttctcatagcggaatcttgtcccaaggcatcatgaagcatatagagatcaactcccggaaggaaaatctccttgttggaatagaaggtattgatgatgagggacatgagttgggcaatttcctgcctgaaaggcaaaagtctccacctcctcctctccatggtgcacttcctcaggcatcttgaaaaaaaatcttgaaaagaaaaggattatacgtaatagtgagcaacgtaggcttgctttccgatacccagacagccccaacactgcgccggagtga

SEQ ID NO: 7542 - DNA, 816 bp, Homo sapiens; identical to SEQ ID NO: 4589
  SIMILAR (280)..(483): 621254mologous to Mus musculus Pro-Pol-dUTPase polyprotein,accession number Y12713,Smith-Waterman Score=197.

SEQ ID NO: 7543 - DNA, 837 bp, Homo sapiens
  SIMILAR (359)..(400): 921254mologous to Mus musculus Pro-Pol-dUTPase polyprotein,accession number Y12713,Smith-Waterman Score=73.
ggccagagtgcgtaattggcatagacatacttagcagctggcagaacccccacattggctccctgactggtagggtgagggctattatggtgggaaaggccaaatggaagccattagagctgcctctacctagaaaaatagtaaatcaaaaacaatatcacatccttggagggactgtggaaattagtgccaccattaaggacttgaaagacacagaggcggtgactcccaccacatccccattcaactctcccatttggcctgtgcagaagacagatggatcttggagaatgacagtggattattgtaaacttaaccaagtggtgactccaattgcagctgctgtaccagatgtggttcattgcttgagcaaatcaacacatctcctggtacctggtttgagtggagtccaaaagaaggctctgcagcaggttcaggctgctgtgcaagctgctctgccatttgggccatatgacccagcagatccaatggtgcttgaggtgtcagtggcagatagggatgctatttggagcctttggaacgccgccattggtgaatcacagcggaggcctctaggattttggagcaaggctctcctgtcttctgcagataactactctccttttgagaggcagctcttggcctcttactgggctttggtggaaactgaacgtttgacggtgggtcatcaagtcaccctgcgacctgaactgcctatcatgaattgggtgctttctgacccatctagccataaagttagtggtgcacagcagcgttccatcatcaaattgaagtggtatatacatgattgggttcgagcaggtcctgaaggcacaa

SEQ ID NO: 7544 - DNA, 402 bp, Homo sapiens
  SIMILAR (136)..(399): 861254mologous to Mus musculus Pro-Pol-dUTPase polyprotein,accession number Y12713,Smith-Waterman Score=438.
atggatcgcattcctccacctcctagtactgtgtcaggtgcaatcaggtgcagggaaggtcagcaaggaactgagggtggctttcagccaacagcccttgaagaagtgaatcctgttgaaaaccatatgaccacccctgtcattgcccagtgggcccatgaacaaagtggccatgatggcagggatggaggttgcacatgggctcagcaacatggacttccactcaccaaggctgacctggctacagccactgctgagtgcccaatttgtcagcagcaaagaccaacactgagccctcgatatggcaccattcctcagggtgatcagccagctacctggtggcaggttgattgtactggacctcttccaacatggaaagggcagaagtttgtcctcacttga

SEQ ID NO: 7545 - DNA, 489 bp, Homo sapiens
  SIMILAR (4)..(156): 761254mologous to Mus musculus Pro-Pol-dUTPase polyprotein,accession number Y12713,Smith-Waterman Score=192.
gggtatatcaactctttggctttgtgtcataaccttattcggagagacctcgatcactttttacttctgcaagatatcacactggtccattacattaatgacattatgctaattgggtccagtgagcaagaggtagcaaacacactggacttattgcccaatgggcccatgaacaaagtggccatggtggcagggctggaggttacgcatgggctcagcaacacggacttccactcaccaaggctgacctgcctggctatggccactgctgagtgtccaatttgccagcagcagagaccaacactgagccctcgatatggcaccattccttgggggcatgggacgcacctggagggcgagggtgctggcgtctccagaaggctggagagtagtgtggatcagaggagcctcttagggatgcagatgcttgagtccgttacaacccgaccaagacgctcccagcaggaggccaaggacctgcgtttttaa

SEQ ID NO: 7546 - DNA, 1680 bp, Homo sapiens
  SIMILAR (232)..(879): 781254mologous to Mus musculus Pro-Pol-dUTPase polyprotein,accession number Y12713,Smith-Waterman Score=869.
aaacttaaacatgctagcttgagcctaaagggagttgaggagaggaagcaggagagcagtattagaaagagcacagtaccagacacagttatgcctgtcgttgaaccaggagtcaagactcaagttccagcaggctctagatgtaaggttcagagtgtgaccaatgaggaggtgcgctacactccaaaagaacagagttttctaacttataaagcagaaatctggagaacagtgccagaatgcataattggcatagacatacttagcagctggcagaatccctacattggctccctgactggtagggtgaggcctatcatggtggaaaaggccaaatggaaggcattagagctgcctctacctagaaaaatagtaagtcaaaaacaatatcacaaccctggagggattgcagagattagtgccaccatcaaggacttgaaagatgcaggggtggtgattcccaccatatccccattcaactttcctatttggcctgtgcaaaagacagatggatcttggagaatgacagtggattactgtaagcttaaccaagtggtgaccccaactgcagctgctgtaccagatgtggtttcattgcttgagcaaattaacatatatccttgtacctggtatacagccattgattcgacaaatgcctttttctccattcctgtccataaggcccaccaaaagcaatttgccttcagcttgcaaagtcagcaatataccttcactgtcctgcctcaggggtatatcaagtctccagctttgtgtcataattttgttcacagagatcttgatcacttttctcttccacaagatatcacactggtctattctactgatgacattatgcggattggacccagtgaatcacagcagagacctctaggattttggagcaaggccctgccatcttctgcagatacctactctccttttgagacacagctcttggcttgttactgggctttggtagaaactgaaggcttgattatgggtcatcaagtcaccatgcgacctgagctgcttagaaggcacaaggatgtagaacctccaaatttactgcgaggggcacagccacagtcccgcaaagcagcagctgcagcaacagtggatgataatgagcaacagcaagaacaacagggtgctgacgaaggtgaggaagataatgtaggcagcagtgtcccacttggactgaaagggctgatccctgtcagctgttggtctccccacacttccagagccattactcccagctcctccatgaacaacagacccattttagcagaagcgccctggcaccagcagctgcatcagaccccacctgggcagaagccagctaaggcagtgcaggttgctggtggtcttcaggttgtctgcatctggcaggggtttgagtgcctgcacttggtgctgggcacggctgagccatcccagacgccaaggagtttacagtctagtccagtcagtgacgaggttaaaacgaattctcgcatcattgctactgcgaatgcaccgggacaggatcagcccttcaaattctcccacgtggtccctgcaggcgcagagtgcggaagtcgggccgcggccgccgcagagcgccgggggcgggaggagcaaacgcaggaggccatggccgccgccgccgccgccgccgacgccggcgccggctgctaa

SEQ ID NO: 7547 - DNA, 703 bp, Homo sapiens
  SIMILAR (693)..(40): 661254mologous to Mus musculus Pro-Pol-dUTPase polyprotein,accession number Y12713,Smith-Waterman Score=708.
aaatgcgaccaaggtctctccgaataagaatatgacatgaataagattatgacacaaagccggagagttgatacacccctgaggtatgacagtgaaggtatattgctggccttgccagctgaagacaaattgcttctggtgggccttggaacaggaatggagaaaaaggcatttgtcaagtcagtggctacataccaggtaccaagagatatggtaatttgctcaagcaatgaaaccacatctggtacagcagctgcaaattggagtcaccacttggttaaacttacgataatccgctgccgttcaccaagatccatctgtcttctgcacaggccaaatgggagagttgaaccgggatgtggtgggaatcaccaccccgcgtctcaagtttttgatggtgacactaatctctgcaatccctccgggaatacgatattgtttttgatttactgtttttctaggtagaggcagctctcatggcttccatttggcctttccaaccataaaagccctcaccctaccagtcagggagccagtgtgggggttctgccagctgctaagtatgtctctgccaattctgcattctggcactgggaaaatgaccacaggatgagtccggggacccactggacccactgtaagtcagacctgagctaaaactccattaattacctgacctccttaagcccctatttaactggag

SEQ ID NO: 7548 - DNA, 2542 bp, Homo sapiens
  SIMILAR (2439)..(2540): 581254mologous to Mus musculus Pro-Pol-dUTPase polyprotein,accession number Y12713,Smith-Waterman Score=77.
tcaagctgctttcctagatgtggagatcagagaaggacttggaaaagctgatgtcagagcacagacccagatgtagagttgagccatcagctgtcttgggaaagagcactgcagtggatagaaggtgcaggtgtgcctgcaaatgcagggaaacaccaccccattaatcaaagatgccccacatccactgacatataaaaggaccttcccactccatcccctttccagctcttcatcccactgacagccacttttattggcaataaaatcccccacatttaccatcttcaatacgttcatgtcacctgattcttcctgctgccccaaggccacacagagttcagctcctgctagcgcccagaagcactcatcccagcccctgcacccactcacctgtgtgctcctcctcccatgaggggttgagagctgcaggctgagtaagtccaactggtagatgatgcctggggtccattctcccactggtcttggctggctatgacatcccaggtctctgggtgtcagcatgtgcatttcagcatgtgcgtctctaaatttgacatgatatgtacgaaatatggctgctgtgaggattaaatcatgtgctaacacaggagtgaccacgttttcaggtgtctccagccattcaatcaccctgtttctcctgtggagcctccttttcatttttttctgcagcgttgtccctccagaagtttgccattctccagaactaaaatgaaaccctgtggggtccctccaccgccctccaggcacaccactgtggcccgatcccggggctcttctccttgccattctccctgctctaatagattttcttttccaacagctttcttctgtgtaaaaaactttttcagtctttaaatctccaaagatgtctttattttctctcacagtcaattgatcttttagccaagtataagatttaaggttcaaagacatctccacctgaactttgaaagcactgatctgttgtctgctagcttctgcattattgatgtgagtttcaagcaatgaaaccacatctggtacagcagctgtaattggagtcaccacttggttaagcttacaataatccactgtcattctccaagctccatctgtcttctgcacaggccaaatgggagagctgaatgaggatgtggtgggaatcgccacccctgcatcttttaagtccttgatggtggcagtaatctccacaatccctccagggatgtggtattctttttgatttgcaatttttctaggtgatggcagctccaatggcttccatttggcctttcccacaacagtagccctcaccctaccagtcagggagccaatgcaggggttctgccagctgctaaatatgtctataccaattatgcattctgacactctaggggcccaccaagcctttagtctagttataggcctagaagcaaacagaggtgttgggggtggcttctgaggagaatcaacattattttgcctggcaactgcctcaggcagcgcagggtttatctcttcagacaaaggtggaaaggctgatagcagcatgggtgggggagaggacgttgccactactggggatggggaagctgttacttctggccaaaaatgttcatcagagtttattaactcagtgtccccagcttcatcagggtcctcccacatgtccccattccaagttgcagggtcccattcttttccaatcaatgccctcattctaacagtagacacctggtcaatcactctcacgttaagagcttgtgtctgtttttccatagtttcagctctttctctacaggagtgggatgactatcaggtggcagagcggtactcctaccaaaaacaatcagaaatgccagacaaaatggcaaaatggcagttgttaaaggaatttaacgggtatatcaactctccagttttgtgttctaatgttattcagagagaacttaatcacttttctcttctgcaagatatcacactggtccattacattgatgacatcatgctgattggatccagtgagcaagaattagcaaacacactggacttattggtgagacatttgtttgccagaggatgggaaataaatctgactaaaattcagggactttctacctctgtaaaatttctaggggtccagtgttgtcaggcctgtcaagatatgccttctaagtgggcccatgaacaaagtagccatggtggcagggatggaggttacacattggctcagcaacatggacttccactcaccaaggctgacctggctatggacactgctgagcgcccaatttgtgagcagcagaaaccaacactgagccctcaatacggcaccattccttgggggttatcagccagccacctggttgcagcattgtctctgaccaaggcactcactttatggctaaagaagtgtggcagtggcctcgtgcttatggaattcactggtcttaccatgttccccatcatcctgagcagctggattgaaagaatgatgggatggccttttgaagtcacaattacaacgccaactaggtga

SEQ ID NO: 7549 - DNA, 1017 bp, Homo sapiens
  SIMILAR (138)..(614): 531254mologous to Mus musculus Pro-Pol-dUTPase polyprotein,accession number Y12713,Smith-Waterman Score=389.
tggtgattcccaccacatcccagttcaactttcccatttggcctgtgcagaagacagatggatcttggagaatgacagtggattattgtaagcttaaccaagaggagaattttaataatcaagtagataggatgacccattctgtggataccactcagcctctttccccagccacccatgtcatcacccaatgggcccatgaacaaagtggccatggtggcagggatggaggttacacacgggttcagcaacatggacttccactcaccaaggctgacctggctacagcgggcaaagttttccagaaggctgtgtaagctctgaattagcattcaatatatggtactctttctctcatagccaggattcacaggtccaggaatcaaggagtggaagtggaagtggcaccactcaccatcagccccagtgatccaccagcaaaatttttgcttcctgttcccccgacattacgttctgctggcctagagttcttagttccagaggaaggaatgctgccatcaggagacacaacagttccattaaactggaagttaagattgccacctggacactttgggctcctcttccctttacatcaacaggctaataagggaaggcttagcccccattctcgggaaaggggtacttctgtctttgcctcctccaattcccaacctgtcacagctctgaacaatgagccagcaggccctaataagagagatattggcaaagccaagggattgaaattccaccaccctgggccccacaggcaggagagagacatgctggagcaatgctatgaccttggggctatccagtgggaaagcaatggaaccatcttatcaagaagcaaggaaggcattgaaattggacctgctttccatcaggcacacagaaacatcactctccatcagttaggccggagacagaaggagctgaccagaggccacggcattcctgggctagacgggaacccactaactggaattgcctggtctcccatgcaaaccttgtccc

SEQ ID NO: 7550 - DNA, 2207 bp, Homo sapiens
  SIMILAR (240)..(725): 711254mologous to Mus musculus Pro-Pol-dUTPase polyprotein,accession number Y12713,Smith-Waterman Score=603.
aagtaacagcttccctatccccagtagtggcaacatcccctccccaacccatgctgccatcagactttccacctttgtctgaggagataaaccctatgctgcctgaggcaacagtgatagcctcccctaaggaaattgccaggcaagataatgttgattcccctcaggagccacccccaacaccccagttttcttctagacctataactagactaaagtcccagtgggcccccagagggccagagtgcgtaattggcatagacatacttagcagctggcagaacccccacattggctccctgactggtagggtgagggaaggctacatggtgggaaaggccaaatggaaaccattagagttgcctttacctagaaaaatagtaaatcaaaagcaatattgcatccctggagagattgcagagattagtaccaccatcagggacttgaaagacacaggtgtggtgattcccaccacatccccattcaactcttccatttggcctgtgcagaagacagatggatcttggagaatgacagtggattattgtaagcttgaccaagtggtgaccccaattgcagctgctgtaccagatatggtttcattagttaagcagattaacacatctcctggtacctggcaacacattactcatttggatgtgttactctggcggatttatcaagtgacccaaaaggctgccagttttgagtggggtccagaacaggagaaggctctgcaacaggtccaggctgctgtgcaagctgctctgccacttgggccatatgacccagcagatccaatggtgcttgaggagaaatggcgaaatgtgcgattatatactgatttatgggctgtagccaatggtttggctggattatcagggacttggaagaagcatgattggaaaattggtgacaaagaaatttgggaaagaggtatgttgatggaccactctgagtggtcaaaaactgtgaagatgtttgtatcccatgagcatgttctaacccaatgcaaggaagctaagaaacttgaaaaaaggttagaggaattgctaactggaataactagtttagagaagaacataaatgacccgatggaattgaaaaacatagcacgagaactttgtgaagcatacacaagtatcaatagccgaattgataaagtggaagaaaggatatcagagattgaagatcaacttaatgaaataaagtggaaagacaagattagagaaaaaagaatgaaaaggaacaatgaaagcctccaagaaatatgggactatgtgaaaagaccaaacctacatttgattggtgtacctgaaagtgacaggaagaatggaaccaagttggaaaacacacttcaggatattgtccggaagaacttccccaacctagcaagacaggccaacattcaaattcagaaaatacagagaacaccacaaaaatactccttgagaagagcaaccccaagacacataatcatcagattcaccaaggttgaaatgaaggaaaaaatattaagggaagccagagagaaagtattggatgttctggccagggcattcaggcaacagaaagaaataaagagtattcacataggaagagaggaagtcaaattgtctgtgtttgcagatgacatgattgtatatttagaaaacctcattgtctcagttcaaaatctccttaagctgataagcaactttagcaaactctcaggatacaaagccaatgtgcaaaaatcacaagcattcctatacactggtcatatacaaacagagagccaaatcatgagtgaactgccattcacaattgctacaaagagaataaaatacctaggaatccaacttacaagggacatgaaggacctcttcaaggagaactacaaaccactgctcaaggaaataaaagaggatacaaacaaatggaagaacattccatgctcatgggtaggaagaatcaatatcgtgaaaatggccatactgcccaaggtcaaggatataactaagaacatacagatgctacacagatcagtagagacagccacaattctagccacaggggcagctgtcaatggtcttcagggtcccaccaaggtgctaacaatgatactatcagttgggacaggaattttgccctttcagcagccagcctctaataaccctttggcaaccgatggtaactggccaggtctggtctctggtgttgcctaa

SEQ ID NO: 7551 - DNA, 627 bp, Homo sapiens
  SIMILAR (147)..(596): 301254mologous to Santalum album proline rich protein,accession number AF020261,Smith-Waterman Score=153.
atggccccagggatggttcccattccaccacctgggaaataccattcccccaaaaagcttatttattcaactcccccaaaaccggggacttatggcatcagcgactccctttcccaatacccgacttcagccaaagccgaacctgtccccacccacaagaaccctaggagagagagcccgatcccccactcatcaccatccagtttcacggatgggcttcacccaactcccctggagatgcacgcccacacccccaaaataagacatctgggagaggacggcctgcgccacgccagcgcgttcccaccacaatcaccacccccgcgccacccgcacggtccccaaattcagcccatagtccagcctttcgggaccttccttttcgcgcagaaaagggtacggctgcggcaagggtcccgcgggagcctcactcaccagcgccaccaaagaacaaggggtcgctccagccaccagctggggagctcctccagcggggcgccaggactacactaccccgaatcctcggcacagcgcccggaccacacctcccaggatgctcggcgccaccaggcgcgccctgaaggccggcagctcccattggcctctgacggatccgtttctgagtaa

SEQ ID NO: 7552 - DNA, 555 bp, Homo sapiens
  SIMILAR (459)..(433): 661254mologous to Homo sapiens Human secreted protein encoded by gene 11 clone HMQCY03,accession number Y41318,Smith-Waterman Score=38.
ttagcccttttcctcctccgtgattgtttccagtgttttgcaactgatctgatctggggaaacgtcgtgtttaatttggagcatgctgccaacgtccccagtaggatttcggaggcagccgcaggtttcggcgcctacttttaggctgagcactgcttgtgagtaccgttcacactgacacacgaggctccactcgcatccgcagctgcgtggctttccctcgtggttattccacagtgtgtctatccgttctccagccagtggacatttagagtttccaagttttgctcgtagctcaggaagtggcagcaccagtcccttgtcctttggggcgatgacaacagagaagcaagccttggggggcagggctgctttccccccaaaatacaagtaagcacaaggcagagcggcgtgctttgtgttgacgtcgcagcagcagccatcctggcagtgaggggtcacagtcacggccacaggctcgcccatgcacagaggcacgttctggcacagctgcacagggacaccaggctctggtgacaggtgactcatgcccat

SEQ ID NO: 7553 - DNA, 2067 bp, Homo sapiens
  SIMILAR (99)..(644): 261254mologous to Streptomyces coelicolor A3(2) putative translation initiation factor IF-2(fragment),accession number AL355913,Smith-Waterman Score=77.
atgggggtggaggtctcagggagtgccaagtgctgctgggaacggaagacctggcgaatgaacttgaagaagacaaaggcgggaaataggtcccaggggaaaggccccggggtcagagcggaccacaagtcctgccatacgggcctacttggtgttcctccaacacgccagaaccccaaagcctcagagcaccccagtaactccaagtccccgttccgctccagtctaggggtcaaagatgacagcctcagcccatgcctggaggtcacagcccaaggcaccatgagtgcaaatgcccccaaccccaagttctgcaaaagggccccacctggacggggtcagagtaccagctgcaaaccccgagtgaccaaccgcaggccccacaagggctgccatcctgagagcaacaccagcgccttctctccccatgcctggaacaaacaggccgagcccaagagggaacagtctccaagactctgcccctgcttcagatgccggctggcctcccacagaggctgtgacatgtccccgcctggagcagggagaatcctcctcagcggaatctgtgagcgcacagaccacaggggcctcgcccagtgccaggcacagagcggagaaatggcaggggcggcgctggctgcaggcagctctgagctttcctgtgacactcctcaaaaggagctgaggcaatgcatagccctgcaggaagagactggaaatggtcttggagagagaactgcggggcatggtgacagcggtgagaggctgcaggtgcacagatctcaacgaggggccaacgtgcctctgtgcatgggcgagcctgtggccgtgactgtgacccctcactgccaggatggctgctgctgcgacgtcaacacaaagcacgccgctctgccttgtgcttacttgtattttggggggaaagcagccctgccccccaaggcttgcttctctgttgtcatcgccccaaaggacaagggactggtgctgccacttcctgagctacgagcaaaacttggagactctaaatgtccactggctggagaacggatagacacactgtggaataaccacgagggaaagccacgcagctgcggatgcgagtggagcctcgtgtgtcagtgtgaacggtactcacaagcagtgctcagcctaaaagtaggggcatcaccgctggccagctgcctgctgtggtctgcgagtcgtgggagtgtcacatttgaacgctgggacaggggacgcaggcttagaagacaggagacactctctgagctgttgattttttcagagcagtcggacctgttcccaaccgagttctccgaggccttgtcagccacctgcctccctggtgctgtgacacggcctgtgcgggttttgcgggcgcccgcggccaccgacaccttcttcccagtgcggcccgggctgcggccccgggtccgaggaggcccggggagacccggaggaggtcagaaggccttcagggtccccgggatgggcctaatcatgattgtcactgaagatccaggagggcttcctggaggaggaggcagctccattctgaaatgccaagggtacagctttattgggacagccagtgtctctgaatatgttgacctggtcaacccgtcctccttcattcccaaggtgggaaaaccgtggagcttcccagagcccagcacagggcagaagccctacacgttccccaggagatggaaagaagattccctggttctggggactgaagattttgacaagctggtaatgcgcacctctggtcagaaccacgtctgcagaggaaagacccagccatatccctcttttctcagctgcctgctaggccctctgacccccatcaccgcaatgaccacctcccccactgaactgcgaaccgcactgggggcgaggccggctctgtcggggtcacgtatccctgtatccctggcccctagcacaggtttgcagagctcacgactgccctcctgctctgccccatcccacagtggggtcttccatgcctgctctgatatgttcatcatcacagccttcccagttggattttgcaattaa

SEQ ID NO: 7554 - DNA, 807 bp, Homo sapiens
  SIMILAR (325)..(471): 1001254mologous to Homo sapiens Human secreted protein, SEQ ID NO: 5537,accession number G01456,Smith-Waterman Score=265.
atggcagtgggggctcccgtggcaaaagagaaggaagtgctagcggtgaaacatcagtacctcctaatgggatgtgatagaacacccgaaaaactgctgaatggtgtggtgcttccccagagcccaggggacagtgtctggggtcccacccctgagaaagtaaccccaggaagactgacagctgcctctcggaaacagattgatcagtgtgcctcaggccaccgcagccctctttcagtcatgctggcattagagcacagagagggcttcactcggccagggacctcctccacggtcagggaagaagggactgacaatgaagagagaatcgcatgtgtgagtgcccctagtgtttaccagaaactcagagagctgtgcagagaaaacttttcgatatacatctttgaatatgacaaaagatttgccatgtatggagaggagtttattttctatgattacaataatccattggacttacccgaaagaattgctgcacatagttttgacatcgtaatagcagatcctccctatctttcggaggaatgtctcagaaaaacatcggaaaccgtcaagtacctgacgcggggcaagattctgctgtgcacaggaaagaagcggcagacccttgtggtatgtgttacagaccttaaagttggtgtggacccaaagagtgccatcatggaagaacaggcagcagaactccttggagtgaagatgtgcacgtttgttccaagacacacccggaacttggcaaatgagtttcgctgttatgtgaattatgattctgggctggactgtgggatctga

SEQ ID NO: 7555 - DNA, 879 bp, Homo sapiens
  SIMILAR (40)..(417): 481254mologous to Homo sapiens Human secreted protein, SEQ ID NO: 5537,accession number G01456,Smith-Waterman Score=257.
cgactgcgcacgcgcggctggttataaacaacttgtgaaatgagtgatttggaagatgatgagacaccccagctttctgcccatggcctttagcagctctccaggaattttatgctgagcaaaagcaacaaattgagccaggcgaggatgataaatataacattggaataatagaagagaattggcaactgagcccagttttggtatagtcaggaaactgctctgcagctggcacaggaggcaattgcagctgtaggagaaggtggcagaatcgcatgtgttggctccccctagtgtttaccagaaactcagagagctgtgcagagaaaaccttttcgatatacatctttgaatatgacaaaagatttgccatggaatgaaaagaagttaattttctatgattacaataatccattggacttacccgaaagaattgctgcacatagttttgacatcgtaattagcagatcccttcccctatctttcgggaggaatgtctcagaaaaacatcggaaaccgttcaagtacctgacgcggggcaagattctgctgtggcacaggtgcccatcatggaagaacaggcagcagaactcccttggagtgaagatgtgcacgtttgttcccaagacacacccggaactttggcaaatggagttttcgcctggtttatgtgaatttatgattctggggctggactgtgggatctgattacagacggtgacataacacaggaaggaaccctgtcacattcctctttttgtattttcgtagtagatttaaaagttataatctcttcccctccccccaaactggagctgtccctgggctgggtttccaaataaaagtgtgcgatcttcattattgtttccttaaaaaaaa

SEQ ID NO: 7556 - DNA, 712 bp, Homo sapiens
  SIMILAR (293)..(610): 381254mologous to Homo sapiens ribosomal protein L23a,accession number U43701,Smith-Waterman Score=99.
atggcgccgaaagcaaagatggaagctcctgcccctcctgaagcggaagccaaagtgaaggctttgaaggccaagaaggtagtgttgaaaggcgtccacagccacaaaaaaaaaagaagatccgcacgtcacccactttccgataacactgcgactccggaggcagcccaaatatccttgggagagcgtcccccgaagaacaagcacccagatatcctcgggagagcgccccctggagaacaagcagcccagatatcctcgagagagctcccccccgccgggagaacaagcgccaaaatatcctccggaagagcgctcccctggagaaacaaggcttgaccacctatgcctatccatcaagtttcccgctgacccactgagtcctgcccatgaagaagatagaagacaacaacacactgtgttccattggtgaatgttaaagccaacaagcaccacgattaaacaggctgtgaagaagctgtatgacatttgatgtggccaaggtcaacacccttgattcggcctgatggagagaagaatggcatatgttccgacttggctcctggattacgatgctttgggatgtttgccaacaaaatttgggattatctaaacttgagtccagcttgcctaatttctgaatatatatatatatatatatatctttttcacccataaaaaaaaaaaaaaaaaaaaaacggacgcgtggggt

SEQ ID NO: 7557 - DNA, 1038 bp, Homo sapiens
  SIMILAR (562)..(831): 821254mologous to Homo sapiens NAG13,accession number AF194537,Smith-Waterman Score=373.
gacaaggattcactctgtgactcttgtaaaaccagctgctcctacaactgctcaaagccaagaagcagttggcaggatcaagatatttcatctggtacagggctccattccagactcacattggccaacacaggaaaggagtccaagactgtccaggcttctttggaccagcagctgggaaggctccttagtgtctccctgaggctgggtgtggagccttctctgcagtcatctggaaacttgttggtttctttgctcttatctagattcataacatataaagttactatagtggaatgggtaaaaacttacgctctggggttagatctgaaaaagtcggaaagacctgggtttgaatctgagctccacagccacaacagctgtgagtgtgctgtatcacacctgaagccagtacatctcagagtctcacccatgggccacagtgagtactacctggttaccactgctgattattcagaggccaatggctcacagtcagcaggtgatgaattcttccagactcagtctttcccttcaaggcagcaggctctcttccggcccaaaatacaaattaccatcagagaatactataaacacctctatgcaaataaactagaaaatctagaagaaatggataaattcctcaacacatgcaccctccaaagactaaaccaggaagaagttgaatccctgaatagaccaataacaggctctgaaattgaggcaataattaatagcctaccaaccaaaaaaaggccaggaccagatggattcacagccaaattcaaccagaggtacaaggaggagctggttatttacaagaaatttcaaattccctgcattgttccagagctaaattcaacaataagtgctaattcaacaaatgctgacacgtgtacgccaaaatatgttaccttcaattcaaagggaactgctcaaaatgcagattctgattctgcaggcctagagtggagcctgatgttctgcatatctgataaagtctcaggtgatgatgatgctgatgctgttgattcttga

SEQ ID NO: 7558 - DNA, 573 bp, Homo sapiens
  SIMILAR (353)..(466): 971254mologous to Homo sapiens amino acid transporter system A1,accession number AF271070,Smith-Waterman Score=188.
gaaaggaagagacattttcagcctggtacgtggatggccgcgttctggtggtgatagttacctttggcataattctccctctgtgtctcttgaagaacttagggtatcttgggctatactagtggattttccttgagctgtatggtttttttcctaattgtggttatttacaagaaatttcaaattccctgcattgttccagagctaaattcaacaataagtgctaattcaacaaatgctgacacgtgtacgccaaaatatgttaccttcaattcaaagaccgtgtatgctttacccaccattgcatttgcatttgtttgccacccgtcagtcctgccaatttacagtgagcttaaagacccgatcacagaaaaaaatgcagatggtttcaaacatctcctttttcgccatgtttgttatgtacttcttgactgccatttttggctacttgacattctatgacaacggtgcagtccgacctccttcacaaatatcagagtaaagatgacattctcatcctgacagtgcggctggctgtcattgttgctgtgatcctcacagtgccggtgttat

SEQ ID NO: 7559 - DNA, 2056 bp, Homo sapiens
  SIMILAR (259)..(948): 841254mologous to Homo sapiens NGT,accession number AF247166,Smith-Waterman Score=942.
  misc_feature (1)...(2056): n = a,t,c or g
atgagtgagcttgaagacaggctatttgaaaatacacagtcagaggaatcgaaaggaaaaagaataaaaaagaatgaagtatgtctacaagatctaaaatatagcctcaaaagggcaaatctaagagacactggccttaaggaggaggttatttacaagaaatttcaaattccctgcattgttccagagctaaattcaacaataagtgctaattcaacaaatgctgacacgtgtacgccaaaatatgttaccttcaattcaaagaaaaaaatgcagatggtttcaaacatctcctttttcgccatgtttgttatgtacttcttgactgccatttttggctacttgacattctatgacaacgtgcagtccgacctccttcacaaatatcagagtaaagatgacattctcatcctgacagtgcggctggctgtcattgttgctgtgatcctcacagtgccggtgttatttttcacggttcgttcatctttatttgaactgggcttaagaaaacaaaggtttaatttatggccgtcaataccggtggttacctgcatactcttggttgttatcaaccttgttggtgatcttcatacccctccatgaaggatattttttggagtcgtaggaagttacatcttgcttaacatgcttattttcattcttccttcatcttctttattttaaaaatcacagaccaggatggagataaaggaactcaaagaatttgggctgcccttttcttgggcctgggggtgttgttctccttggtcagcattcccttggtcatctatgactgggcctgctcatcgagtagtgacgaaggccactgaaacccgccgagaaaaagaaacatccctgttgtctgctcagtcaagtccccacacatcagcaatctctcaccactttttttgcaagtttacagaagcaaacagaaatgtacaggatacttaaaatggaatacctttttggttgcaaaacagagcacatggttctataatgcttcatgtccctccaagatttgagatcaatttagggattgtgaaatttttttttcaaatttcatacaatcatatttcccagtacttttcacaatcattttttacccatctaactctatgttttgtggcttcccggtctcttagaactttgaaaacatgatatacaataatgtttatttattatacatccagattctgaaataattttcctactgatgttcagctcacactatctgtacctttttaggaggaggaaaaggaatcttgaattgtatatatttattttggctttacagaaaaaaatgggttcgtaaataattttgcctattttggggtaacatagcacatgggggtaatcatctgaaagttatagggcactgccacctgctgaatcagagcatgcccaatatttgaggtggctctgatttcctgggcagctgaactcgggtagtccagtggcctagctggtgaccacatctagtcccatccagagacattctctggcaaagtgttctcagctggaaaagtgggttgggggatgattctttaccttgggtaaatttaaattgaaggcttacacatttggggtaatctagtcaaatgaagtattttttccctcttgggcaacttggtggtcagagttactctgggtcttgagtcaactttcgctgggggaaaacctatgggaacctacttgcaaaaaggattgtcccaaaatgccctaaagaaaatactccctctggatggcatttaagccttccaanccctaacctgtctttgctgaagtggtagaaaaatgttttagtacattataggcccagcagcttttaatccatgtccaccagctagttgcacagagaatcatgtgtacctaactataggatgatctatgataagtaactcctgttttatattgagtatttttgtgaagtcttttaaagacttgttttatatctataaatctagtttatttcaaatacaagaattttgttccttaaataagcctcatttctatttcttctttattaattctccatctagtcttttgtaaaaaaaaa

SEQ ID NO: 7560 - DNA, 1178 bp, Homo sapiens
  SIMILAR (307)..(510): 751254mologous to Homo sapiens protocadherin beta 8,accession number AF152501,Smith-Waterman Score=233.
tttaattgtgagatattctactcattttttatggtgatgaagagatttctaagacatttgcacttaatgaacgaaggggagaaattaaaataatcagaaaactagattttgaaaaaattgtgtcatatcaggtggatattaaagcctctgatggggcaggtctttctggaaaatgcactgtcataatacaggtggtagatatcaacgataacgctccggaactgaccatggcttcattcacaagccccatccgcgaaaattctcctgagaccgttgcagctcttttcagcattcaagaccgcgattctgttcgccctcaggtcgctggactacgaggccctgcaggagttcgagttccgcgtgggcgcttcagacccgggcttccacggcgctgagcagcgagagcgctggtccgcgtgcttggtgctggacgccaacgacagctcactcttcgtgctgttcccgctgcagaacggctccgcgccctgcaccgagctgatgccccgggcgggccgccgagccgggctacctggtgaccaagcagttgctcaaggccacggagccagggctgttcggcgtgtgggcgcacaatggggaggtgcgcaccgccaggctgctgagcgagcgcgacgcaaccaagcacaggctggtggtgcttgtcaaggacaatggcgagcctcctcgctcggccaccgccacgctgcacgtgctcctggtggacggcttctcccagccctacctgcctctcccggaggcggccccggcccaggcccaggccgaggccgacttgctcaccgtctacctggtggtggcgttggcctcggtgtcttcgctcttcctcctctcggtgctcctgttcgtggcggtgcggctgtgcaggaggagcagggcggcctcggtgggtcgctgctcggtgcccgagggtccttttccagggcatctggtggacgtgagcgacaccaggaccctatcccagaggtacaagtatgaagtgtttctgacgcgaggctccgggacaaatgaattcaaattcctgaagtctgttatccctaagcatccgggcgctgtgaatgatgggaggaaaagtccaactttgtaaatggttttggattcaattaagaatctgtagatttttcagagcatttaggataaaggttagtcctttatcaatagaaaaa

SEQ ID NO: 7561 - DNA, 798 bp, Homo sapiens
  SIMILAR (549)..(761): 1001254mologous to Homo sapiens Eps15R,accession number AB015346,Smith-Waterman Score=372.
acgcgtccgggagcccatggtgccagcctgaccgacctggccaacctgagcgaaggcgtctccctggcagagaggggcagttttggagccatggatgatcctttcaaaaataaagccttgttatttagcaacaacacgcaagagttgcatccggatcctttccagacagaagaccccttcaaatctgacccatttaaaggagctgaccccttcaaaggcgacccgttccagaatgacccctttgcagaacagcagacaacttcaacagatccatttggaggggaccctttcaaagaaagtgacccattccgtggctctgccactgacgacttcttcaagaaacagacaaagaatgacccatttacctcggatccattcacgaaaaacccttccttaccttcgaagctcgacccctttgaatccagtgatcccttttcatcctccagtgtctcctcaaaaggatcagatccctttggaaccttagatcccttcggaagtgggtccttcaatagtgctgaaggctttgccgacttcagccagatgtccaaggtaaaagtacacctgtaagccagcttggttccgcagactttcccgaggcccccgatccattccagccactcggggctgacagcggcgacccgttccaaagtaaaaaggggtttggggacccgtttagtggaaaagacccatttgtcccctcctctgcagctaaaccttctaaggcctctgcctcgggctttgcagacttcacctctgtaagttgagtcctccgcctccgggccaccccactcccttccg

SEQ ID NO: 7562 - DNA, 1146 bp, Homo sapiens
  SIMILAR (424)..(744): 551254mologous to Homo sapiens Eps15R,accession number AB015346,Smith-Waterman Score=264.
atggggttttgccatgttggccaggctagtctcaaactcctggcctcagatccctttggaaccttagatcccttcggaagtgggtccttcaatagtgctgaaggctttgccgacttcagccagatgtccaagacagatccacaggtgaggagtgaactgttgaaggaggacagcagcgaggctggttaccagactggacccgttggtgtccggccctcaccacacggtgacctgaactcactgtggctctggtcccagacagctgtagggcttctccagacgctggcagtgtggttggagctcatctttaaggcctggggacaactggggcagcagatgggggcactcccagattccaatcgcagcttcgtacttggtgtgatcattgtcgtgtggtccatgtgccaactttatctagtgccacccccaccttctggccctttcacctcctccttgggaggggcaggattctcagatgacccctttaaaagtaaacaggacactcctgctctgcctccgaagaaacctgctcctccacggcctaaaccgcccagcgccaccgcctaccggtgccggatggcgggggaccagggcctccctgctcaccagcccagagtagcagcagatgccgtgggaccctgtgtggggagcaagagggtccccccggcccagctgcccaggtccacgcaagtgccgtatgtgcgtggtcccccgagtcattcagcacccctctctgctgctgcccagtctagtgggaaggaggagccagccacagatctggcgctcccaccctatgccagcagcacccccgagttgacaaccaaaaatgttcccagactgggtcactctccactgagcatcacagatgcagaagatcatggaaattggcatttgagtgtcagaaaggggcagaaaaaaatgatgatgggatatttctggattagtcggtatgacctagcgctgcctgagttggtgtctcttactgaaacgtacaactatcacactttctattctgtctgttctccaacagaacatacacgcaagaaacagaaacagcttcagccccgtgaacgatttgcctttcactggactcagaagcttccaggagaaacctggaagacattttcaaataagcaagaaaaatag

SEQ ID NO: 7563 - DNA, 1040 bp, Homo sapiens
  SIMILAR (453)..(749): 941254mologous to Escherichia coli was o492p and o826p before splice,accession number U28375,Smith-Waterman Score=496.
atgggagtttgatgttccagcaagtaccaatggttgagattgatgggatgaagttggtacagaccagagccattctcaactacattgccagcaaatacaacctctacgggaaagacataaaggagagagccctgtacgctatgacccatgatgacgaagtccgagctccgtacgccagctgcagcttgcaaattataatcagagtgccagttcagaaccagagtcgatgctgtacgaaccatgatgattccaggttcacccaggtcttaaagagccacagacaagactaccttgttggcaacaagctgagctgggctgacattcacctggtggaacttttctactacgtggaagagcttgactcgagtcttatctccagcttccctctgctgaaggtaaaactgttagcgtcttcggtgaaacctgtgccactcccgtcggccctccgctggcccgcacacgcagtcgcgcaaaatattgtcacttcctggctgactggcggacgcttcatcgaactaaaaaccgtccaaattcttgaccgcctggagctggaaaagccctgtatcgatgccgaagacgagtgctttaacaccgaatggtctaccgagtttaccctgcttaaagcctgggatgaatacctcaaagcctggtttgccctgcaccttctcgaagcgatgttccagccttctgattccggtaaatcgttcatctttaatatgagcgtcggttacaacctcgaaggacagcccctgaacccaaagaattacccatcccaaggggtgccaagggtcttaaagagccacagacaagactaccttgttggcaacaagctgagctgggctgacattcacctggtggaacttttctactacgtggaagagcttgactcgagtcttatctccagcttccctctgctgaagccacacacgcatgttgacaatacaaagaaaggatcgcacccccacatgtgcgcatacactgactacgtcaacaaccccaatgatcgcatgccccagagagagataacgttcgtcagctag

SEQ ID NO: 7564 - DNA, 869 bp, Homo sapiens
  SIMILAR (2)..(433): 971254mologous to Homo sapiens glutathione S-transferase A3,accession number L13275,Smith-Waterman Score=722.
aaaccagaagactgttaccatggcagggaagcccaagcttcactacttcaatggacggggcagaatggagcccatccggtggctcttggctgcagctggagtagagtttgaagagaaatttataggatctgcagaagatttgggaaagttaagaaatgatggaagtttgatgttccagcaagtgccaatggttgagattgatgggatgaagttggtacagaccagagccattctcaactacattgccagcaaatacaacctctatgggaaagacataaaggagagagccctaattgatatgtatacagaaggtatggcagatttgaatgaaatgatccttcttctgcccttatgtccagctgaggaaaaagatgccaagattgccttgatcaaagagaaaataaaaagtcgctatttcccctgccttcgaaaaagtgttacagagccatggacaagactaccttgttggcaacaagctgagccgggctgacattagcctgggtggaacttctctactatgtggaagagcttgactccagccttatctcccaacttcccctctgctgaaggccctgaaaacccagaatccagcaaccctgccccacgggtgaagaagtttcctacagccctggcagcccaaggaagcctcccgcagatgcaaaagctttagaagaagccagaaagattttcaggttttaataaagcagccatggaggctaagaacatgcaagaccaatattctaaagttttgcaacaatgaagtgctttacttaagtgttgattgtgcctgttgtaaagctaatgaaccctttccaattatatgctaattaaataataaaaactcctatttgctaacttagttaaaaaaa

SEQ ID NO: 7565 - DNA, 1014 bp, Homo sapiens
  SIMILAR (184)..(825): 671254mologous to Homo sapiens glutathione S-transferase Ha subunit 1 (EC 2.5.1.18),accession number M21758,Smith-Waterman Score=590.
ggcacgaggagctattgagaggaacaaagagcttataaatacattaggacctggaattcagttgtcgagccaggacggtgacagcgtttaacaaagcttagagaaacctccaggagactgctatcatggcagagaagcccaagctccactacttcaatgcacggggcagaatggagtccacccaggtggctcctggctgcagctggagtagagtttgaagagaaatttataaaatctgcagaagatttggacaagttaagaaatgatggatatttgatgttccagcaagtgccaatggttgagattgatgggatgaagctggtgcagaccaaagccattctcaacttacatttgccagcaaattacaaccttcttatggggaaagacattaaagggagagagccctgatttgattatgtattttaggaaggttttagccagattttggggttgaattgatcctcctttttgcccgtatgttccacctgagggaaaaagatgcccaagctttgcctttgatccaagagaaaacaaaaaatcgctacttccctgcctttgaaaaagtcttaaagagccatgggacaagactaccttgttgggccaacaagcttgagccggggctggacattcatctggtgggaacttctctactacgtcgagggagcttggactccacgtcttatctccagcttccctctgctgaaggccctgaaaaccagaatcagcaacctgcccacagtgaagaagtttctacagcctggcagcccaaggaagcctcccatggatgagaaatctttagaagaagcaaggaagattttcaggttttaataacgcagtcatggaggccaagaacttgcaataccaatgttctaaagttttgcaacaataaagtactttacctaagtgttgattgtgcctgttgtgaagctaatgaactctttcaaattatatgctaattaaataatacaactcctattcgctgacttagttaaaattgatttgttatcattagga

SEQ ID NO: 7566 - DNA, 2286 bp, Homo sapiens; identical to SEQ ID NO: 3628
  SIMILAR (1029)..(1124): 871254mologous to Mus musculus Pro-Pol-dUTPase polyprotein,accession number Y12713,Smith-Waterman Score=153.

SEQ ID NO: 7567 - DNA, 942 bp, Homo sapiens
  SIMILAR (1)..(342): 861254mologous to Mus musculus Pro-Pol-dUTPase polyprotein,accession number Y12713,Smith-Waterman Score=514.
  misc_feature (1)...(942): n = a,t,c or g
atgacagtggactattgtaagcttaaccaagtggtgattccaattgcagctgctgtatcagatgtggtttcattgcttgagcaaattaacacatctcctggtacctggtatgcagccattgacttggcaaatgcctttttctccattcctgtccataaggcccagcagaagcaatttgccttcagctggcaaggccagcaatatacctttactgtcctacctcagtggtatatcaactctccagctttgtgtcataatcttattcggagagaccttgattgcttttcgcttccactagatatcacactggtccattacattgatgacattatgctgattggatccaccataaagtgggttgtgcacagcagcattccatcatcaaatggaagtggtatgtacatgattgggctcgagcaggtcctgaaggcacaaccaatggtttggctggatgatcagggacttgcaagaagcatgagtggaaaactggtgacaaaggaattcggggaagaggctaagaagggagttacagtgttggctggggtgactgacctggactataaagatgaaatcactctcctactccataatggaggggtcttcacggctccttatgatgggcgctacctgatcacggccaccctcacccccgagagagacgcctacgtggaagcagtgctgtcggtctccaacgccagcgtggcccagctgcataccgctgggtacaggagagagttcctggaataccaccgccctccaggagctttgcatacctgcgggggcccgggggcattccacctcatcgtgcacctgaaggcgggagatgcagtcaacgnnttgaaaactatgcagatgtttttagacagagcaaaacacaacacagtacccaaaaacggaggcagcctgcatgctccaggtctacacgagcacctcacagcctga

SEQ ID NO: 7568 - DNA, 699 bp, Homo sapiens
  SIMILAR (175)..(489): 761254mologous to Mus musculus Pro-Pol-dUTPase polyprotein,accession number Y12713,Smith-Waterman Score=418.
atgactggacaatcatatttgagaatgatgtgcatagaattggatatgaccaaattgctccaacgatctcaggttgactttatggaaccaatacttacaaagtacttacaaccaatacttccctctcagaaaccaacctggtatctagctcagagtgtttccatcgttacaggagatgtatggccttttaccagagtgactatgcattggggaaagggaaataatcagacatttcagagactactggacactggctgtgagctgacattgattctggaagactcaaaacatcatcatggtcctccagttaaagtaggggcttatggagatcaggtaattgatggacttttagctcaggtccaacttacagtgggtccagagggtccccagactcatcctgtggtcatttccccagtgccagaatgcataattgtgatagacatacttagaagctggcagaacccctacattggctccctgactggtaggaagacagatggatcttggagaatgacagtggattattgtaagcttaaccaagtggtgactccaattgcagttgctgtaccagatgtggtttcattgcttaagcaaattaacacatctcctggtacctgttatgcagccattgacttggaaaatgcctttttctccattcctgtccataaggcccaccagaatcaatgtgccttcagctag

SEQ ID NO: 7569 - DNA, 1014 bp, Homo sapiens; identical to SEQ ID NO: 95
  SIMILAR (553)..(945): 721254mologous to Mus musculus Pro-Pol-dUTPase polyprotein,accession number Y12713,Smith-Waterman Score=498.

SEQ ID NO: 7570 - DNA, 1141 bp, Homo sapiens
  SIMILAR (22)..(642): 821254mologous to Mus musculus Pro-Pol-dUTPase polyprotein,accession number Y12713,Smith-Waterman Score=879.
atgtcactgtggtcctccagtaaagtagaggcttacggaagtcaggtacttaaaggagttttagctcaggtccaacttacagtgggtccagtgggtcctcggactcatcctgtggtcattttcccagtgccagaatgcataattggcatagatatgcttagtagcaggcagaacccccacactggctccctgactggtagggtgtggactattatggtgagaaaggccaaatggaagccattagagctgcctctacctagaaaaatagtaaatcaaaaacagtatcacatccctgaagggattgtggagattagtgccaccatcaaggacttgaaggatgcaggggtggtgattcccaccacatccccattcaactctcccatctggcctgtgcagaagacagacggatcttggagaatgacagtgggttactgtaagcttaaccaagtggtgactccaattgcagctgctgtaccagatgtggtttcattgcttgagcaaattaacacacctcctggtacctggtatgcagccattgacttggcaaatgactttttccccattcctgtccataaggcccaccagaagcaatttgccttccgctggcaaggccggcaatacacctttactgtcctacctcaggggagatgggaaataaatatgactaaaattcagggaccttctacctcagtaaaatttctaggggtccagtggtgtggggcttgtcaagatattccttctaaggtgaaggataagttgctgcatttagtccctcctacaaccaagaaagagcacaatgcctatctggatttcggagggaacacattcctcatttgggtgtgttactccagcccatttatcgagtgagccgaaaggctgccaattttgagtggagtccagaacaggagaaggctctgcaacaggtccaggctgctgtgcaagctgcttggccacttgggccatacgacccagcagatccaatggtgcttgaggtgtcagtggcagatagggatgctgattggagctgttggcaggcctccataggtgaatcacagtggaggcctctagaacattggagcaaggccctgccctcttcttcagataactactctccttctgagagagagctcttgctcgtgcc

SEQ ID NO: 7571 - DNA, 2595 bp, Homo sapiens
  SIMILAR (311)..(358): 1001254mologous to Mus musculus Pro-Pol-dUTPase polyprotein,accession number Y12713,Smith-Waterman Score=95.
atggtgagaaaagccaaatggaagccattacagctgcctctacctagaaaaatagtaaatcaaaaacagcatcgcatccctggagggactgtggagattagtgccatcaccaaggacttgaaagacgcaggggtggtgattcccaccacatccccgttcaactctcccatttggtctgtgcagaagacagatggatgttggagaatgacagtggattattgtaagcttacccaagtgatgactccaattgcagctgttgtaccagatgtggtttcattgcttaagcaaattaacacatatcctggtacctgtaaaatttctaggagtccagtggtgtggggcctgtcgagatattcctctaaggtgaaggataagttgctgcatttggcccctcctacaaccaagaaagaggcccaacacctagtgggcctatttggattttggagggaacacattcctcatttgggtgtgttactccagcccatgtatcaagtgacccgaaaggctgccagttttgagtggggtctggaacaggagaaggctctgcaacaggtccaggctgctgtgcaagctgctctgccatttgggccatatgactcggcagatccaacggtgcttgagatgtcagtggcagatagggttgctgtttggagcctttggcaggcccccataggtgaatcacaatggaggcctctaggactttggagcaaggcccttccattttctgcagataactactctccttttgagagacggctcttggcctgttactgggctttgatggaaactgaaggtttgactatgggtcatcaagtcaccatgcaacctgaactgcctatcatgaactgggtgctttctgacccatctagacataaagtgggtcatgcacaacagcattccatcatcaaattgaagtggtatatatgtgatcaggctcgagcagttcctgaaggcacttgtttaactaaacaaggaagtggctcaaatgcccatggcaccacccgaaagtggacagctgcagcactacaatccctttctgggatatccctgaaggatagcggtgaagggaaatcttcccagtggacagaacttcaagcagtgcacctggttgtgcactttgcatggaaggagaaatggccaggaacttggaagaagcatgattggaaaactggtgacaacgaaatctggggaagaggtatatggatggactgctctgagtggtcaaaaactgtgaagatatttgtatcccatgcccatgaaccaagtggccatggtggcagggatggaggttacgcatgggctcaggaacatgaactttcattcaccaaggctgacctggctacgggcattgttgagtgcccaatttgccagcagcagagaccaacactgagccctcgatacggcaccattcctcaggggcagacatttatcctcactggaataaacacttactccatatatgggtttgcctatcctgcacacaatgcttctgccaagattaccatccgtggactcacagaatgccttatccaccatcatggtattccacacagcatgtctctgactaaggcactcactttacggccaaagatgtgtgaaaccagaattcacaggcccaggaatcaaggggtggaagtggaagtggcaccactcaccatcacccgtagtgatacactagcaaaatttttgcttcctgttcccacgacattccgttctgctaacctagaagtcttacttctagagggaggaacactgccaccaggagacccaacaacaattccattaaactggaagttaagattgccacgtggacactttgggctccccctacctttaagtcaacaagctaagaagggagtttcagtgttggctggggtgactgacctggactatcaagatgaattcagtctactactccacaacagagtaactgctgcttttccttcccttctccacagtagctttgcatatttggataatatgattgaaaaagcaaacaaatgccatgttgagggtgtggaccatgtatcagatcctgctcaaaggagggagtgtgatcggcacacaggctccagctgtcacctccttcgtggtccacctcaattgcagagccagttggtctcaggcccaagatctcctaagtcagattctggtgaaagttgcctggcctgggacccaaccttcaaagctgaagtctcccctctggcacagggcagccccagaaattctgtccaagaaccaagtcctagaactgggagccccaaaagcctgcttggtgctcttatagccctgtggccaagctggtacctaagcagtgaccctgatcctcagggatccaattccagaaatctggagatttctgcttgtcagaagtacttaagcccagcttttggaaattcagattattctacagcagaagatttcaactctgactacactttaaaatcacctgaaaattctattggatatgctagactagagaagcacagaaggctgtatggtggtgatggtggtgatggtggtggtgatgatgttagaggcggaaaaagaggagatgattctgccagtagaaagggagtcactgaacgtgtttga

SEQ ID NO: 7572 - DNA, 423 bp, Homo sapiens
  SIMILAR (381)..(112): 301254mologous to Oryza sativa hypothetical protein,accession number AP000492,Smith-Waterman Score=81.
gtcactatcaagccattaagttttgtctgggttgctgtcagccccagttggcttcctggtcaacaaggacctcaagaactgcctgtggaccgaggccccctaccagtgcatgagacacacacctaccctccccagctttccaggaaccctactggctgccagactgatgggcgggctggtatgtgtggacatgtgttcactgtcattatgctgtggctccagctggggaggtagctgagaacttggcactgcgcacacatactaggttgaaagagagttgaggaaaccagaaggccaagtggatctgctggcaaaccctgaacctgtctcctgcgcttgctctacagttctgaagttgaaaatccttttcatgcctagcatctgcttgagttataaaccccaaggcagccatgtcatagaaaa

SEQ ID NO: 7573 - DNA, 380 bp, Homo sapiens
  SIMILAR (21)..(209): 551254mologous to Homo sapiens testis-specific Y-encoded-like protein,accession number AF042181,Smith-Waterman Score=172.
gaaacccagaaaacaaccgtagtttctttgggtggttttcaaaccacagctccattgagtctgacaagattgtggagataatcaacgaagaattgtggcccaatcccttgcagttctaccttttgagtgaaggggctcgtgtagagaaaggaaaggaaaaagaaggcaggcaaggtccaggaaagcagccaatggagactactcagcctggggtgagcaaatccaactgatcctgcacaagtctccctgctacctcctgctgggctgctcctggttgactacatatttggctctctgccttctcttcatgttggcctctgtgtactatagaccctttggactttagttacaagaatatggcatttatgatcaaaaaaaaa

SEQ ID NO: 7574 - DNA, 2687 bp, Homo sapiens
  SIMILAR (861)..(730): 861254mologous to Homo sapiens Human secreted protein encoded by gene 160 clone HCELB21,accession number W74887,Smith-Waterman Score=202.
tttttttttttttttttttgacagagatacaggtttttatttttccatcatgcatgcaaacttacaactatttatactgtttaagaacacagaaataattgcgttattaacagggtgtcaaattaccaagtagaacaaccagttactaattattttggggaggttattttcacagaacacagcaacaatttccaaattattcttccaaaaccagagttatgagaccagtacaagctgataacaatgctaatggtcacacaagtttccatgttacacagaaaaaaagattgacattctggtgaagggtctcaagtaccttaccatatcagaatttttgaaagagttttacaacagaacagtctctctcttgttttgtagatgcaagggaaaggaagcatccctctcatttctttttgagactccttgttaattcttaaaacacatttctaaggcccatctctggaacttcattagttaacattaaaagcaaaaagcagacctgatgtgattatgatagtgcaccccatcactatcaccatcaaaagagactaccaatctcccaaagtagtcacggttgcattggcatagtgtcttggattttcaataaacaatacaggtgaaaagagagagatacagatgaaaccaggttgaccatagctgataagtgatgcagctaggtgatggacacatggggtccaaggaccatcctctccacttctgtgcatgtctgaaaatgtccataacacagagcaaaaaaaaaaataataacaaaaaacaaaaaagcagacttgcacatctgtatcttcccattagactaaaatggggaaagtcgtaagactttaaaggcaaaatgtgcagcatatagcattcttctgcatgtacaaagccacacctagaacaaaaaaataaagcatccaaagtaacattattccgtttctggtttgtctctgtggcttataaaatctactaatgataagattggacaaaactttgggaacatcctcaactaggcatcctatttgttcataaccccttcaattctcattttccaagctagggaggtccctcccatactctatcactgagagacaggcatgctccccctgcggcttctcaagccatttctgtctgattttgcaggcccactccataccagtatcatgcctactcgacggttttgctccaaatcccccacctagcacacccttgctacagctttaagccaaggactctcttgaggaacttagaatgaggcctccctaacaaaagagaaggtagggaagaacaggtgtagatacagtccttcttacccaccctcagggataagagagggaaaggcccagctctgcttttacacccactggaaataacccggagatccaaaacagattccgcccatcccaatccccatcccccaggagaagcttgagatgctccatattggagactaaagcccactcctggggctatttgaggtagaagcaaagagagcaaaggactgctgaaagtgggaaagctggggattgaggtccagatggccagaggctaccacaaaggaggaaacagcaggaggcacttgggtcttaggaagcattaaaacaaagtcaaaacaagagtaaacactagtctatgacatggctgccttggggtttataactcaagcagatgctaggcatgaaaacgattttcaacttcagaactgtagagcaagcgcaggagacaggttcagggtttgccagcagatccacttggccttctggtttcctcaactctctttcaacctagtatgtgtgcgcagtgccaagttctcagctacctccccagctgtatgtagaaaaatgtggtttttcagttgttttctctgtggtactatttaaacaaaataaaaaagaataaggaaagaaggaaggggaaggcagaaggggaggaaaggaggctaccaggaaagggagggaggaaagaagaatgagagggaggaaatgagggatgaaggcaggcaagcaaaataagaagtataagtgacctgaagtcaagcaagcagaggcccacaaatcagaaatacctcttcccagaacccctactatggcactctgctcacatcttagacgggaataagggaagttgacaatggtatctggattctatataggcccagtcctcaccctcacctggagccacagcataatgacagtgaacacatgtccacacataccagcccgcccatcagtctggcagccagtagggttcctggaaagctggggagggtaggtgtgtgtctcatgcactggtagggggcctcggtccacaggcagttcttgaggtccttgttgaccaggaagccaactggggctgacagcaacccagacaaaacttaatggcttgatagtgacacggcatggcgcagatcttgatgaaagttcaccagtagaagggcccagaaggaagaagagacacatgatggtacagaacacatggcatactgtttcttgcccttaacttcatgcatgcccagcagtcaagtgccattctgcagaacatcaaggaggatgggtatcacagaccacaggccaaagccagaaataaagcaggtgacatctcagctggtgaccccagacccacagaacaggaagttctggctgatgactaataccatgtgcactggcttcattctgcagtggcaatggaaa

SEQ ID NO: 7575 - DNA, 1807 bp, Homo sapiens
  SIMILAR (746)..(1231): 481254mologous to Homo sapiens dJ486I3.2 (KIAA0721 (NAP (Nucleosome Assembly Protein) domain containg protein)),accession number AL050331,Smith-Waterman Score=373.
atgagcggccgaagtcggggtcgaaagtcctcccgcgccaaaaaccggggcaaaggccgcgccaaagcccgagtccgccctgctccggacgacgccccgcgcgacccggacccttcacagtaccagagtctcggggaagacacccaggcggcacaggtgcaggctggcgcggggtggggtggcctggaagccgctgcgtccgcgcagctcctccggctcggggaggaggccgcctgccggctccccctggactgtggcctcgcgctgcgggcccgagctgcgggggaccacgggcaggccgcggccaggcccggcccggggaaggccgcatctctctcggagcgcctggccgcagacagtgtcttcgtgggaacagcgggaaccgtgggaaggccgaaaaatgccccccgcgttggaaaccggcgtggccctgccgggaagaaggccccagaaacctgtagcaccgcggggagggggcctcaggtcatagctggtgggaggcagaagaaaggggcggcaggggagaatacctcggtgtcagctggggaggaaaagaaggaagagagggatgcagggtcggggcccccagcgacggaaggcagcatggatacgctggagaacgtgcagctgaagctggagaacatgaacgcccaggcggacagggcctaccttcggctctccaggaagtttgggcagttgcgactgcagcacttggagcgcaggaaccacctcatccaaaatattcccggtcttcagtgggcaagcattttagaaccatgtcctgttagcatcctttctgaatagccaagagaaagaggtactgagctacttaaacagcttggaagtggaagagctcggccttgccagattgggctacaaaatcaagttctacttcgatcgcaacccgtatttccaaaataaggtgctcatcaaggaatatgggtgtggtccttctggccaggtggtgtctcgttctactccaatccagtggctcccagggcatgatctccagtccctaagccagggaaacccagaaaacaaccgtagtttctttgggtggttttcaaaccacagctccattgagtctgacaagattgtggagataatcaacgaagaattgtggcccaatcccttgcagttctaccttttgagtgaaggggctcgtgtagagaaaggaaaggaaaaagaaggcaggcaaggtccaggaaagcagccaatggagactactcagcctgggccattaagttttgtctgggttgctgtcagccccagttggcttcctggtcaacaaggacctcaagaactgcctgtggaccgaggccccctaccagtgcatgagacacacacctaccctccccagctttccaggaaccctactggctgccagactgatgggcgggctggtctcccagttaccccttgtgacaagaaagctttaccttgtgctcagtgttttgtgtctcatctcctctattgcatggggctacagcccaggcaaaaggagaaaattaaccctgaagtgtcctctattaccaatgtggcccccaaagacatggagaaggttcatgcaggggccctcgataagccaatgtgtggcagacaaggcaaggaatcacagggagccacccaccatgcgaccccatctgccatatcgccagcccctagccatcctctaggttcctctgagactttagacattgatgggttggcccacttcttagaacactcacagatcaacccatctctgttgtcaagagtcttaatccagcgtcagcatctgcgtcatgtagcagtcaccaatggctaa

SEQ ID NO: 7576 - DNA, 413 bp, Homo sapiens
  SIMILAR (69)..(1): 911254mologous to Homo sapiens Similar to ribosome binding protein 1 (dog 180kD homolog),accession number BC000099,Smith- Waterman Score=103.
agcggccgccatgtgcttttccagctctgcctccaaatgcaacgtgtgctccctcacctggacagatgcacagacacgcacacgcatgcgccagcagcctctgctcaaagggcactcacctcagggagcaggctggccctgggataggtgaggcctctcgggagatccctgaggcccaccagctaccaaagccaacgagaaactagtccgcggcaagagaaccccttacggaaagtggcaggctgcacccgggcactcctggggactgacatgctcttagatttacttgcaaaagcaggtaccaagggtaccttctccagggctccctgtggcgtctgaagggggcagtggggccaccttgactgtgaaggccgtggcagaagccctgttcaccagggctgggcaggtctgca

SEQ ID NO: 7577 - DNA, 1994 bp, Homo sapiens
  SIMILAR (68)..(991): 401254mologous to Homo sapiens Similar to ribosome binding protein 1 (dog 180kD homolog),accession number BC000099,Smith- Waterman Score=367.
  misc_feature (1)...(1994): n = a,t,c or g
gcgtccaggccagccaggcggaggctgaccagcagcagacttgcctcaagcagctgcagttcgcatgctgtcgcgtctgtagaagcaggccatcgagctgagggaggccgtcgagcagcataaagtgaagaacaatgacctccgggagaagaactggaaggccatggaggcactggccacgggccgagcagggcctgcaaggagaagctgcactcctggacccagggccaaggaggaatcggaagaaaccagctctgtctgattgaggcgcagacccatggaggccctgctggctctgctccccagaactctctgtcttggcacaacagaatttacaccgagttggctgcaggatctcaaagagaaaggccccacgctgactgaagcacccgccagctcccgcggagccttccttcgggacctgggcctttcaagtttgaggggaggccgagggagacgcagagcaccatttgcagggccgagttttgaccagtaccgcagcatccttggcggagacggacgggcactgctcagagacctgcagaagagcgtggaggaggaggagcaggttttggaagggccaaggtgggcgccgcagaggaggagctccagaagtcccgggtcacagtgaagcatctcgaagagattgtagagaagctaaaaggagaacttgaaagtttcggacccaggtgagggagcacacgttgcatttggaggcagagctggaaaagcacatggcggccgccagcgccgagtgccagaactacgccttgtgaggtggcagggcgtgaggcaacttctcctagaattctcaatctcagcttcgattgccgcccaagaaccgaaacccccagaaaacagagccgatgagctttgcccttggtcaggcaagcagttgagtgaaattgaagagccacgtagaggattggtgacatagctggggccccagctttcttccccagaagcggctccccagccgagcagggacccccgttcagcttgaaggacgcagctggaattggaccagaagcccattccttggaggatgaggcagaccaccagccggcagaagcttcacgggccgagttttgagggaggcttcagaccttcgggcatgttcggtttacaaggaaggattttgggagaagcttccgcacagcgcggccccccctaggagttttttcagaaacaggagggaggccttcacagcttgaaggagagacttagaaaaaagaggaagaagtttaacaagtgaccctggggcgcgcccgcccacgaagactgcaggagctttctgaaagacggacccaggagcagcttggcaaggggagaaggacacgggtgaagaagctgcaggaaacagctgggaaaaggcagaggacggcagcagcttcaaaggagggcacctctgtcttgagtttcctctttgggaaaaagaagttactgtttcaactttaccaaaatgccttaacacattcctttacaattaaaccaaccaacctacacagcgtttatccagggcccaacttcccggtactccgagagaaagcccatgaagagacaagtctttttaggaggccacaggaagttaggacctttccaggaggccccattttgttaaatggaacctgtgtcaacatttgaataaaacacttatcccctggcgccagccccggcgccacccgccggagttggacggccaaagcctggggttggattcttggacaggcccctggggtgttgttgggggagggccggggcgttttgggggtnttgttttgttcagtggcattcgtttagtggttttttcagtggggcggggcgggaagcgggtggggaaaccgggcagccagttctcaaaggggctgtggggccgactggagggccacaagcccctcacccctagacgttgccaaccagaactgacgtgtgacctcctgggtgttgatgccattaaaaccaacgtttggttgcccggaaaaaaaaaaaaaaaa

SEQ ID NO: 7578 - DNA, 509 bp, Homo sapiens
  SIMILAR (3)..(203): 1001254mologous to Homo sapiens PGP 9.5 (AA 1-212),accession number X04741,Smith-Waterman Score=355.
gatttgaggatggatcagttctgaaacagtttctttctgaaacagagaaaatgtcccctgaagacagagcaaaatgctttgaaaagaatgaggccatacaggcagcccatgatgccgtggcacaggaaggccaatgtcgggtagatgacaaggtgaatttccattttattctgtttaacaacgtggatggccacctctatgaaaatatatacccccccatgcagtctaaaatgcttcagtacttgtgaaacacagctgtttttctgttctgcagacacgccttcccctcagccacacccaggcacttaagcacaagcagagtgcacagctgtccactgggccattgtggtgtgagcttcagatggtgaagcattctccccagtgtatgtcttgtatccgatatctaacgctttaaatggctactttggtttctgtctgtaagttaagcccttggatgtggtttaattgtttgtcctcaaaaggaataaaacttttcaactgataaaaaa

SEQ ID NO: 7579 - DNA, 888 bp, Homo sapiens
  SIMILAR (38)..(361): 351254mologous to Equus caballus PGP9.5,accession number AB013344,Smith-Waterman Score=110.
  misc_feature (1)...(888): n = a,t,c or g
aggggcaagagtttagtcctaaagtgtactcatnaaccagaccatgggaaattctgtggcccaatcggactattcaacgcagtggccaataatcaagacaaactgggatttgagtattggaccacttctgaaccagtttcttttctgaaacagataaaaatgtcctcctaaagacagggcaaaatgctttgaaagaatatgaggcaatacgggcagcccattgatgccgtggacaaggaaggcccaatgtcgggtagatgaccagggtgaatttccatttttattctgtttacaaaacgtggatgggccaccttctatgaacttggatggaccgaatgccttttccccgtggacccatggcccccagcttcaggaggacaccctgctgaaaggacgcttcccaaggtctgcaggaggaatctcaccggagccctgagcaacggagaaagtaccgcttcatctgcccgtggcttcttnggcaaaggcaagcctaaatgctctgtggggagggatttgctggattttcccctctttccctttcaaacatgaaaaatattataccccccccatgccagtctaaaatgcttcagtacttgtgaaacacaggctgttcttctgttctgccagacacgcccttcccctcagccacaccccaggcacttaagcacaatgcagagtgcacagctgtccactgggccgattgtggtgtgagcttcagatggtgaagcattctccccagtgtatgtcttgtatccgattatctaacgcctttaaatggctactttggtttctgtctgtaagttaagaccttggatgcgcgtttaattgtttgtcctcaaaaggaataaaactttttctgctgataagataaaaaaaaaaaaaaaaaaa

SEQ ID NO: 7580 - DNA, 3138 bp, Homo sapiens
  SIMILAR (2050)..(3135): 941254mologous to Homo sapiens putative p150,accession number U93563,Smith-Waterman Score=1740.
atggcaggggatggcattatcttgattggcttggacctatcaggatccaacattcaagctgatgatgggtatgagtcaacaccacccaaacagaatggctactgcgtgttaggagagatgcaaccacggggcttacgaaaaaccagctttccatacttcccagtcagtctatatggcaagcagaagatggccatagtaatactcctgagtttacatctcctctgtgaagaggagacaaagccagaatctctggggccacctctcagttccagaagatcatctgaatggccccgctcagaccagacacccatccctgactgctgtgctagcaatcagcgagattccgtgggcgtaggaccctccgagccaggtgtgggatatagtctcgtggtgcgccgttttttaagcccgtcggaaaagcgcaatattcgggtgggagtgacccgattttccagggacatagatggagctggaagccattaccggcatcagcaaactaatgcaggaacagaaaaccaaacaccacatgttttcacttataattgggaactaaatgatcagagcacatgcacacatggaggggaaaaacacacgctggagcctgtctcagggggaaaaacctccctgctccccatcttgtcccctgaaatctaccctctccatggagcagccaaacccctgtccctgggatctgccaagggaagcagtcctgagaaaaggtggcatcgggtagtggtgagggacacagcttcacagcagcccccatttctgccattgaccatgggtactgcaggcaaggcactgaaccccccagtttcctcgtggtgttaccctgaatttagggaagaaaagaaaattgagagattccaagtattgagcgtagtactgaatgctttccatactttatgtaatttcatctccacaaaactaagtgaggtagatgcccgttttatagatgacgcaaagcggctgctggaagaactcaaatatagacacttcctcagaactgtgcaaggtgatagggaaacagatggaaaagacattctctttaaagagctcatgagctggagagaaaatgtgcaaatgcagtttcggatgctctgtgctggttatcctccacttgccaaccgcaccgtctgccatttctgccatgaggccgacctccaagcagagcagcaccagggttccctatccttcagctcccagatggatcagtcaatgccactggcagaagatccaaggcaagaggagaaagaagtgggtgtttctgccccacttactccagatttcagcactgaatttctggcagtgtctgcatccttctatggctacagctcctgccagcctacaacctcattatccacacatgggagcacaggcactcgcctccgggtactgtatgagtcggcttgcaaagaggaatgcctgggaggcagacaggatgctgaggcaaagctggcagccagcaggaggggccagccctcttccctgatgtcgtcacgtgaagggggctggggggagggctcgcagagcaggaactccagccatggagccctgaaagaagcccagttcataataaccaatgcagagaagtccttaaaggacctgatggagctgaaaaccatggcacaagaactacgtgacgaatgcacaagcctcagtagccgattcgatcaactggaagaaaaggtatcagtgatggaagatgaaattaatgaaatgaagcaagaagagaaggttagagaaaaaagaataaaaagaaatgaacaaagcctccaagaaatatgggactatgtgaaaagaccaaatctacatctgattggtgtacctgaaagtgacagggagaatggaaccaagttggaaaacactctgcaggatattatccaagagaacttccccaatctagcaaggcaggccaacattcaaattcaggaaatacagagaatgccacaaagatactcctcgagaagagcaactccaagacacataattgtcagattcaccaaagttgaaatgaaggaaaaaatgttaagggcagctagagagaaagaaatacaaactaccatcagagaatactataaacacctctacacaaataaactagaaaatctggaagaaatggataaattcctggacacatacagtctcccaagactaaaccaggaagaagttgaatctctgaagagaccaataacaggctctgaaattggggcaataattaatagcttaccaaccaaaaaaagtccaggaccagatggattcacagccgaattctaccagaggtacaagaaggagctggtaccattccttctgaaactattccaatcaacagaaaaagagagaatcctccctaactcattttatgaggccagcatcatcctgataccaaagcctggcagagacacaacaaaaaaagagaattttagaccaatatccctgatgaacatcaatgcaaaaatcctcaataaaatactggcaaaccaaatccagcagcacatcgaaaagcttatccaccatgatcaagtgggcttcatccctgggatgcaaggctggttcaacatacgcaaatcaataaacgtaatccagcatataaacagaaccaacgagaaaaaccacatgattatctcaatagatgcagaaaaggcctttgacaaaattcaacagcccttcatgctaaaaactctcaataaattaggtattgatgggacgtatctcaaaatagtaagagctatttatgacaaactcacagccaatatcatactgaatgggcaaaaattggaagcattccctttgaaaactggcacaagacagggatgccctctctcaccactcctattcaacatagtgttggaagttctggccagggcaatcaggcaagagaaagaaataaagggtattcaattaggaaaagagcaagtcaaattgtccctgtttgcagatgacatgattgtatatctagaaaaccccatcgtctcagcccaaaatctccttaagctgataagcaacttcagcaaagtctcaggatacaaaatcaatgtgcaaaaatcacaagcattcttatacaccaataacagacaaacagagagccaaatcatgagtgaactcccattcacaattgcttcaaagagaataaaatag

SEQ ID NO: 7581 - DNA, 594 bp, Homo sapiens
  SIMILAR (356)..(282): 761254mologous to Plasmid F Protein D,accession number M12987,Smith-Waterman Score=93.
atggcgggcgcccctcccccagcctcgctgctgccttgcagtttgatctcagactgctgtgctagcaatcagcgagactccgtgggcgtaggaccctccgagccaggtgcgggacataatctcgtggtgcaccgtttttttaagcccgtcagaaaagcgcagtattcgggtgggagtgacccgattttccagggaaacaccagtctctgttaccaaacaaaaacagcattccttcagttcccctttccatataaggccaaggcattattctcaggatatgttttcagcatcgcaaccgcatcagactccggcatcgcaaactgcacccggtgccggcagccacatccagcgcaaaaaccttcgaactctcagcggtataccggcatacagcatgtgcatcgcataggaatggcggaacgtatgtggtgtgaccggaacagagaacgtcacaccgtcagcagcagcggcggcaaccgcctccccaatccaggtcctgaccgttctgtccgtcacttcccagatccgcgctttctctgtccttcctgtgcgacggttacgccgctccatgagcttatcgcgaataaatacctgtga

SEQ ID NO: 7582 - DNA, 744 bp, Homo sapiens
  SIMILAR (555)..(4): 971254mologous to Homo sapiens p40,accession number U93564,Smith-Waterman Score=905.
ttacattttggcatgattttgcagcggctggtaccggttgttcctttccatgtttagtgcttccttcaggagctcttttagggcaggcctggtggtgacaaaatctctcagcatttgcttgtctgtaaagtattttatttctccttcacttatgaagcttagtttggctggatatgaaattctgggttgaaaattcttttctttaagaatgttgaatattggcccccactctcttctggcttgtagggtttctgctgagagatccgctgttagtctgatgggcttccctttgagggtaacccgacctttctctctggctgcccttaacattttttccttcatttcaactttggtgaatctgacaattatgtgtcttggagttgctcttctcgaggagtatctttgtggcattccctgtatttccttaatctgaacgttggcctgccttgctagattggggaagttctcctggataatatcctgcagagtgttttccaacttggttccattctccccatcactttcaggtacaccaatcagacgtagatttggtctggaaaatcgggtcactgccacccgaatattgcgcttttcagaccggcttaaaaagcggcgcaccacaagattatatcccacacctggctcagagggtcctacgcccacggaatctcgctgactgctagcacagcagtctgagatcaaactgcaaggcggcagcgaggctgggggaggggcgcccgccat

SEQ ID NO: 7583 - DNA, 1080 bp, Homo sapiens
  SIMILAR (190)..(1077): 971254mologous to Homo sapiens p40,accession number U93564,Smith-Waterman Score=1479.
atggcgggcgcccctcccccagcctcgctgccgccttgcagtttgatctcagactgctgtgctagcaatcagcgagattccgtgggcgtaggaccctctgagccaggtgtgggatatagtctcgtggtacgccgtttcttaagccggtctgaaaagcgcaatattcgggtgggagtgacccgattttccagagaagaaggcttcagacgatccaattactgtgagctacgggaggacattcaaaccaaaggcaaagaagttgaaaactttgaaaaaaatttagaagaatgtataactagaataaccaatacagagaagtgcttaaaggagctgatggagctgaaaaccaaggctcgagaactacgtgaagaatgcagaagcctcaggagccgatgcgatcaactggaagaaagggtatcagcattggaagatgaaatgaatgaaatgaagcgagaagggaagtttagagaaaaaagaataaaaagaaatgagcaaagcctccaagaaatatgggactatgtgaaaagaccaaatctacgtctgattggtgtacctgaaagtgatgtggagaatggaaccaagttggaaaacactctgcaggatattatccaggagaacttccccaatctagcaaggcaggccaacgttcagattcaggaaatacagagaacgccacaaagatactcctcgagaagagcaactccaagacacataattgtcagattcaccaaagttgaaatgaaggaaaaaatgttaagggcagccagagagaaagctcgggttaccctcaaaggaaagcccatcagactaacagcggatctctcagcagaaatcctacaagccagaagagagtgggggccaatattcaacattcttaaagaaaagaattttcaacccagaatttcatatccagccaaactaagcttcataagtgaaggagaaataaaatactttatagacaagcaaatgctgagagattttgtcaccaccaggcctgccctaaaagagctcctgaaggaagcgctaaacatggaaaggaacaactggtaccagccgctgcaaaatcatgccaaaatgtaa

SEQ ID NO: 7584 - DNA, 351 bp, Homo sapiens
  SIMILAR (127)..(348): 1001254mologous to synthetic construct lac repressor,accession number A14595,Smith-Waterman Score=354.
atggcgggcccccctcccacagcctcgctgccgccttgcagtttgatctcagactgctgtgctagcaatcagcgagattccgtgggcgttaggaccctccgagccagggattttgccgatttcggaaccaccatcaaacaggattttcgcctgctggggcaaaccagcgtggaccgcttgctgcaactctcacagggccaggcggtgaagggcaatcagctgttgcccgtctcactggtgaaaagaaaaaccaccctggcgcccaatacgcaaaccgcctctccccgcgcgttggccgattcattaatgcagctggcacgacaggtttcccgactggaaagcggacagtga

SEQ ID NO: 7585 - DNA, 834 bp, Homo sapiens
  SIMILAR (587)..(399): 571254mologous to Homo sapiens Human secreted protein, SEQ ID NO: 7083,accession number G03002,Smith-Waterman Score=176.
atggcgggcgcccctgccccagcctcgctgccgccttgcagtttgatctcagactgctgtgctagcaatcagcgagactccatgggcgtaggaccctctgagccaggtgcgggttataatctcgtgcccgtcggaaaagcgcagtattcgggtgggagtgaccggattttccaggtgctgtccgtcacccctttctttgactcggaaagggaactccctgaccccttgggcttctcaagtgaggcaatgcctcgccctgcttcagctcgcgcacggtcgggggtccccaaaccccagaccatgaaccagtaccaatcatggcctgaaccaggcctcacagcaggagtttcaggtcttacatttaagtctttgatccatcttcagttgattgttgcatatgatgtgttcagagtttcttctttctggtgggttcgtggtctcgctggctcgggagtgaagctgcagaccttcgcagtgagtgttacagctcttaaggcagcacgtctggagttgttcgttcctcctgatgggctcgtggtcttgctgggctcaggagtgaagctgcagatcttcgcagtgagtgttacagctcataaaagcagcgtggacccagagacccttgagtggtcgatgggactgggcaccgtggagcagggggctgcgctcgtcggggatgctcgggctgcacaggaacccacggaatgggtgggaggcgcaggcatggcgggctgcaggtcccgagccctgccctgcgggaaggcagctaaggttcggtgccagtaccagaaaactagagacaattcctacaccccagagcccactgaaattatttaa

SEQ ID NO: 7586 - DNA, 480 bp, Homo sapiens
  SIMILAR (31)..(357): 701254mologous to Homo sapiens NAG13,accession number AF194537,Smith-Waterman Score=367.
atggcgggcgcccctcccccagcctcgctgccgccttgcagtttgatctcagactgctgtgctagcaatcagcgagactctgtgggcgcaggaccctccgagccagaaagacaaactaccatcagagaatactataaacacctctatgaaaataaactagaaaatctagaagaaatggataaattcctggacacatacaccctctcaagactaaaccaggaagaagttgaatctctgaatagacgaataacagggtctgaaattgaggcagtaattaatagcctaccaaccaaaataagcccaggactacatggattcacagctgaattctaccagaggtacaaagaagagctgctagggccggttgtaggggagtggggttatccacataggctcaatgccggtccccacgagaacggcgggtccccttccatttttcgccggcccatgccgctgattccccgggaaattgactcttag

SEQ ID NO: 7587 - DNA, 504 bp, Homo sapiens
  SIMILAR (5)..(103): 961254mologous to Homo sapiens Human secreted protein sequence encoded by gene 2 SEQ ID NO:250,accession number Y91577,Smith-Waterman Score=162.
ttaggctgctcgggggtcaggggtcagggacccgcttgaggaggcagtctgcccgttctcagatctgcagctgcgtgctgggagaaccactgctctcttcaaagatgatctgtcaggcggaaccgggtttaataccgaaactaaaatgccccgatctccatcaacagactctggggcgatttgtcttccgggacgaactcggacttgaatgcctcgactggggactctagaaaatccccacccgcttgaggaggcagtctgcccgttctcagatctccagctgcgtgctgggagaccacagctctcttcaaagctggaaaatcgggtcactcccacctgaatattgcgcttttcagaccggcttaagaaacggcgcaccacgagactatatcccacacctggctcacagggtcctacgcccagggaatcgcgctgattgctagcacagcagtctgagatcaaactgcaaggcggcaacgaggctgggggaggggcgcccgccat

SEQ ID NO: 7588 - DNA, 627 bp, Homo sapiens
  SIMILAR (1)..(87): 961254mologous to Homo sapiens Human secreted protein sequence encoded by gene 2 SEQ ID NO:250,accession number Y91577,Smith-Waterman Score=155.
atggcgggcgcccctcccccagcctcgctgccgccttgcagtttgatctcagactgctgtgctagcaatcagcgagactccgtgggcgtaggaccctccgagccaggtgccggatataatctcgtggtgcgccgttttttaagcccgtcggaaaagcgcagtattcgggtgggagtgacccgattttccaggtggctgccctcacccctttctttggctcagaaagggaactccctgaacccttgcacttcccaagtcctgactccagcacctgaaaagcaaccagacaacaaattgccactgcccagaagaggctccagggacccaacagaatactttcatgggcaggaggtacgggacaagtcagatgaacacgtggatcatgtgtctcagatccatagtttcagagatgaagttaaaagacttggagctgaagattccagcaatgcagaaacgccaacagaactccatgagttcaacactggaggtgtctatcggcccccaaactcaacatctgtaattcagcctctagatcagggtgtcataaggacctttaagccttgttacacaaagtactctttggaaaagattgtcagtgccgtggaagagaaccctgatagaacatga

SEQ ID NO: 7589 - DNA, 519 bp, Homo sapiens
  SIMILAR (356)..(264): 751254mologous to synthetic construct lac repressor,accession number A14595,Smith-Waterman Score=92.
tcactgcccgctttccagtcgggaaacctgtcgtgccagctgcattaatgaatcggccaacgcgcggggagaggcggtttgcgtattgggcgccagggtggtttttcttttcaccagtgagacgggcaacagctgattgcccttcaccgcctggccctgagagagttgcagcaagcggtccacgctggtttgccccagcaggcgaaaatcctgtttgatggtggttccgaaatcggcaaaatccattaattgcgttgcgctcactgcccgctttccagtcgggaaacctgtcgtgccagctgcattaatgaatcggccacgcgcggggagaggccgtttgcgtattgggcgccagggtggtttttctttcaccagtgagaccggcaacaactgattgcccttcacggctggccctggctcggagggtcctacgccaacggagtctggctgattgctagcacagcagtctgagatcaaactgcaaggcggcagcgaggctgggggaggggcgcccaccat

SEQ ID NO: 7590 - DNA, 479 bp, Homo sapiens
  SIMILAR (446)..(297): 561254mologous to Homo sapiens Human secreted protein, SEQ ID NO: 7217,accession number G03136,Smith-Waterman Score=139.
aaaccagctttccatacttcccagtcagtctatatggcaagcagaagatggccatagtaatactcctgagtttacatctcctctgtgaagaggagacaaagccagaatctctggggccacctctcagttccagaagatcatctgaatggccccgctcagaccagacacccatccctgactgctgtgctagcaatcagcgagattccgtgggcgtaggaccctccgagccaggtgtgggatatagtctcgtggtgcgccgttttttaagcccgtcggaaaagcgcaatattcgggtgggagtgacccgattttccagggacatagatggagctggaagccattaccggcatcagcaaactaatgcaggaacagaaaaccaaacaccacatgttttcacttataattgggaactaaatgatcagagcacatgcacacatggaggggaaaaacacacgctggagcctgtctcagggggaaaa

SEQ ID NO: 7591 - DNA, 1572 bp, Homo sapiens
  SIMILAR (1310)..(1206): 271254mologous to Plasmid F Protein D,accession number M12987,Smith-Waterman Score=43.
atggcgggcgcccctcccccagcctcgctgctgccttgcagtttgatctcagactgctgtgctagcaatcagcgagactccgtgggcgtaggaccctccgagccaggtgcgggacataatctcgtggtgcaccgtttttttaagcccgtcagaaaagcgcagtattcgggtgggagtgacccgattttccagggaaacaccagtctctgttaccaaacaaaaacagcattccttcagttcccctttccatataaggccaaggcattattctcaggataattgtttcagcatcgcaaccgcatcagactccggcatcgcaaactgcacccggtgccgggcagccacatccagcgcaaaaaccttcgtgtagacttccgttgaactgatggacttatgtcccatcaggctttgcagaactttcagcggtataccggcatacagcatgtgcatcgcataggaatggcggaacgtatgtggtgtgaccggaacagagaacgtcacaccgtcagcagcagcggcggcaaccgcctccccaatccaggtcctgaccgttctgtccgtcacttcccagatccgcgctttctctgtccttcctgtgcgacggttacgccgctccatgagcttatcgcgaataaatacctgtgacggaagatcacttcgcagaataaataaatcctggtgtccctgttgataccgggaagccctgggccaacttttggcgaaaatgagacgttgatcggcacgtaagaggttccaactttcaccataatgaaataagatcaccagctgaaaacataagcgagctttcccagtggctcctgtctgtaaagccagcatctccaaacgggagctcattcctgcttcagtgccactaggagtggaggaagcttgcagggcagtgtgtaacagcccaggcacggagcgggttcgggacagtgtgcaggccagagtcccacagccacggccgctggcttggccttggataggccaagcacccagaggagcagggggaggcctccgcggcgcccagcggggtccgggacccggagataaggatctgatttccagcgcctttgaagttagacaggcttctcctccttccccttccccaacccaaatgggtctcagcttcctctctggcccaatttgaaatttacttctccttgtgtccgagctctgggatagtctcaatttgtcccgggcacgacccgagcttggcgcagtagagatgaccgttgctgaagccacggcgctgccagcggcaccagcgctcttatttgaaaagtgcaggggaggagccaagatggccgaataggaacagctccggtctacagctcccagcgtcagcaacgcagaagacgggtgatttctgcatttccatctggaaaatccggtcactcccacccgaatactgcgcttttccgacgggcttaaaaaacggtgcaccacgagattataacccgcacctggctcggagggtcctacacccacggagtctcgatgattgctagcacagcagtctgagatcaaactgcaaggcggcagcaaggctgggggaggggcacccgccat

SEQ ID NO: 7592 - DNA, 2074 bp, Homo sapiens
  SIMILAR (330)..(1460): 1001254mologous to Homo sapiens IDN4-GGTR8,accession number AB019491,Smith-Waterman Score=1907.
aagccagtaggagactgagagattagaagaacagggcagtagaggatgaatttgcagtgaggttaaaggaacaatttattgggagaagggaatgtaggagggtagaagactttaaaattgaaaagaaataaaaggaggcagggatgtaaaacgagccataagtacaatgacaaatgggcattaaggaggaaaaagactatgtagaagaatctggtaaatatggatattaacagcaataagctcctttttaacgatttaattctaccaagtaaatatttgggattactcgctttttgccttttatttaccaaaaaattcatatattttcaaaggaacagctaccggacctgcatagccatttttctgatctgaacctggaagctcatatgtatgcatcccagtggtttctcactctttttactgccaagttcccactctgcatggtgttccacatcattgacttactgctttgtgagggtttgaacataatctttcatgtagctttggctctcctaaagacctcaaaggaagaccttctgcaggctgattttgaaggtgctttaaagttctttagagttcagcttccaaagagatacagggcagaggaaaatgcaagaagactgatggagcaggcttgcaatattaaagtaccaaccaagaagctgaagaaatatgagaaagaatatcagacaatgcgagagagtcagctgcaacaggaagacccaatggatagatacaagagggagaaccgaagattacaggaggccagcatgaggttggaacaagagaatgatgaccttgcccatgaactagtaacaagcaaaattgctctacggaatgacttggatcaggcagaagacaaggcagatgtgttgaataaagagctccttttgaccaaacagaggctggtggagactgaagaggagaagaggaagcaagaggaagagactgcccagctaaaagaagtcttcaggaaacagctagagaaggcagaatatgaaataaagaagactacagctatcattgctgagtataaacagatctgttcgcagttgagtaccaggctggagaaacagcaagcagccagcaaggaggagctggaagtggtaaagggtaagatgatggcatgcaaacactgcagtgacattttcagcaaggagggtgctttgaaactagcagccacaggcagagaggaccagggaattgaaacagatgatgagaaggactcacttaagaagcagctgagagagatggaactggaactggcacaaaccaaactgcagttggtggaggccaagtgtaaaattcaggaacttgaacatcagagaggagcccttatgaatgaaatccaagctgcgaaaaactcttggtttagcaaaaccctgaactctatcaaaacggccacgggcacccagccattgcagccagcaccggtcacccagccacccaaggagagcacatagttccagccttacccaagcacaagagcacaatgttcaaaccaatggaaatctgggaggattcttcctggtgtccctttgaaggaaagtcaaggaggccagaaaacaagccagaatttttcagtagctctcactctttcttgtatgacacttttcaaagggatgctatttaaactgacctgttctatgttgaatacctattttccagcttctggaaggccatgttcagatccatcatagtattacacattattttgtttgcctgatgtttagttggaaataagtaattcagaactaaatgcttttttatttagaattattcataattatttttatcttacataaaaatggagacatctgttattccaaggttgaagtgataagaagatctttgtcacaggaaaaaaaaaaaaaaattgaaccctaaacttcttaattttccaggatttatccaaataaagcacactgtggggccaggcatgaccactctcaggtttcctcctgaagcctgattcccaggggaagtgttaatcctgtccaaagggaaaagaaccaaatcagcgatcattgggttttactttccattttctgttccgggtacatcctgggaaaat

SEQ ID NO: 7593 - DNA, 2103 bp, Homo sapiens
  SIMILAR (133)..(453): 1001254mologous to Homo sapiens IDN4-GGTR8,accession number AB019491,Smith-Waterman Score=556.
tatgtagaagaatctggtaaatatggatattaacagcaataagctcctttttaacgatttaattctaccaagtaaatatttgggattactcgctttttgccttttatttaccaaaaaattcatatattttcaaaggaacagctaccggacctgcatagccatttttctgatctgaacctggaagctcatatgtatgcatcccagtggtttctcactctttttactgccaagttcccactctgcatggtgttccacatcattgacttactgctttgtgagggtttgaacataatctttcatgtagctttggctctcctaaagacctcaaaggaagaccttctgcaggctgattttgaaggtgctttaaagttctttagagttcagcttccaaagagatacagggcagaggaaaatgcaagaagactgatggagcaggcttgcaatattaaagtgggtgtgtacactggcactgagctgcagtaggatttttccttggatagtctggtctggagctgggacagcagctgctgctgtggaaaggccagctggcaagatgatggaagaaatctccattatggtagcctatgacgcccatgttttcagccagctgcacgatgaagacttcctcactagtctggtggccatcagcaagcccaggtctatggtaccaaccaagaagctgaagaaatatgagaaagaatatcagacaatgcgagagagtcagctgcaacaggaagacccaatggatagatacaagtttgtatatttgtaggtaactccagctgttgcatttatactgggaatcttcataagaagctgagagaaagagaggggaaaaagaaagtggctttctactttcaaaaatgaaacaaaaaggaaaaatggcaaagtactgttttagctgtgcatgtcatatccacaaagacttttagcaggtgaactgttccaagactgacacaaggatgtttcaaacttgcctctgtctgtagaaaatgttaaaaataccaactcacttggaaggaaaaataaaaatcacaaagagggagaaccgaagattacaggaggccagcatgaggttggaacaagagaatgatgaccttgcccatgaactagtaacaagcaaaattgctctacggaatgacttggatcaggcagaagacaaggcagatgtgttgaataaagagctccttttgaccaaacagaggctggtggagactgaagaggagaagaggaagcaagaggaagagactgcccagctaaaagaagtcttcaggaaacagctagagaaggcagaatatgaaataaagaagactacagctatcattgctgagtataaacagatctgttcgcagttgagtaccaggctggagaaacagcaagcagccagcaaggaggagctggaagtggtaaagggtaagatgatggcatgcaaacactgcagtgacattttcagcaaggagggtgctttgaaactagcagccacaggcagagaggaccagggaattgaaacagatgatgagaaggactcacttaagaagcagctgagagagatggaactggaactggcacaaaccaaactgcagttggtggaggccaagtgtaaaattcaggaacttgaacatcagagaggagcccttatgaatgaaatccaagctgcgaaaaactcttggtttagcaaaaccctgaactctatcaaaacggccacgggcacccagccattgcagccagcaccagtcacccagccacccaaggagagcacatagttccagccttacccaagcacaagagcacaatgttcaaaccaatggaaatctgggaggattcttcctggtgtccctttgaaggaaagtcaaggaggccagaaaacaagccagaatttttcagtagctctcactctttcttgtatgacacttttcaaagggatgctatttaaactgacctgttctatgttgaatacctattttccagcttctggaaggccatgttcagatccatcatagtattacacattattttgtttgcctgatgtttagttggaaataagtaattcagaactaaatgcttttttatttagaattattcataattatttttatcttacat

SEQ ID NO: 7594 - DNA, 618 bp, Homo sapiens
  SIMILAR (394)..(615): 1001254mologous to synthetic construct lac repressor,accession number A14595,Smith-Waterman Score=354.
atgaagaccatcaacattcagaagaaagccaaaacccaatccaaggaagctaaggaatacaataaaaagatacgggacataatagatgaaatggccattttaagaaagaaccaaactgatctaatagagctcaaaaacccacttcaggaatttcataatacaatcacaagcgttagcagcagaatagaccaaactgaggaaagaatctctgagcttgaagactgtttgatctcagactgctgtgctagcaatcagcgagattccgtgggcgtaggaccctctgagccaggtgtgggatatagtctcgtggtgcgccgtttcttaagccggtctgaaaagcgcaatattcaggtgggagtgacccgattttccagggattttgccgatttcggaaccaccatcaaacaggattttcgcctgctggggcaaaccagcgtggaccgcttgctgcaactctctcagggccaggcggtgaagggcaatcagctgttgcccgtctcactggtgaaaagaaaaaccaccctggcgcccaatacgcaaaccgcctctccccgcgcgttggccgattcattaatgcagctggcacgacaggtttcccgactggaaagcgggcagtga

SEQ ID NO: 7595 - DNA, 3404 bp, Homo sapiens
  SIMILAR (265)..(1146): 1001254mologous to Homo sapiens calmegin,accession number D86322,Smith-Waterman Score=1569.
atggcgggcgcccctcccccagcctcgctgccgccttgcagtttgatctcagactgctgtgctattaatcagcgagactccgtgggcgtaagaccctccaagccaggtgcgggatataatctcgtggtgcgccgttttttaagcctgttggaaaagcgcagtattccggtgggagtgacccgattttccaggtgccgtccgtcacccctttctttgactcggaaagggaactccctgaccccttgtgcttcccgaataatcaatatgcatttccaagccttttggctatgtttgggtcttctgttcatctcaattaatgcagaatttatggatgatgatgttgagacggaagactttgaagaaaattcagaagaaattgatgttaatgaaagtgaactttcctcagagattaaatataagacacctcaacctataggagaagtatattttgcagaaacttttgatagtggaaggttggctggatgggtcttatcaaaagcaaagaaagatgacatggatgaggaaatttcaatatacgatggaagatgggaaattgaagagttgaaagaaaaccaggtacctggtgacagaggactggtattaaaatctagagcaaagcatcatgcaatatctgctgtattagcaaaaccattcatttttgctgataaacccttgatagttcaatatgaagtaaattttcaagatggtattgattgtggaggtgcatacattaaactcctagcagacactgatgatttgattctggaaaacttttatgataaaacatcctatatcattatgtttggaccagataaatgtggagaagattataaacttcattttatcttcagacataaacatcccaaaactggagttttcgaagagaaacatgccaaacctccagatgtagaccttaaaaagttctttacagacaggaagactcatctttatacccttgtgatgaatccagatgacacatttgaggtgttagttgatcaaacagttgtaaacaaaggaagcctcctagaggatgtggttcctcctatcaaacctcccaaagaaattgaagatcccaatgataaaaaacctgaggaatgggatgaaagagcaaaaattcctgatccttctgccgtcaaaccagaagactgtgctcttggtttagagctttggtctatgacctctgatatctactttgataattttattatctgttcggaaaaggaagtagcagatcactgggctgcagatggttggagatggaaaataatgatagcaaatgctaataagaaaaaacataaagatacagagtataaaaaaaccgacatatgtataccacaaacaaaaggagtactagagcaagaagaaaaggaagagaaagcagccctggaaaaaccaatggacctggaagaggaaaaaaagcaaaatgatggtgaaatgcttgaaaaagaagaggaaagtgaacctgaggaaaagagtgaagaagaaattgaaatcatagaagggcaagaagaaagtaatcaatcaaataagtctgggtcagaggatgaggctctcgcagagcagccacgggaaggtccaggcgtgccaggtcccattccacccaaacgcccctcccgcagtccaattccagagccgagagctgcaaagcggctcccgacccaggagctgcggggagaaagctacacgatgtctgcgtcagggaccgcgagaggtccctctcccaaagaacgcctgggcctgacaacgaaaacaggagaaaaagaggtcgcgcaagggttctgccgggagccaggcctccgccgcccaccaaatgcccaggcccgagaccgctcctcccgggcccccgcaacccacagaaaggaactgaagcctgagcgtgaacacatttcttgctcaaggtcacatatacggtatcaagagtggagtgttcttcgtgacaccgttcatcgtaatctagtacttgacacaaagcggcatcctgctttaatactcgttgagtacaaggaacgcacctcctcaccagcaacagaacaaagctgcatggagaatgactttgatgagttgagagaagaaggcttcagacgatcggtaataacaaacttctccgagctaaaggaggatgttcaaacccatcacaaagaagctaaaaaccttgaaaaaagattagacaaatggctaactagaataaacagtgtagagaagtccttaaatgactggatggagctgaaaaccaaggctcgagaactacgtgaagaatgcagaagcctcaggagccgatgcgatcaacgtggaagaaagggaatcagcagtggaagatgaaatgaatgaaatgaagcgagaagggaagtttagagaaaaaagaataaaaagaaatgagcaaagcctccaagaaatatgggactatgtgaaaagaccaaatctacgtctgattggtgtacctgaaagtgatggggagaatggaaccaagttggaaaacactctgcaggatattatccaggagaacttctccaatctagcaaggcaggccaacgttcagattcaggaaatacacagaacgccacaaagatactcctcgagaagagcaactccaagacacataattgtcagattcaccaaagttgaaatgataggaaaaaatgttaagggcagccagagagaaagaggtctttgttccagagggaggaaccctgccacgaggaaacacaacaatgattccattaaactggaagttaagattgccacctggactctttgggctcctcctagctttaaggcaacaggctaagaatggagttacagtattggctggggtggttgacccggactatcaagatgaaatcagtctactactacacaacagagaaatcctcaatgttagtacattacagcaaagctatagttctggggaaaagcaggtatcttttttgatctcagactgctgtgctagcaatcagcgagattccgtgggcgtaggaccctccgagccaggtgtgggatatagtctcatggtgcaccgttttttaagtctgtctgaaaagcgcagtattcgggtgggagtgacccgattttccaggtgcgtccgtcacccctttcttcgactcagaaagggaactcctgaccccttgcgcttcccaaaaattcagaagctgctcaaactccagtgcagtcatggagcctccattacctgggaggcagcctccaagcagcatgcagccttgtcagaaactgcaccgccaagggtgagaatggcattagaagcaaagaggaaagattcaaacaggaacgagaatttggacaagcgaacactctgtgctgctcaagggaagagcacagtggaagtccaagggcgagtgtgtgcccagggcagggcaactgggctatgggctgattcccgggatgcatga

SEQ ID NO: 7596 - DNA, 5548 bp, Homo sapiens
  SIMILAR (2852)..(5473): 961254mologous to Homo sapiens putative p150,accession number U93563,Smith-Waterman Score=4363.
atggcgggcgcccctcccccagcctcgctgccgccttgcagtttgatctcagactgctgtgctagtaatcagcgagactctgtgggcgtaggaccctccgagccaggtgcgggatataatctcgtggtgtgccgttttttaagccggtccgaaaagcgcaatatttgggtgggagtgacccgattttccagggcctttgaagatgtcaaggtcttttggcgagtcacacttaacaaaacagtcgtcgtgctccagaaggatggggtaaacctgatggaggaacttcagtctgtgtcagggaccacaacctgtacaatgggtcaaacaaaatgctttatcagcattgaactcaaaccagaaaaggtaccacaggttgaagtgtatttttttgtggaactatatgaagctactgctggagcagcaataaacaacagtgccagattcgcacagattaaaatcttagaaagtgatgaatctcaaagccttgtgtatttttctgtgggttctcggctggcagtggctcacaagaaggccactttaatcagtctgcaggtggccagagattctgggacaggactaatgatgtctgttaactttagtacccaggtcttcctatcactgggctctaatttcactttgcaactggtgactgtgatgcttgtcggtggacgtttctatggaatgccaacaattcttcaggaagcaaaatctgctgtccttccagtctctgagaaagctgccaattctcaggtcggatttgaatccactgcttttcaactcatgaacatcactgctggcacaagccacgttatgatttctaggagaggcacatatggagctctctcggttgcctggaccactggatatgctcctgggttagaaattcctgaattcattgttgttggcaacatgaccccaacactggggagcctttcattttcccacggtgaacaaaggaaaggagttttcctgtggacgtttcctagccctggttggccagaggcctttgttcttcacctatcaggagtgccagagcagtgctcctggcggagctcaactccgtggatttttcaccattgctgatggagagagtgaagctagctttgatgttcatttgctaccagatgaggtacctgagatagaggaagattatgtgatccagcttgtttctgtagagggaggagccgaactggatctggagaagagtatcacatggttctctgtttatgcaaatgatgacccacatggagtatttgccctgtattcggatcgccagtcaatacttattgggcagaaccttattagatccatccaaattaacataacccggcttgctggaacatttggagatgtggctgttgggcttcgaatatcatcggatcataaagaacagccgattgttaccgaaaatgcagagaggcagctggtggtcaaagatggtgccacatataaagtggacgtggtgccaataaagaatcaggctgacagacaactcatacaggagagctctggctggcatctggcaggtgccccgctgggtcgaagcttccagaggaaagaacaggcagcaatctttgctgttctgcagcctctgctggtgatatccaggcaaacagggtctggagtggacctccagcaaactccagcagacctgcagcagagggacctgactgttagaaggaaaactaacagaaaggagcagcacatccacaccgaaaacgcatctgtacatcaccatcatcaaagaccaaaagtagataaaaccacaaagatggggaaaaaacagaacagaaaaactggaaactctaaaacgcagagcacctctcctcctccaaaggaacgcagttcctcaccagcaacggaccaaagctggatggagaatgattttgacgagctgagagaagaaggcttcagacgctcaaattactctgagctacgggaggacattcaaaccaaaggcaaagaagttgaaaactttgaaaaaaatttagaagaatgtataactagaataaccaatacagagaagtgcttaaaggagctgatggagctgaaaaccaaggctcgagaactacgtgaagaatgcagaagcctcaggagccaatgcgatcaactggaagaaagggtatcagcaatggaagatgaaatgaatgaaatgaagcaagaagggaagtttagagaaaaaagaataaaaagaaacgagcaaagcctccaagaaatatgggactatgtgaaaagaccaaatctacgtctgattggtgtacctgaaagtgatgcggagaatggaaccaagttggaaaacactctgcaggatattatccaggagactttccccaatctagcaaggcaggccaacgttcagattcaggaaatacagagaacgccacaaagatactcctcgagaagagcaactccaagacacataattgtcagattcaccaaagttgaaatgaaggaaaaaatgttaagggcagccagagagaaaggtcgagttaccctcaaagggaagcccatcagactaacagcggatctctcggcagaaaccctacaagccagaagagagtgggggccaatattgaacattcttaaagaaaagaattttcaacccagaatttcatatccagccaaactaagcttcataagtgaaggagaaataaaatactttacagacaagcaaatgctgaccgattttgtcaccagcaggcctgccctaaaagagctcctgaaggaagcgctaaacatggaaaggaacaaccggtaccagccactgcaaaatcatgccaaaatgtaaagaccatcgagactaggaagaaactgcatcaactaacgagcaaaatcaccagctaacatcataatgacaggatcaaattcacacataacaatattaactttaaatgtaaatggactaaattctccaattaaaagacacagactggcaagttggataaagagtcaagacccatcagtgtgctgtattcaggaaacccatctcatgtgcagagacacacataggctcaaaataaaaggatggaggaagatctaccaagcaaatggaaaacaaaaaaaggcaggggttgcaatcctagtctctgataaaacagactttaaaccaacaaagatcaaaagagacaaagaaggccattacatgatggtaaagggatcaattcaacaagaggagctaactatcctaaatatgtatgcacccaatacaggagcacccagattcataaagcaagtcctgagtgacctacaaagagacttagactcccacacattaataatgggagactttaacaccccactgtcaacattagacagatcaacgagacagaaagtcaacaaggatacccaggaattgaactcagctctgcaccaagcagacctaatagacatctacagaactctccaccccaaatcaacagaatatacatttttttcagcaccacaccacagctattccaaaattgaccacatacttggaagtgaagctctcctcagcaaatgtaaaagaacagaaattataacaaactatctctcagaccacagtgcaatcaaactagaactcaggattaagaatctcactcaaagccgctcaactacatggaaactgaacaacctgctcctgaatgactactgggtacataacgaaatgaaggcagaaataaagatgttctttgaaaccaacgagaacaaagacacaacataccagaatctctaggacgcattcaaagcagtgtgtagagggaaatttatagcactaaatgcccacaagagaaagcaggaaagatccaaaattgacaccctaacatcacaattaaaagaactagaaaagcaagagcaaacacattcaaaagctagcagaaggcaagaaataactaaaatcagagcagaactgaaggaaatagagacacaaaaaacccttcaaaaaatcaatgaatccaggagctggttttttgaaaggatcaacaaaattgatagaccgctagcaagactaataaagaaaaaaagagagaagaatcaaatagacacaataaaaaatgataaaggggatatcaccaccgatcccacagaaatacaaactaccatcagagaatactacaaacacctctacgcaaataaactagaaaatctagaagaaatggatacattccttgacacatacactctcccaagactaaaccaggaagaagttgaatctctgaatagaccaataacaggagctgaaattgtggcaataatcaatagtttatcaaccaaaaagagtccaggaccagatggattcacagccgaattctaccagaggtacaaggaggaactggtaccattctttctgaaactattccaatcaatagaaaaagagggaatcctccctaactcattttatgaggccagcatcattctgataccaaagccgggcagagacacaaccaaaaaagagaattttagaccaatatccttgatgaacattgatgcaaaaatcctcaataaaatactggcaaaccaaatccagcagcacatcaaaaagcttatccaccatgatcaagtgggcttcatccctgggatgcaaggctggttcaatatacgcaaatcaataaatgtaatccagcatataaacagagccaaagacaaaaaccacatgattgtctcaatagatgcagaaaaagcctttgacaaaattcaacaacccttcatgctaaaaactatcaataaaataggtattgatgggatgtatttcaaaataataagagctatctatgacaaaaccacagccaatatcatactgaatgggcaaaaactggaagcattccctttgaaaaccggcacaagacagggatgccctctctcaccgctcctattcaacatagtgttggaagttctggccagggcaattaggcaggagaaggaaataaagggtattcaattaggaaaagaggaagtcaaattgtccctgtttgcagacgacatgattgtgtatgtagaaaaccccattgtctcagcccaaaatctccttaagctgataagcaacttcagcaaagtctcaggatacaaaatcaatgtacaaaaatcacaagcattcttatacaccaacaacagacaaacagagagccaaatcatgagtgaactcccattcacaattgcttcaaagagaataaaatacctaggaatccaacttacaagggatatgaaggacctcttcaaggagaactacaaaccactgctcaaggaaataaaagaggatacaaacaaatggaagaacattccatgctcatgggtaggaagaatcaatatcgtgaaaatggccatacagcccaaggtaatttacagattcaatgccatccccatcaagctaccaatgactttcttcacagaattggaaaaaactactttaaagttcatatggaaccaaaaaagagcctgcatcgccaagtcaaacttaagccagaagaacaaagctggagacatcacactaccgaattccaccacagtgctgggggtgcacatctgccaattgaccggttcgggaattctcctgtggcttatcttccgctga

SEQ ID NO: 7597 - DNA, 2424 bp, Homo sapiens
  SIMILAR (1169)..(1285): 641254mologous to Homo sapiens Rab6 GTPase activating protein, GAPCenA,accession number AJ011679,Smith-Waterman Score= 142.
atggcgggcgcccctcccccagccttgctgccgccttgcagtttgatctcagactgctgtgctagcaatcagcgagattccgttggcgtaggaccctccaagccaggtgtgggatatagtctcgtggtgcgcccttttttaagccggtctgaaaagcgcaatattcgggtgggagtgacccgattttccagaattatagaccaatccagcaatgtggagatagcatcttttccaatctataaggtgttattctgtgcacgtggacatgacggaacaacagagagcaattgctttgcatttacagagagttcccatggttcggaagaatttcagatacatgttttctcctgtgaaattaaagaggcagtaagcagaattttgtacagtttctgtacagcattcaaacgttcttccagacaagtgtctgatgttaaagactcagttattcctacccccgacagtgatgtgtttaccttcagtgtctccttggaggtaaaagaagacgatggaaaaggaaactttagccctgtgcctaaggatagagataaattttatttcaaattaaagcaaggaatagagaagaaggttgtgattacagtgcagcaactttctaacaaagaattagctattgaaagatgttttggaatgttattaagcccaggtcgaaacgtgaagaacagtgacatgcatttactggatatggaatccatgggaaagagctatgatgggagagcttatgtcatcactggcatgtggaaccccaatgcaccagtatttctggcacttaacgaggaaaccccaaaagataagcaagtatacatgactgtggcagtggatatggtagtcacagaggtggtggagcctgttcgctttctcctggagacagtagtccgtgtgtaccctgcaaatgagcgattttggtatttcagcagaaagactttcacagagactttcttcatgagattgaaacagtctgagggaaaaggccataccaatgctggagatgcaatatatgaggtggtgagtctacagcgagagtctgacaaggaggaaccagtcactcctactagtggagggggtccaatgtcaccccaggatgatgaagcagaagaggagagtgataatgaactctcaagtggaacaggtgatgtgtctaaagattggtcctgagaagatcctgtattcttggggagagttgctaggaaaatggcacagtaaccttggtgcacgaccgaaagggctgtctactctggtgaagagtggcgtccctgacagcattgagggcagaggtatggcagttattggcaggctgccatgacaaccaggcaatgctggatagataccgaattcttatcacaaaggactcagcccaggagagagctattactcgagatattcatcgtacatttcccgcacatgattactttaaagatactggaggagatgggcaagaatcgctctataagatctgcaaggcctactctgtgtatgatgaagacattgggtactgtcaagggcagtcttttcttgctgctggattactgctgcatatgccagaggaacaagcattctgtgttttggtgaaaatcatgtacgactatggtttgagagacctctacagaaacaacttcgaagatcttcattgcaaattctaccagttggagagactaatgcaggaacagctaccggacctgcatagccatttttctgatctgaacctggaagctcatatgtatgcatcccagtggttttctcactctttttactgccaagttcccactctgcatggtgttccacatcattgacttactgctttgtgagggtttgaacataatctttcatgtagctttggctctcctaaagacctcaaaggaagacgcttctgcagggctgattttgaaggtgctttaaagttctttagagttcagcttccaaagagaatacgggccaaaggaaaatgcaaagaggcctgatgaagcaggccttgcaatattaaagtaccaaccaagaagcttgaagaaatatgagaaagaatatccagacaatgccgagagagtcagctgcaacaggaagaccccaatggatagatacaagtttgtatatttgtaggtaactccagctgttgcatttatactgggaatcttcataagaagctgagagaacagagaggggaaaaagaaagtggctttctactttcaaaaatgaaacaaaaaggaaaaattggcaaagtactgttttagctgtgcatgtcatatccacaaagacttttagcaggtgaactgttccaagactgacacaaggatgtttcaaacttgcctctgtctgtagaaaatgttaaaaataccaactcacttggaaggaaaaataaaaatcacaaaggtatattgagcgcaaaaaaaaaaaaaaaaaaaaaagtcgtatcga

SEQ ID NO: 7598 - DNA, 752 bp, Homo sapiens
  SIMILAR (501)..(632): 371254mologous to Chanos chanos cytochrome b,accession number L26056,Smith-Waterman Score=74.
tttgcaactccagttaattcgagtcccacttttgaaatgcatcatgattagaaagtgtctgtagtttgaaaattagtccaaatttctcctgttctgagtgtatttagaagtagataccaaaatggaagcttgacacccctgttagctcagcaagcagagacgatcactctatatatattgttgtatggccttccagggtttttctatgcacatagatatagtgcctggcacacagtagacactcaataaatatctccggaaataaagggaaaggtggcaaaaggcgatgtggaggtgtccgcccttccggggtttataccctcggcagttagatgtcctatgtgtcaaggtatggctgcggaggccggaaaaatgtggccaccgtcagtaagggttgggcagggagcttggcgtggcctggcggatttccgaggaaggtgaagggcggaggctcctggcgaccttctggcggagtggcgtggccgccccagtccgcgctcgcctggctctcctcctttccgggccgattgcatcagaatctcccctcaccaccaacccccactcacactctgctcgccggcctcgcacttacatcgacatgcaccggcgctgagggtcacgaatcggagtcattctcctactgggggacgcgtggcccttccgcaaccatggcttgtgatggtttaacgcggacaggccattcctccccgtcccgcgcgcggtctcctcccctcctgtgcgcccgctcttta

SEQ ID NO: 7599 - DNA, 564 bp, Homo sapiens
  SIMILAR (438)..(506): 391254mologous to Homo sapiens salivary proline-rich protein 2,accession number K02578,Smith-Waterman Score=47.
cggccgctacccagccggccgcacgcagcaccccccggacatcacacgatctcctctgggccttgcggacacaggaaattttcaccaaaggccggggattcaaacactcccagaacacggtcgcgccctcgggtcagctgcgctctccctccagacgtgcgtggttcctggctctcgtaaaaatggaaccagatctggtaccacactctgccacagccacaggaaaacacaccaaagtcacaggaaaacaaaccaaaaagtaagccacagcccacgcaaaggtgaactcgggggccctggcgcttcctcccgctgccgcgtgcgttcgggaagcacaggagacctggacttttcctctcctaaaagcaacatccgaaagcatcgggcacagccgagctctctctgctttcacgcccgcagagatgatttctacgttacctcctcctccgacatctaaatctccccttgccgctcgcgcagcccctcccgggaacggataatcaccttacctccggaaataaagggaaaggtggcaaaaggcgatgtggaggtgtccgcccttcc

SEQ ID NO: 7600 - DNA, 1626 bp, Homo sapiens
  SIMILAR (360)..(1394): 281254mologous to Herpesvirus papio NTR,accession number AF200364,Smith-Waterman Score=162.
atgcaggacacttgttctgagataatctcaccagctgactttcctactttttcatcatcgttaaaaatcagattttccactgatagtccttcacagatttttaaaaaacactgtattcagaaaatagttttgatcttattacccaaaaattcttatacaagaagactgctggtatcaaaccagatgtatttggaaagctttgaacaccagtgcaggaaaacacatattctctgtaagcgcacagctggtagtggccccttctgcagctgtcctactgggcaacccagacacaactcctctgcaagcaagtgcccagccagtgaaagggggctgtgtctgaaacaaagagtaagcgggaaaaaagggaaccaggcccagttgcccctgctcccctccatgccgctccctcgtcccccggacttggagcgccccagctccgttaacctggacgcaccaggtccttcggtcgggaccacgtggggtctccaggccctccaagagctggcccccggctctttgcgcctaggccggtgctttctcggtgctcagcaaatccttctggttcacctcacacccagtccccaaagcagagctccacagggcagatctcaggaagggctgaccaggtctgcgggtgctggatccggaagaggggagtcccaggcgctgcccgcggctctccgggctgcgctcggacctgccactcccgcggccatcctcatgctgcgcccttcccacaatgcaactccctcgctccttcggccccggcggggctctggcgtacccaaaatgcaggccccagcggaacgcacagccctcctgtcctccgccggtgcccctttagccgccccacccccatccctaagggctctcattctccagctgcagccgcagctgggttccgaacacgccgccgggccccgggagggagaggggcaggtgccagggcggcgcgcagcctctgctcccggtgccagcttcagtgcgccgggcacacgcgcgccccgcaacccctccctcaccctttccccgttgctcaatctccgccagccgcggtcgctgcatcgtcagagagctgcaagagggaggcagcaagaaggtcgccaggagcctccgcccttcaccttcctccgaaatccgccaggccacgccaagctccctgcccaacccttactgacgggggccacattttcccggcctccgcagccagaccttgacacaaaggacatcaaactgccgagggtaaaaaccccggaagggcggacacctccacatcgccttttgccacctttccctttatttccggaggagaggaaaagtccaggtctcctgtgcttcccgaacgcacgcggcagcgggaggaagcgccagggcccccgagttcacctttgcgtgggctgtggcttactttttggtttgttttcctgtgactttggtgtgttttcctgtggctgtggcagagtgtggtaccagatctggttccatttttacgagagccaggaaccacgcacgtctggagggagagcgcagctgacccgagggcgcgaccgtgttctgggagtgtttgaatccccggcctttggtgaaaatttcctgtgtccgcaaggcccagaggagatcgtgtga

SEQ ID NO: 7601 - DNA, 612 bp, Homo sapiens
  SIMILAR (49)..(609): 851254mologous to Homo sapiens nucleophosmin,accession number M23613,Smith-Waterman Score=806.
atggaagattcgatggacatggacatgagccccctgaggccccagaactatcttttcggttgtgaactaaaggccgacaaagatgatcactttaaggtggataatgatgaaaatgagcgccagttatccttaagaacggccagtttagggctgcggtctgcccctggaggtggtagcaaggttccacagaaaaaagtaaaacttgctgctgatgaagatgatgacgatgatgatgaagaggatgatgatgaagatgatgatgatgatgattttgatgatgaggaagctgaagaaaaagcgccagtgaagaaatctatacgagatactccagccaaaaatgcacaaaagtcaaatcagaatggaaaagactcaaaaccatcaacaccaagatcaaaaggacaagaatccttcaaaaaacaggaaaaaactcctaaaacaccaaaaggacctagttctgtagaagacattaaagcaaaaatgcaagcaagtatagaaaaaggtggttctcttcccaaagtggaagccaaattcatcaattatgtgaagaattgcttccggatgactaaccaagaggctattcaagatctctggcagtggaggaagtctctttaa

SEQ ID NO: 7602 - DNA, 968 bp, Homo sapiens
  SIMILAR (471)..(614): 581254mologous to Homo sapiens nucleophosmin,accession number M23613,Smith-Waterman Score=108.
gtgcaaaggatggttgcacattgtggagcaggggcatgacattcgaggccgttcaattaagataacactgccaccttgaaaatgtctttcagccaacgttttccctgggggctttgaaatacaaccaacagtggtctaaggattgaagtgtgtttcagggccgtgccatattagtggacagcacttagtagctgtgaggaagatgcggagtcagaagatgaagaggaggagaatgtgaaactcttaagtatatctgaaaggcggtctgcccctggggtggttagcatggttccacagaaaaaagttaaaacttgctgctgatgaagatgatgacgatgatgatgaagaggatgatgatgaagatgatgatgatgatgattttgatgatgaggaagctgaagaaaaagcgccagtgaagaaatctatacgagatactccagccaaaaatgcacaaaagtcaaatcagaatgggaaagaactcaaacccttattcacacccaagatcacagggaccaggatcccttcaggaaacaggaaaaaacctcctaaaacaccaaaaggaccttagttctgtagaagacattaaagcaaaaatgcaagcaagtataggaaaaaagcgcattgaaccagtcctgggcacttacatgtaaaattaagcccaaagatggggagaaaggaaaaggagagacaaatatagtccatactgagtgtcatcaacaatcccagactgaaggcttctattttaattctcatccccctttcttgattggccacccatgcctcttcaggctggaaacaatctcttggttccctaaagcactttcttctgactgctgtgattcagtgaaccttgccctttgctttctattacttggtgcatttgcctcacctgacaatgttttaaatcgcctttgtatctccttagctgctcaattaaatatttgaatgcatcaaaaaaaaaaaaaaaa

SEQ ID NO: 7603 - DNA, 1342 bp, Homo sapiens
  SIMILAR (326)..(1012): 441254mologous to Homo sapiens nucleophosmin,accession number M23613,Smith-Waterman Score=292.
ccctggtgtgattccgtcctgcgcggttgttctctggagcagcgttcttttatctccgtccgccttctctcctacctaagtgcgtgccgccacccgatggaagattcgatggacatggacatgagccccctgaggccccagaactatcttttcggttgtgaactaaaggccgacaaagattatcactttaaggtggataatgatgaaaatgagcaccagttatctttaagaacggtcagtttaggggctggtgcaaaggatgagttgcacattgttgaagcagaggcaatgaattacgaaggcagtccaattaaagtaacactcggcaactttgaaaatgtctgtacagccaaccggtttcccttgggggcatttgaaataacaccaccagtggtcgttaaggttgaagtgtggttcagggccagtgcatattagtggacagcacttagtagctgtcggaggaagatgcagagtcagaagatgaagaggaggaggatgtgaaacctcttaagtatatctggaaagcggtctgccccctggaggtgggtagcaaggttccacagaaaaaaagtaaaacttgcatgctgatgaaagatgatgacgatcgatgatgaagaggattgatgatgaagatgattgatgatgatgatttttgatgatgaggagagctgaagaaaaagcgcccagtgaaagaaatctataccgagatactcccagccaaaaaatgcacaaaagtcaaatcagaatgggaaaagacttcaaaaccatcatcaacaccaagattcaaaagggacaagaatcccttcaaagaaacaggaaaaaactcctaaaacccccaaaaggacctagttctgtagaagacattaaagcaaaaatgcaagcaagtatagagaaaaggtggttctcttcccaaagtggaaaccaagttcatcaattatgtgaagaatttgctcccggatgactggaccaagaggctatttcaagatctctgggcagtgggaggaagtctctttaagaaaatagtttaaacaatttggtaagagaatttaccgtcttatttcatttctgtaacagttgatatctggctgtcctttttataattgcagagtgagaactttccctaccgtgtttgataaatgttgtccaggttctatttgccaaggaattgtgttgtcccaaaatgcctgtttaagtttttaaagatggaacttcacccctttgcttggttttaagtatgtatgggatgctatgataggacatagtagtagcagtggtcagacatggaaatggtgtgggagacacagatatacatgtgaaataaaactccggattttaataaagt

SEQ ID NO: 7604 - DNA, 618 bp, Homo sapiens
  SIMILAR (185)..(268): 1001254mologous to Homo sapiens Sec61-complex beta- subunit,accession number L25085,Smith-Waterman Score=145.
atgaatgagggcgagtttgtaaagctctttggcacagtgactggcacacagcgagggtcctatgcattaactctacgaccacgatcactgcctcctgcaatccacccacactgcacgcagatctctaacaacccccacttgaatgtgcaggttggagaattggacgaagaatttgttattcaatggccctgttccagtattggttatgagtcttctgttcatcgcttctgtatttatgttgcacatttggggcaagtacactcgttcgtagattcagttacatccatctgtcatctgaagaaagaggaaaaaacccaacatttcttggaccaaaagtatagtgactatctgttcatgagagaaattttctgtgccagtgtccccacagaaagaattgaaaaggatgttttgaaatcatgcaaatgttggcatcaagttaaaatagatgaaaatgcctacaaagctggattcattcaacagaaaatactgtcaagcatgtggagctcctatgtgcagggagccatgctcttgattcccataaagctgccccttggtagctccagagggggtgtccctctcttcaaatgccggaggagggccaggaccaagtttgtttga

SEQ ID NO: 7605 - DNA, 603 bp, Homo sapiens
  SIMILAR (83)..(388): 571254mologous to Homo sapiens Sec61-complex beta- subunit,accession number L25085,Smith-Waterman Score=221.
gtctcgccagctgccggtctttcgggggctccgtaactttctatccgtccgcgtcagcgccttgcgcaccctcatctccaatatgcctggtccgacccccagtggcactaacgtgggatcctcagggcgctctcccagcaaagcagtggccgcccgggcggcgggatccactgtccggcagaggaaaaatgccagctgtgggaccaaggagtgcaggccgcaccaaccgtcggcaggcacccgggcgggatgtggcgattctacacacgaagtatatcacctgggcgtcaaaagttggcccctgtgtccagtatctggttatgaagtcttctgttcatcgcttcctgtatttatgttgctacatttggggcaaagtacactccgttcgtagaattcagttacatccatcttgtcatcttgaagaaggaggaaaaaaccccaacatttcttggaccaaaagtatagtgactatctgtttcatgagagaaatttttctgtaagctttgctgtttttacaggggatttatcaataattgactttgaggaatcagtttttttctatggctaataaactttttaattcacttaaaaaaaagtcgacgc

SEQ ID NO: 7606 - DNA, 291 bp, Homo sapiens
  SIMILAR (8)..(37): 601254mologous to Caenorhabditis elegans RRM-type RNA binding protein,accession number U24189,Smith-Waterman Score=39.
ttaagcaacgccttctcccccttcccctccaggcgcccgacgtagaggccggagcttcttggaccgcggcgtgagcggttgcttgggccagaaggttctctggtggaggcgctcttcctggtgtcccgcccagtaggttcgttcgcaccgcttcttccacactctttctccctccttctcctcgccccgccttccctccctcctcaatccctctagttccttccccgcctcgccactgtgcacgatctcgcgagacttggcccagaacattgcggatcgggtcggcgccat

SEQ ID NO: 7607 - DNA, 661 bp, Homo sapiens
  SIMILAR (215)..(352): 891254mologous to HERV-H/env59 envelope protein,accession number AJ289711,Smith-Waterman Score=220.
ttggctttgcaattctctttcctccaaaatcgccaaggcctcaatttactcattgctgaaaaaggacgactctgtatatttttaaatgaagagtgttgtttttacctaaatcaatctggcctggtatatgacaacataaaaaaactcaaggatagagtccaaaaacttgccaaccaagcaaataattatgctgaacccccttgggcactctcttaattggatgtcctgggtcctcccaattcttagtcctttaatacctgtttttctccttctcttattcggaccgtgtgtcttctgtttagtttctcaattcatacaaaaccgtattcaggccatcgccaataattctatatgacaaatgctccttctaacaaccccacagtatcagcccttaccccaaaatctttcttcagttgaatctctcccactgtaggttcccaggccgcccctaatcccgctcgaagcagccctgagaaacatcgcccattatctctccatatcacccccacaaattttcgccaccccaacactttaccaatattttgttttatttttcttattggcataagaagacagaaatgtcgggcctctgagtccctgttaagccatcatttcccagtgacctgcccgtccacatccagatggcctgcacccagtgaag

SEQ ID NO: 7608 - DNA, 3447 bp, Homo sapiens
  SIMILAR (3088)..(1550): 1001254mologous to Homo sapiens butyrophilin,accession number U90552,Smith-Waterman Score=2703.
tttttttttttttttttttcagcattattaacaaatttattgaacaactagaacttgacaagcacatgccaggtagaggggatacagtggagagcaataataatgatgataatgaggagtagttttttccctagcaggcagcagttgaaaggaatattggtttaacatccaccaatgagcaggggtggatagacccctctcctgggggacagagtccataacgggattaaaaatatccctgtaagccgggtcacccggtgggctcaagcctgtaatcccaggcactttggggagaccccgggtggggtgggatcatgaggtcaagagatcgagaccatcctggccaacatagtgaaccctcatctgtactaaaagtacaaaaatttgttgggtgtggtggcgtgcacctatatttcccagtactccgggaggctgaggcaggagaattgtttgaacccaggaggtggaggttgcagggagctgagatcgcaccactgcactccagcctagcaacagagtaagactccatcttaaaaaaaaaaaaaaatccctgtatttcttctagctcccttcatccaaatttcctatatcacagaaaatctctagggtatttgctctgcctggaaaccttgattgaaggaaggctggctctggctgcatgatcacttatcacatttgttgggtgggaacacatctgttccccatgatttatcaagtgtggcctctagtctctttccaaatcacgtgtcatgtgggtacggtgaggttattctctcaaccaagacactctgcaaagctaatccaaggcgtgctgggtctaaggctctgacaatcagctgggaaggagtcaacaggggtgtcaactccacaaccacctacagtgatccttatcctggagccatcctgggaaaagaacctcagggctacaggtgggttcttcctatgggggaagaaacagggtggaaaagaacggccatagggccggggactgaagctgaacatctcccaactgcagaaattactgcatgagttatgtaagttgcttaatgttgccctgcctcaacttccatacttgctaaatgagactacccgacagggtgttgcgaggattaaaggagtgacatccaccaaagctcataacacagcactcagagcattttaagttctccattaatgttagttattgctgtttagatcccagctgtgttgttaactagtcatgtctactttgtagtcaattcacttttctgcaccccagtttccttatctgtataaggggaaaataagatggtaccaaactcaaacaactgtcatatgaataattgaatgagtatcagtaaagtgcttcagtgcgtgcttgtagctttatggttgtgattggttgctgtggagggggaggccctcagctctgagctgggcagggagaagcagagaaaagttacttcagcctgaggctccccactttcgttagctaagcccggggttactggtgtctctagggaatgatcagcactcggtcagaattggaggaactctcttcttcttttcacgctggacaaatactcagggccgtgggctccaaggtcaaaattctgaaaacaggatatagagcctcagagaaggagacgtccaggaaagtatgaatatgcgatccatccacagcattgtagaatgagatatctccagtctcatagtccaggaagacccccactttcttagggggcttaggaagtttcaggttggttctgggctcagttagagtccgatacttattcccatcagtcagccccatagtccagaatccattctcaggtgtcattttgacccagccttttctctgcacattcttactgcacacccctatatgccactctttcctgtcccctacctccacctcccagtaatgtctccctgatatgaagctctcacagccgagaacacaataatgccaattaaatctctcagggttgtctggcagatcctggggctccttggcacgctgcacactcctctggtcctcagaaacaaggaggatggggtttgctgtttttggatccagaatcacatccgcaggcttgaagagggcctttttccattcattataggctgaatgtctctctccccgagatgcatactggatacttctccatctgagttcctccaggagcttcactcttgtgctttgttcttgcttcattgtgctccatgccatttctctcaactcttgctctctctttttctttctgaactgagtctttttttcctcctgctgttgccacaggaagtaaccggctcccccaagaagcagcagcaagacaggcagggtccgtgccagggcggcgatccacctctgggcgctcctgaagaaggggtctgcgatggaaatgctggctgtcttttccaggccgaggagggaacttctgatggtacaggatacaccctccccagagctgcctctcatgatcacagatgctgctactgcatacaggcccactccgtctgcaaccacaggtgcttccacagtcgggatgttctctcccttgttgttgctccactgtatttggggttgggggtaccagccagtggacctgcactccagatggatccctccatccttgtaacccttcacatcaacgtgaagatcagaacccagtgctgcaaccttcagctccaccagggctttttcatagaagtcaccatcttggaaataacacaagtactttccactgtcagaggctgtgacgttgtgtattcggagagcagccttccctgcagtgatgccatcccgcagaatcgaagttctccctcgatacggtgcactctgcctgtcttccacttcctttccatctgcatacacgttcaccacctgccttaggctggaactcacccacttcagctccatggtctctgcactcatggtcgggaacaggtgacagggcagatcagcgtcttcacccaccatggccaggatgggcccagagggtccaagcacagaaaactgagctgagtgaggcatgagcagctgaagcaaaaggaggcagacacgaaagttgagcagaaggaaggccaggaaacttgccattttcattcatgctgcatatcaggagatactggaaggtggggggcagacactatgacctggaagaagctatagaattccaaatggaaacctccacttccctagagctaactcaagtatggtgaccgaagaagatctttcctctgccaaaaattctgtccttcagtgtcttcacctttgagtcccaacattgaaaatcacctcttagcattcccctctgaaaatcacagcccacagaaggaaggcagttaatagttctccattctttctactatggttaaatctccttctggaagaaaggaaaaacccacgcgtccgcccacgcgtccgcggacgcgtgggtcgacctgcaggcatgcaagcttcag

SEQ ID NO: 7609 - DNA, 1555 bp, Homo sapiens
  SIMILAR (65)..(301): 981254mologous to Homo sapiens Neuron-associated protein,accession number B01379,Smith-Waterman Score=408.
  misc_feature (1)...(1555): n = a,t,c or g
tggaagtcccaggngannnnncattgataacgtttgacctgcctacgccaagcttggcacgagggaagctgagatggacctgggaactccaacatatgatgaaaaccccatgaaggcctcgaaaaagcccaagacagcagaagcagacacctccagtgaactagcaaagaaaagcaaagaagtattcagaaaagagatgtcccagttcatcgtccagtgcctgaacccttaccggaaacctgactgcaaagtgggaagaattaccacaactgaagactttaaacatctggctcgcaaggtactccccttgcttttggtagcccaccaggcaatgttctgggcaaactgtgtaccttctaagaagcccttttcatcatagaaagtattttttttttttcttgtcagatgtcagagctggggacccaggaacggggagggaaggtttggggagggatgcgtaccttacatgacagcagtagttctctaagaaattttcagagctcagcttgtcctttctggtgatcatagcaccagcctgccccaacatctacccccttattaacttcctgtcttggtgagaagggccctgaagcagcaggctggattaccacccctgtcctccccctcatataatttctgctctgattggtggctgtggtctctcttcctgtgccctggacagctgactcacggtgttatgaataaggagctgaagtactgtaagaatcctgagggacctggagtgcaatgagaatgtgaaacacaaaaccaaggagtacattaagaagtacatgcagaagtttggggctgtttacaaacccaaagaggacactgaatttagagtgactgttgggccagggtgggaggatgggtggtcaggtaagacagactctagggagaggaaatcctgtgggcctttctgtcccacccctgtcagcactgtgctactgatgatacatcaccctggggaattcaaccctgcagatgtcaactgaaggccacaaaaatgaactccatctacaaagtggattaccctagttgtgagctgttggcatgtgggttagaagccattcagagggtgcaagggcttagaaaaagacccctggccagacctgactcccactctttaaaccctggggtcttcctcccttggccggtgcctgtcagcgcacagaccccatgcgcaacccccaccccacaacccccttacccctgatgatctgtattatattttaatggtatatgtgaatatattgaaaaataatttgtttttttcctggtttttgttttgtttttcgttttgcttttagcctcctacatgctaggatcacaggaagacttttgtaaggacagtttaagttctcctgcaaggtttaatttgttatcgatgtaaatattccaaagcaggctgccttgtggttttggccagccttgtgctatgttgataagattgatttactgcttaaaatcactttacgtttatccaattttttactgaactttttatgtaaaaaaaataaaatcaattaaagaacttggaaaaaaaaaaaaaaaa

SEQ ID NO: 7610 - DNA, 935 bp, Homo sapiens
  SIMILAR (362)..(625): 441254mologous to Rattus norvegicus protein phosphatase 2C,accession number AF095927,Smith-Waterman Score=120.
  misc_feature (1)...(935): n = a,t,c or g
atgaactgtggaccagaggcccaaggaagagacaaaatggaagttctaagccactatggctactatatggggaaagtggagcccagaaaagtgtggtcgaggtcacaaagccaagactcctttggccacaatggatccagcatagagcccggcgtccatgcctgcagcaggctccatgctccagcaggccccatgctccagcctctgctgcctccctcctcctctcctactgcaagggacacaaagcacagggcccaagtgaaaaccacagactctggagccagaaggagggatgggcgtgttttgggcgtgctagaggtgtcacgctccattgcggacggtcagtacaagcgctgcagntgtcacctctgtgcccgaccatcagacgctgcccagctgaccccccaatgaccaggttccattttgttggcctgtgatgggctcttccaaggtctttaccccagaagaagccgtgaacttcatcttggtcctgtctcgaggatgaaaagatccagacccgggaagggaagtccgcagccgacgtccgcttacgaagcagccctgcaacatgctggccaacaaggcggttgcagccggggctcggccggacaacgtcactgtgattggtggtgcgggatagggcactgaggggtggcgcgcggccaggagcacgcatgggtatttgacttaaaaaggttcattttgtgtgtgtgcacattgtgtgttttgtgtactccctgtgggacgtcccatggttgtaaataaaggtttctctttttaaaaaaaaaaaaaaaaaaaaaaaaaggggggcccgttttaaagaacccttggggggcccaaattttacccgggcttgcaacgtaaaactttttccccttatggggggccgttttaaaacctaggccttggcccgggttttaaaaaggtcgggagtg

SEQ ID NO: 7611 - DNA, 1302 bp, Homo sapiens
  SIMILAR (853)..(1110): 951254mologous to Rattus norvegicus SMHS2,accession number AF327513,Smith-Waterman Score=425.
atggtgtacatgaggaaaggccaggagctttatgtcgctggagcacaaaacagtattcatggaatgctgtggaaagtggggcagacaaatcagtgccagcctcccaaagggtaccgagctcgaataaccgtagctacagctttgattggacaagagactgatttcagtacctttctcctggcttgtctacggccatacgacctgaatgtgcctgatctcatccgaaatattaaggttccacttcaagctgtatctgcattaggaggcatgccaagcccagtaacactgtggttcttacaaacttgtagaggtatcgccttggtagtcttggataagatccggaagaattctctggactaccaggcagaggagtctctccccatgtctaccaccaccacaggcccacagggagtactgtcagtgaacaactgctgttcagttaaggcccaagggccgtttactccgcttatgatgaatgctgccaagcctgggactcacccttcaggacaggtatgtccagagatgccatctaagagccaaggcctgctactggggacccataaatcccacgtggtgctctcccccactgtgaccgagctgcaaaaggagtctcttcttgtagccaccacagctttgaatatgcaggtcacacctgaaaccagcatgtctcaagtctcacccaaggcctatggtgtgtattacctggttaccgctactgattattcagggcccaagggctctttggctccctctactgccccctatcggcagagcctagcacgtcgccagcaagcaaagggaaacgggttttgcagggtctgggaccggccccatcatgacaaagccaagtatagcattagtttggatgaattcaagtcattttgccattttacaacccacttggaagactttgctattgccatgcagatgttcagtttagctcatcgtcctgtcagactagcggagtttaagagagctgtgaaagtagcaacaggacaagaactctcaaacaatattttggacactgtctttaagatctttgatttggatggtgatgaatgtcttagtcatgaagagtttcttggggtgttaaaaaacagaatgcatcgagagcagagagcccagtgccaaacatttcataattaccgcttcaaagattctgcatcacacgcacgtcagcgatgttccaggggcagagaaaggaagcgtgcactggaggtgtcaccgggcttcattaccgccatcataaagattgagtacttacctgccaggtcgcagtgttcagtgctggagcgcgtgtga

SEQ ID NO: 7612 - DNA, 1902 bp, Homo sapiens
  SIMILAR (1253)..(1312): 571254mologous to Rattus norvegicus SMHS2,accession number AF327513,Smith-Waterman Score=63.
gtagctgcgcgcgggtggcggcctggggcggaaaactgcgacgggggctcgctgtcagccgacaggctgtgcggagtcccggccccttggcagcggcagtggccggcgcggccctggcaggagcaggagcggcctggcaccacagccgcgtcagtgttgcggcgcgggatggcagttttacagtctccgcacagaaaaatgttgaacatggaataatatatattgggaaaccgtctcttcgtaagcagcgcttcatgcagttttcttcactcgaacatgaaggagaatattatatgacaccacgagacgttcctcttctcagtgatgtttgagcaaatggaacgtaaaacttcagtcaagaagctgacaaaaaaggttcatcgaggatacactgtcagggatcccaacagctggctgtggatcatctttttttcagagaccttgggcgattaaagggctaattttcatataaccgagttatctttttttttgctttacaatcctcactaaaccccattcctggatttcatgttgcttttaaaatgctggatacagatggtaatgagatgattgaaaaaaagggaattttttaagctgcagaagatcataagtaaacaagatgacttgattgacagtgaaaactaatgaaacctggatatcaggaagcaataagtgaaagaacctgaaattaacacaactcttcagatgcgtttctttggaaaaagaggaccaagaaaacttcattataaagaatttcgaagatttatgggaaaatttacaaacagagattcaaggaaatgggaattccttcagttttctaaaggtttgagtttcatgaggaaaaggaggactttgcagagtggctactttttttccactaacactgaaaataaagatatttattggaaaaatgtgagagagaagttgtcagcaggagagagcattagtttggatgaagtcaaggcattttgtcattgtacaaggcagattggaacactttgctatttgccatgcagatgttcacgttagctcatcgtcctgtcagactagcggagtttaagagagctgtgaaagtagcaacaggacaagaactctcaaacaatattttggacactgtctttaagatctttgatttggatggtgatgaatgtcttagtcatgaagagtttcttggggtgttaaaaaacagaatgcatcgaggtttagtgggtaccacaacatcagagtatacaagaatactggaagtgtgtgaagaaagaaagcattaaagggagtaaaagaagtctggaaacaagctgggaaaaggtcttttttaataaaagatataatagtatggcaattatattgttccaaatgtcaaaatttgtgattttttagaagtacttgctatttatcttcttaagtcttcattgatattctgtgtgaaataagcatgtcttgtacttgctttctgatttcataattttatgaaagaacttagttagaaagaaaagtaagtataaaaataagatattggattctgtccagaaggccccagatttggaaataatgttttggtacttcgggtaagatgggaaaacctagtgattcccctgatttccttagacactctaatatgatatgcctttctgggaagggataaaacgaaatacatatggggaaaaagtacttgagaccaaggccagcatcaattcccagacatcttcatgttcctaataggctaaatgaagttaaaaacttatttcagatttttctcatctgtaccttatatctcataaatttattggcatattttatgtcagtagcttagctgtttattgtctttaaaataacatgtaaacttcaatgttaatatctggaagcagaataaaatatttacatagatacaaaaaataaaaaaaa

SEQ ID NO: 7613 - DNA, 696 bp, Homo sapiens
  SIMILAR (46)..(297): 831254mologous to Homo sapiens TAR RNA binding protein,accession number M60801,Smith-Waterman Score=350.
tcagaaccggggcccaggccgcacctgagattttctaccaaattcattggagagaagatcctgtccttctgcaattgctccctgggctccataggtgccctgggccctgcctgctgccgtgtcctcagtgagctctctgaagagcaggtcttccacgtcaattacctggatgttgaggagctgagcctgagtagactctgccagtgtctggtggaactgtccttccagctggccactgcatatcatggctctgcaaccaccagggaggcagcccgtggtgaggctgcttgccgtgcccatttgatgttttggtgcctttgcatctggcagttctgcaggctttaaagtaaacatggtgccggcatctgcttgggcttttagggaggccccaggaagcttacagtcacagtggaaggtgaagggggaacaggccattgtaggagcatggttagtttgtttggtgtggtcatgtcttcctgggtagtcttgatgcttgtgggtgttctttggtttctggtgttctattctactgtgcctgagctggacccaagccacaagacaaagttcttcccactcttctctcttttttccacaagcagtgaagtctcttcctatggctaccacaactgggaatttgttgaagccagcacatctgtgagtctcacccaaggcccatggcaagtactgcctgggcat

SEQ ID NO: 7614 - DNA, 1444 bp, Homo sapiens
  SIMILAR (67)..(849): 971254mologous to Homo sapiens TAR RNA binding protein 2,accession number U08998,Smith-Waterman Score=1308.
gtaggctgtgtattggggcgcgtggaggctgcagtcacggtggcgcccgcggggacggaggagggaatgagtgaagaggagcaaggctccggcactaccacgggctgcgggctgcctagtatagagcaaatgctggccgccaacccaggcaagaccccgatcagccttctgcaggagtatgggaccagaatagggaagacgcctgtgtacgaccttctcaaagccgagggccaagcccaccagcctaatttcaccttccgggtcaccgttggcgacaccagctgcactggtcagggccccagcaagaaggcagccaagcacaaggcagctgaggtggccctcaaacacctcaaaggggggagcatgctggagccggccctggaggacagcagttctttttctcccctagactcttcactgcctgaggacattccggtttttactgctgcagcagctgctaccccagttccatctgtagtcctaaccaggagccccgccatggaactgcagccccctgtctcccctcagcagtctgagtgcaaccccgttggtgctctgcaggagctggtggtgcagaaaggctggcggttgccggagtacacagtgacccaggagtctgggccagcccaccgcaaagaattcaccatgacctgtcgagtggagcgtttcattgagattgggagtggcacttccaaaaaattggcaaagcggaatgcggcggccaaaatgctgcttcgagtgcacacggtgcctctggatgcccgggatggcaatgaggtggagcctgatgatgaccacttctccattggtgtgggcttccgcctggaatgttcttcaaaaccggggcccaggttgcacctgggattctctacgaaattcagtaggagagaagatcctgtccctccgcagttgctccctgggctccctgggtgccctgggccctgcctgctgccgtgtcctcagtgagctctctgaggagcaggcctttcacgtcagctacctggatattgaggagctgagcctgagtggactctgccagtgcctggtggaactgtccacccagccggccactgtgtgtcatggctctgcaaccaccagggaggcagcccgtggtgaggctgcccgccgtgccctgcagtacctcaagatcatggcaggcagcaagtgaagccccagctggactcatggatgtgcaccctttgctccctgctctttctgcctctgggctcatgtatctgcgcagctctggtaccctctgtgggtgccatctctacctctgacacagactgcctgccttgaagctgagaaggcacagggcaaggagccaaggaccacagagcctcagccagcccaggatccgtcctcattttattggtgatgatgaatgggaatgaaatcagggggctgtctactagagcctggaataaatatgctgctttgtgga

SEQ ID NO: 7615 - DNA, 495 bp, Homo sapiens
  SIMILAR (2)..(286): 1001254mologous to Homo sapiens My031 protein,accession number AF061734,Smith-Waterman Score=476.
gaaggtcctggaaatggagcacacccagcaaatgaagctgaaggagcggcagaagttttttgaggaagccttccagcaggacatggagcagtacctgtccactggctacctgcagattgcagagcggcgagagcccataggcagcatgtcatccatggaagtgaacgtggacatgctggagcagatggacctgatggacatatcggaccaggaggccctggacgtcttcctgaactctggaggagaagagaacactgtgctgtcccccgccttagggcctgaatccagagaggccactccggatggtggtgaggacagcgactcttaaattgggacatgggcgttgtctggccacactggaatccagtttggctgtatgcggaattccacctggaaagccaggttgttttatagaggttcttgatttttacataattgccaataatgtgtgagaaacttaaagaacagctaacaataaagtgtgaggacggtaaa

SEQ ID NO: 7616 - DNA, 1273 bp, Homo sapiens
  SIMILAR (1001)..(1270): 901254mologous to Homo sapiens My031 protein,accession number AF061734,Smith-Waterman Score=418.
ctgagagcttgcattttgcttttatagaggcagtagattccaatgtatatctgcttaagccatcagcaaaaaactaataggcttactacaatttcttcggaaaaacctgcttctggcttcagcctcacttccttgtgttctacatcccagaagatgcacgtgagggcagctgcctggtaactggaggcttcacttgaccagcactgagcttctgttcactcattcaggtctcacatccatgtcatctccaggactcaccgaaaatagtcagagggatccctctgaactagatgcagagcacgcccagaaggtcctggaaatggagcacacccagcaaatgaagctgaaggagcggcagaagttttttgaggaagccttccagcaggacatggagcagcagtacctgtccactggctacctgcagattgcagagcggcgaggcgagtgggggctggggctgctggtgtggggactcaccggctgtgcgggttgccatgactcttcttggggtcttgtccgttggtataagtgttacagtttcaagtttgttgacgaaccttgtctacagtttgagcggaattgcaagcccataggcagcatgtcatccatggaagtgaacgtggacatgctggagcagatggacctgatggacatatcggaccaggaggccctggacgtcttcctgaactctggaggagaagagaacactgtgctgtcccccgccttaggtagggttgacaaacttgcattagctgaaccagggcagtatcgatgccactcccctccaaagctgcaacagtggtgtggttccgtcatgaattcttctcaaagatttgacatgctccactccggtaactttgaaatccatttgagtctgctccttgtggttaaggactggcgtttgcagggaggtgcggactctcctgcggggctcacgggaaactcttccctcttcgtgcgacaggcatttaggggcgtgcctgccatgggcaaagccatgggcagttcccaagttctgcaggccccagggcctgaatccagtacctgtcagaatgagattaccctccaggttccaaatccctcagaattaagagccaagccaccttcttcttcctccacctgcaccgactcggccacccgggacatcagtgagggtggggagtcccccgttgttcagtccgatgaggaggaagttcaggtggacactgccctggccacatcacacactgacagagaggccactccggatggtggtgaggacagcgactcttaa

SEQ ID NO: 7617 - DNA, 1409 bp, Homo sapiens
  SIMILAR (487)..(1206): 781254mologous to Homo sapiens My031 protein,accession number AF061734,Smith-Waterman Score=899.
  misc_feature (1)...(1409): n = a,t,c or g
tggtgtgacttcgctgtcgagattcgttgccggtagtgggagtgcggttcgcgcggtgacagcgcggggttggcggcgtgggacccagggggcgacagaggcagcagcagcccgaggcctgaggagaggagaccggcggcggcggcaatgctggagacccttcgcgagcggctgctgagcgtgcagcaggatttcacctccgggctgaagactttaagtgacaagtcaagagaagcaaaagtgaaaagcaaacccaggactgttccatttttgccaaagtactctgctggattagaattacttagcaggtatgaggatacatgggctgcacttcacagaagagccaaagactgtgcaagtgctggagagctggtggatagcgaggtggtcatgctttctgcgcactgggagaagaaaaagacaagcctcgtggagctgcaagagcagctccagcagctcccagctttaatcgcagacttagaatccatgacagcaaatctgactcatttagaggcgagttttgaggaggtagagaacaacctgctgcatctggaagacttatgtgggcagtgtgaattaaaaagatgcaaacatatgcagtcccagcaactggagaattacaagaaaaataagaggaaggaacttgaaaccttcaaagctgaactagatgcagagcacgcccagaaggtcctggaaatggagcacacccagcaaatgaagctgaaggagcggcagaagttttttgaggaagccttccagcaggacatggagcagtacctgtccactggctacctgcagattgcagagcggcgagagcccataggcagcatgtcatccatggaagtgaacgtggacatgctggagcagatggacctgatggacatatcggaccaggaggccctggacggtcttcctgaactctggaggagaagagaacactgtgctgtcccccgccttagggcctgaatccagtacctgtcagaatgagaattaccctccaggttcccaaatccttcggaattaggagccaagccacctttcttcttttcctccacctgcaccgactcggccacccggggacattcagtgagggtggggagtcccccgttgttcagtccgatgaggaggaagtttcaggtggacactgccctggccacatcacacactgacagagaggccactccggatggtggtgaggacaacgacttttaaattgggacatgggcgttgtctggccacactggaatcccagttttggctgnattcgggaattccccctggaaagccaggttgttttataaaggttcttgatttttacataattgccaataatgtgtgagaaacttaaagaacagctaacaataaagtgtgaggacggtaaactgagaaaaaaaaaaaaaaaaaaaaca

SEQ ID NO: 7618 - DNA, 355 bp, Homo sapiens
  SIMILAR (52)..(153): 471254mologous to Homo sapiens Human secreted protein, SEQ ID NO: 4478,accession number G00397,Smith-Waterman Score=73.
agggtgattatgagaatagtgaatgagttggctattttagactggaacgaccaaagtgctagaataacaggtgtgagccaccatgcccagcctggttattgtattttgatattgggattttgctagctctctaaagtaaataggataactgtatatctttttctgtgcattaagcagttataacatgggaatgatttgttcatgaaaggttgaaagtctgtacttacagaacttttgagttcacagtgctttctggaaataatttctttataactgtcagtttcttttgtgactattatgttacctatttttaaatttaagcaactttaaattaaaaaaattgtttttaaaatat

SEQ ID NO: 7619 - DNA, 4148 bp, Homo sapiens
  misc_feature (1)...(4148): n = a,t,c or g
caggtttatattcttccctggcggggccgctacacacggccaatcctgtctagtaaaaaggacagtattggaatcacttgaaaagagggctcgagataaacaggggttcacatgacgacagaagccaagagggctgcaaagatggaaaagaagatgaaaattttgcttggggggttaccagtctcgtgctatggggctcatgaaacagttgaatgacttatgggaccaaattgaaccaggctcactggaggttacgcactttggaaggactccaggaaccatgaagattttggtttttccccgggggctagagtgtctaaaagaaggacgttcagcgacaacaaggaaagagaaaagggaactttcaacatagatatgctgatttgctgctggagaaagaggctttaaagtccaaaattctgaagtaccagtttatanccctgtcacagggattaatttaattgcccggttttcatactctagaaggctgaaactgatgtttatcctccattgaacaaatttacccccacccatcctgtggtttttccagttgtttattttaaatgatatcgatccttacacattcctgtgtataaagaccttaactccacaggacgggacattttagagtttaaattattaaggctatcattcttttagtaatgtcatatttgcaaacttttttagttttggcctttaatttaaaaagcctaattttaaagtgctgcctgtgagtaactcttgaataaaaacaaaatataaaaaattgagaatgtagccttttgtttgaagtaattagatacttaagagtgcctgcaaaccagcagctatgtactctgtgtcatatttaatgagtaactcttgggtaatcaaaatggtgatgcagtatcttaaacacttaagaggcagttctttgtggctttgttagtttcagcaaagagtggtcatttctgtatacactgacaagttagattaactttttagtacctcaaattttttttttgttaatatcactttaaagaaggtctcttgtctgccagctacttaaataatttatgggtcagggcttaaaagatttaacttccttgccccattattttcttataagtattttttgacaaaggcattttaaaagttaatttcaagaaggccatcaaacttaaagctctatgtttagcctaagaagtcagttacatcagtgtagaatttggggaatggatagaggtggagatatttaattttatataattcatataaattgatttagttacagtatcagttggctacaagctcattatagactagcaatgttttgacatcaccaaaaacgtttgcccagtcttagaatactagggactataggaagggaagggattcattcattcattcgatattgaatgtataccctgtgccagagtcttagagagagaacaacaaacaaaataggcctagttcttgtttagtagagcttatagtcttttgagaatgacagacaattaaaatccaaatgtttatttggtgattcttatgtgtcagacacttaagtgttgggagataagcagttattaagacagagttcttgctctcatggaggtgacattagtggggaggagatactaagtatgtccagggaaagtatcagaccatgagttttagattctgtggaggaaattaaagtagggtgattatgagatagtgaatgagtggctattttagactggacgatcaaagagacctcttggaaggcagctatgctcaccactataccactgcactgtgccgcaccgtaccactataagctgcacggccaaagagacctcttaaagaagtaacatttaagataacatgtgattgacattttagaatgggctatccttgtgagattcaaggaaagaacatcctaggtggagtgaatagcaaacataaagcctcttttgtatgtttgaggaacaaaaaggacaatgcagctagagtgtcaagaatggcatttctgtatataagacctcgttgtatagagccacataaataaggctataataaggaatttggatcttactttaaatatgataagaatcgatgagaagatctaagcaaaggaatgacatgatcagatttggttttagaaacatcactatctccttagtgtgtaaaatctcaccaggctggagatagggaagccagtccaattaggagcctgatgcagtgatccagacaaaaaaataatagtgattctaactagagtccaggtaatagtagtggagatatgtggagagacatgataggtatatacttaatagtcttatcagacgataaattgatattttcctggtgtgtagtcacttaattcaaatacttttttcagtaagttctgggttttctaggaaaaacttcagtatcatcagtgaataatgatagtgtttcttctgatagttttatttcacttttattgcatgttttgttatctgaaatgtttaggacaatgttaacaataatgatgttagacatttttttttcttattttaatgggaatgtccatagttttaagtttgctgttgggagttagatagtctttatctgaaagacagtgtctctcttttagtttttaaagagtttgaattagaaatggctctggaactttaaacagtataccatttgggcatctattaaagcattcatataattgttctcatttgatgttttgatgaggtatattaatagattttcccacattaaatcatctttgcactcctggaatcaggtagattaatttttaaaagaaattttaaaggatttatagtttatttgcactttttgtagacttgaattatatggatttaaaagttgatctaatattaataaaggctcactttgttttcaaaatttgaagtaattcacatacttatagcctaaaatcggcaggaattacaaaatttcaaaactggcacattgtaaactgcatatgcatttgccaggtagtggtgccacttgaaatggtgaacagacacactgttatcctttgtcagtatcctgtaaagcccaggattctttaccagcaccatacagcgattttggtgactattttaacattcacactgaggccaggggtggtgagtcatgcctgtaatcctagcactttgggaggccaaggtgggaggatcatttgagctcaggagttcaagattagcctgggtaacatagtgagaccctgtctctattaaaaaataataataaaaataacattcacattggtattgttcactaaggtattggttgttaaggcattcattaaggtattgttaaaacttgtgttaagcatgttaaagtctcagtaactttgggatagaaataaaatgtgataaaaagctgaaagaaaccaccacaagggagagtcctttttgaaatattagagacataatgctgtctaataaaaaacgacatcaaagaaaaactacactacagtgactgcagacttaatgttggccaaccatgcatcctccctagaaatgcatttgaatttgatttactaatcttttatttaggaaatttacatttttacattagtgagattggtcttttgggctattgtactttttttttttttttttttgagatggagtcttgctctctcacccaggctggagtgcagtagtgcaatcttggcccactgcaacctctgcctcctgggctcgagtgattctctgcctcagccttccaagtagctgggactacaggcatgtgccaccgcactggctaatttttgtgtttttagtagagatggggttttgctatgttggccaggctggtcttgaattcctgacctcaggtgatccacctacctcggcctcccaaagtgctagaattacaggtgtgagccaccatgcccagcctggttattgtattttgatattgggattttgctagctctctaaagtaaataggataactgtatatctttttctgtgcattaagcagttataacatgggaatgatttgttcatgaaaggttgaaagtctgtacttacagaacttttgagttcacagtgctttctggagataatttctttataactgtcagtttcttttgtgactattatgttacctatttttaaatttaagcaactttaaattaaaaaaattgtttttaaaat

SEQ ID NO: 7620 - DNA, 387 bp, Homo sapiens
  SIMILAR (7)..(387): 881254mologous to Homo sapiens Tsg24 protein,accession number AJ278357,Smith-Waterman Score=564.
attttacttggaagaagagaaatgtctgagacttctgaactttggcagataaagttggtgttagagtttttcagctcccgaagccatcaggagcggctgcagaaccaccctaagcgggggctctttatgaactcggaattcctccctgttgtgaagtgcaccattgataataccctggaccagtggctacaagttctgtcatcagttggttccgttccatttgtttctctcacagtcgggggtgatatgtgtgtgcacgcctacctcagcgggcagcccttggaggaatcacagctgagcatgctggcctgcttcctcgtctaccactctgtgccagctccacagcacctgccacctataggactagaagggagcacaagctttgcc

SEQ ID NO: 7621 - DNA, 2310 bp, Homo sapiens
  SIMILAR (576)..(1004): 661254mologous to Homo sapiens Tsg24 protein,accession number AJ278357,Smith-Waterman Score=411.
  misc_feature (1)...(2310): n = a,t,c or g
atgaaaaaggtaggaggaagagttttctgggccaaggaaagggcaagtgcagaggccctgaggcacgaactagctgggctcctgaagaaatgcaaaggtagtgcagccgatgctgatcaaggaggtctaggccaaggctgcagacgccatagcaagcgatgggaaggatttacccgaggggcctcccgcgccgcccgcttggggaacgaggagcaggacgcggcctcggcggggcccgggccgaacggctgcggacacctgggcgccgaggagccgagcgccgccgcctccggcatggatcagtgcgtgacggtggagcgcgagctggagaaggtgctgcacaagttctcgggctacgggcagctgtgcgagcgcggcctggaggagctcatcgactacaccggcggtctcaagcacgagatcctgcagagccacgaaacttgtctgagcgtggtgctgctgtctctccccatggtcatggctggctcaggaaacctaaaggttttgcagctttgtcgcttcttacacatgaaaacgggtggtgaaatgaactatggttttcacttagcccaccacatgggcccttgggacttctatttttggggaggagggaaggtactctttgaggcacatcaaattcttccattgccgctcttctctgtgccctttatccgcacttcccaggcttcacagcactggacaaccggtatcatctccagggctctccgggcacctctatgtgctgggccgcggagcccagggctttcttagtgcctgtgggatgtgggacacaaacacggccctgctatggncctcttaggaagtttaccttacaagggcactcagtggtattgaacaaaccaaagaaggatttgatggctcctacccttcttccagaactccatcttttaaagcagattaaagtaaaaggcccaagatactgggaactgctcatagatttaagcaaaggaacacaacacttgaagtccatcctttccaaggagtggggttttatatgttaaactccgggcgggtcagctctcctacaaagaagatccaatgggatggcaaagtttgttggctcagactgttgctaacaggaactctgaagcccgggctttcaagccagaaacaatctcagcattcacttctgatccagcacttctgtcatttgctgaatatttctggcaagccaactgtgaacatgggtcagaaacaggaaaattctggatctcttttctttcagtactctatgaatgtgtttaccccagggagacccccagagatgttggcctgcatacatagcaatggatcagcttataagaagactgggagaaagagaaatgtctgagacttctgaactttggccagataaagttggtgttagagtttttcagctcccgaagccatcaggagcggctgcagaacccacccctaaagcggggggctcttttaatggaactcgggaattcccccccgttttgtaagtgcaccaattaataataccctgagacacatggcatacaagtccggggtgatatttgtgttaacgcctacctcaccgggcagcctctgagaggaatcacagcttgagcatgctggcctgcttcctcgttttccactttgtgcccagttcaacagcactgcccaccctataggactagaaagggagcacaagctttgcctgaactgctcttcaaatttaaagccagcctaaaaatgcccagtgccgagctttgcctgagattggctcctttgccttccttggaaatcccacagcccaatggtgatgtgaccgtgtctggcggtgaacctacccctgaaacgtgacttctgcacaacaaacgtgaccaaacatcaaagctaaagcaatgtttataaagttttattggtataactagggggaaatgagcctgcacaaacctcaatgtattttaaatctgttgctgtcatcattaacccggtattggacatataaaagcaagctaacactttacttttgtaaataaagtttttggtttgtttccaaaactcttgatgattgctttagttttggacttagagaatagagcaggggttgctggagtgaatattgatttttaaagtctttgaactgtggtgggtataggtgaagtgactatgcccaaaaatgccaagttttaaaagaagctatgtcataaagttttactttctgtgggcaaaagagcgctttagccatttcctcagatgtcacagttgtccccgtctaaaataagtttgtacttctgggtgaccatgccagacactcttatggaggtgatcccccttaac

SEQ ID NO: 7622 - DNA, 602 bp, Homo sapiens
  SIMILAR (600)..(409): 981254mologous to Homo sapiens KIAA1212 protein,accession number AB033038,Smith-Waterman Score=311.
  misc_feature (1)...(602): n = a,t,c or g
ttttattatttgatttggtatttaataacagttataagtacaatggtagacactgaaaaagaaaacccttaatagaaaagaaaaagacaatttaaaattagattttgttgaggggtgttataagtgcaactttatccatatgcattccttttaaggcattttcattgtccaaatatctcaacatgtacatcaaggtttatattataaaatgggctccttttgtattcattcaagacttaaagaaaaaatacatctcaggactaagtgtagcacttggcccacatgtcatgtagtgggtaatagaattaggagctttgttgctccctagacctgctttttgaatttctgctttcttgtactttgtccacattagatgctgcagtggtgttgctgtcagcagcagctggttggtgaatcaactgatataggcagtctactgtccttggtcaaaaaatcatggatgcttgtccttcgtgtagttccttcggcagttgagatcacgctgcttgcacgaggtaaagttgcataagggttactatcttttgattgtcgtgacagagaagattcttttactaattntatttttccttgagtgcctggtg

SEQ ID NO: 7623 - DNA, 1638 bp, Homo sapiens
  SIMILAR (241)..(519): 301254mologous to Dictyostelium discoideum LimA,accession number U83086,Smith-Waterman Score=102.
atggaaaatatcttatttacgtttgtgcccctggaccaagaagtagagtgctcagggattaaatgcatcttggaaaggcttccgaacgcacaatgcgataacactcccacagagccgcttgccctgatacgaatcggctcgtccccggagcttctagatagcactacttgcatcgatgtcgctctcgacactcttcgtcgacataggaaaaaatataattcgctgagagccggtgcagttaataaccaaagcaggccacaaagccacagcagtggagaatttagcctgcttcatgaccatgaggcttggtccagcagtggtagcagtccaatccagtacttgaaaagacagaccagatcaagcccagtgctccagcacaaaatatctgaaacactggagagtcgacatcacaagatcaaaactggttcccctggaagtgaagttgttactctacaacagtttttggaagaaagcaataagcttacctcagtacagataaagtcctcaagtcaagagaatcttttagatgaagtaatgaaaagttttgtctgtctcttctgactttttgggaaaagacaaaccagttagctgtggtctggccaggtcagtaagtggaaaaaccccaggggacttctatgatagacggacaactaagcctgagtttttgagacctggtcctcgaaaaactgaagatacctacttcattagttctgcgggaaaacctacaccaggcactcaaggaaaaataaaattagtaaaagaatcttctctgtcacgacaatcaaaagatagtaacccttatgcaactttacctcgtgcaagcagcgtgatctcaactgccgaaggaactacacgaaggacaagcatccatgattttttgaccaaggacagtagactgcctatatcagttgattcaccaccagctgctgctgacagcaacaccactgcagcatctagtgagtaccatttacaccagtggtcctctcatatacttgacatcccaacacatactataggttcttgtgcccaaaatgatttagctatagacatgcctgagcctctatatgcccaggctagaaactcaagaacaggaaggtcacattttctaaaccaaacttttgccactattaggatgcctagtgatgcattcggaatgttggcaaaagataagcataggaccatttactgtggcccattcatctcagccattcttatccctgaatacagaattagttagtaacataagtgggttacctcctaggccagtcatcagaataactgaccaggcttctgcctctttggataaacctgcacagaaagaaaatgaacagttttctgatcatcagaaccctagtaacagtaacctacagttttctataaatagcaacaatcttgtcacttctgcatgcctctatcctgatgacacagaagctgcattgttggtttctgaggataatcaaactgtttggtatgaatatggttgtatatgatcaaaactgcacaatataatatattgatgttatttgatatacactgcttctctaatatgatttgaaaagttgctgttaacaaaatatcatttggctaggtttttattttttatttaaaattgttgcacagtgaatcagctgtacaaca

SEQ ID NO: 7624 - DNA, 1974 bp, Homo sapiens; identical to SEQ ID NO: 6634
  SIMILAR (655)..(1233): 431254mologous to porcine endogenous retrovirus pol,accession number Y17013,Smith-Waterman Score=362.

SEQ ID NO: 7625 - DNA, 1713 bp, Homo sapiens
  SIMILAR (4)..(600): 521254mologous to Mus musculus pol protein,accession number M19005,Smith-Waterman Score=497.
atggcagttggagttttaacccagactgtgcggctctggccaaggccagtggcctatctctcaaaacaactagatggggtttccaaaggctggcccccatgtctaagggccctggcagcaatggccctgttagcacaagaagcagataaactaacccttgggcaaaacctgaatataaaggccttccatactgtggtaactttgatgaataccaaaggacatcattggctaacaaatgctagattaaccaagtaccaaagcttgctatgtgaaaatccccgcataatcactgacgtctgtaacaccctaaatcccgccaccctgctcccagtatcagagagcctggtcaagcataactgtgtagacatgttggactcagtttattctagcagacctgaccttcgggaccagccatgggcatcagcagactgggagttatacatggacgggagcaacttcatcaatccacatggagaaagatgtgcaggatatgcggtggtaactttgaacgctgtcattgaagccaaaccattgccacagggcacttcagcccagaaggctgagctcattgctttaactcgggctctagaactcagtgaagtgcatggagcattatataaggaaaagggcctgttaaactctaggggaaaggacataaaatatcaacaagaaattctacaattattagaggcagtgtggaaacctcagaaggtggcagtcatgcactgcaggggacaccagcgagcctccacctcagtggccttaggaaactcccaaactgactcagaagctcgaaaagcagcatctaccccttactgtgcatcagtagcagcccccttactccctcaaacacctgacctggtacctacctattctaaggaagaaaaagactttttccacacagaagtggggcaagtaataaaagaaggatggatcagactgccagatgggaaggtagctgtgccacagttgctgagagccacagtcgtactggccatgcatgaaaccactcttctaggtcaagagtcacttgaaaagttgttaggccggtacttctacatctcacacttgccagcccttgccaaagcagtagcacaatgcatacaagcttatggagcggctccttttgagggtcttcaggtggatttcacagaaatgccaaaatgtgaaggtaacaagtatttgctggttcttgtgtgtacttactctgggtgggtggaggcttatccaacacaaactgaaaaggcctacgaagtaacccgtgtgcttctccgagatcttattcctaggtttggactgcccttacgaattggctcacataacgggccggtgtttgtggctgacttggactgtgtggaaatcaatgtggatactggtgtcatttgggccacttggataaaaaatgaaaaggatccagtgcagcttcagaaaggaaaaagtggcccttcctgtactaagggacaatgtaaccccttagagctagtaataaccaatccccttgatcctcgctggaaaaaaggggagcgtgtgaccttaggaatcaatggggctggactggatcctcgagtaaatatcttagttcgaggagaagtttacaaacactctcctgagccagtgcttcaaactttctatgatgaactaaatgtgccagtaccagaaattccaggaaaaacaagaaatttgtttttgcaattagccaagcatgtagcctag

SEQ ID NO: 7626 - DNA, 564 bp, Homo sapiens
  SIMILAR (133)..(555): 631254mologous to Homo sapiens envelope protein,accession number M12140,Smith-Waterman Score=494.
aaactgtataatggtaccaaaaaaacagtcacttgttggagttcaaatcacacagagaggaatccatttagtaaattcccaaagttgcaaaccgtatggacccacctggagtcccaccgggactggacagcccccactggattatactggcccataaaaacaggtgaactcctgggcttccctgtctatgcgtcccacaaaaagggaagcatagctatagaaaattggaaagatgatgaatggccccctgagagactcatacaatattatggggctgctacttgggcacaagatggctcatggggatactggacccccatttacaagatcaaccaaatcatacggttacaagctgtcttagaaataatcactaataaaactggcagagccttgactgttctggcctggcaagaaactcagatgagaaatgctatctaccaaaatagattggctcttgaatacttgctagcagctgaaggaggggtctgcaggaaatttaaccttactaattgctgtctacacatagatgttcaagggcaagtagttgaagacatagagatatga

SEQ ID NO: 7627 - DNA, 642 bp, Homo sapiens
  SIMILAR (97)..(639): 371254mologous to Homo sapiens envelope protein,accession number M12140,Smith-Waterman Score=308.
atgctaagtattcagtctacacatgcagagaaagaattagagaactttttccaaaacactgaagactggtatttccacacttcacatcaccttgccacttggataaaacaaaaaagtgaaaaggatccagtccaccttcagaaaggaaaaaatggcccctcctgtaccaaaggacaatgtaaccccttagagctagtaataaccaatccccttgatccttgctggaaaaaagaggagcgtgtgaccttaggaattgatggggctggactggatcctcaagtacatatcttagttcgaggagaagtttacaaacactctcctgagccagtgtttcaaactttctgtgatgaactaaatgtgccagtaccagaaattccaggaaaaacaagaaatttgtttttgcaattagcctggcatgtagcccagtgtctcaatgtcacttcatgttatgtatgtggaagaactataataggagatcaatggccacaggaagcccaagaattagtacctacagacccagttcctgatgaattcctggctcaaaagaatcaccctgataatttctgggtcctaaaaccctcaattattggacaatattgcatagctagagaaggaaaagaattcactcaccccataggatga

SEQ ID NO: 7628 - DNA, 613 bp, Homo sapiens
  SIMILAR (14)..(268): 571254mologous to Reticuloendotheliosis virus C end of pol protein (reverse transcriptase),accession number X01455,Smith- Waterman Score=238.
catacaagcttatggagcggctccttttgagggtcttcaggtggatttcacagaaatgccaaaatgtgaaggtaacaagtatttgctggttcttgtgtgtacttactctgggtgggtggaggcttatccaacacaaactgaaaaggcctacgaagtaacccgtgtgcttctccgagatcttattcctaggtttggactgcccttacgaattggctcacataacgggccggtgtttgtggctgacttggactgtgtggaaatcaatgtggatactggtgtcatttgggccacttggataaaaaatgaaaaggatccagtgcagcttcagaaaggaaaaagtggcccttcctgtactaagggacaatgtaaccccttagagctagtaataaccaatccccttgatcctcgctggaaaaaaggggagcgtgtgaccttaggaatcaatggggctggactggatcctcgagtaaatatcttagttcgaggagaagtttacaaacactctcctgagccagtgcttcaaactttctatgatgaactaaatgtgccagtaccagaaattccaggaaaaacaagaaatttgtttttgcaattagccaagcatgtagcctag

SEQ ID NO: 7629 - DNA, 1720 bp, Homo sapiens
  SIMILAR (133)..(1089): 281254mologous to Homo sapiens envelope protein,accession number M12140,Smith-Waterman Score=247.
atgctaagtattcagtctacacatgcagagaaagaattagagaactttttccaaaacactgaagactggtatttccacacttcacatcacctttcttccctaagatttttctctgcgagggaatcaaactgctctatgaagctctatgaagaggcttatatggaaagatacagagactttctgccagcaaccatgtggtcagcccacacagaagtggatgttccaggccaggccacttggataaaacaaaaaagtgaaaaggatccagtccaccttcagaaaggaaaaaatggcccctcctgtaccaaaggacaatgtaaccccttagagctagtaataaccaatccccttgatccttgctggaaaaaagaggagcgtgtgaccttaggaattgatggggctggactggatcctcaagtacatatcttagttcgaggagaagtttacaaacactctcctgagccagtgtttcaaactttctgtgatgaactaaatgtgccagtaccagaaattccaggaaaaacaagaaatttgtttttgcaattagcctggcatgtagcccagtgtctcaatgtcacttcatgttatgtatgtggaagaactataataggagatcaatggccacaggaagcccaagaattagtacctacagacccagttcctgatgaattcctggctcaaaagaatcaccctgataatttctgggtcctaaaagccctcaattattggacaatattgcatagctagagaaggaaaagaattcactcaccccataggatgacttagttgtcggagacagaaactgtataatggtaccacaaaaacaatcacttggtgggagttcaaatcacacagagaggaatccatttagtaaattcccaaagttgcaaaccgtatggacccacctgggagtcccaccgggcttgggaacagcccccactgggatttttactgggatatgttagggcttggagcttattgacaggtttactggaccattgggcaggtagttgttgtttattgggcactatttaaaccatctttcttccctactgccccataaaaacagggcaaactccttggcttccctgtctacgcttcccgtgaaaagagaatcatagctatagaaaattggaaagatgatgaatggccgccccctgagagaatcatacaatattatgggcctgttacttgggcacaagacggcttgtggggataccagacccccatttacgtgctcaaccgaatcatacggttacaagctgccttagaaataatcactgataaaatcagcagagccttgactattctggcctggcaagaaactcagatgagaaatgctatctctcaaaatagattggctctcgactacttgctagcagctgaaggaggggtctatgggaaatttaaccttactaattgctgtctacacgtagatgatcaaggacaagtagttgaagatatagttagagataggacaaaactggcacatgtgcccgtgcaagtgtggcatgaatttgatcctggggccatgtttggaaaatggttcccagcactaggaggatttaaaactcttataataggagttttaatagtaataggaacctgcttactgctcccttgtttgctacctgtacttcttcaaatgataaaaagcttcatcgctaccttagttcaccaaaatgcttcagcccaagtgtactatgtgaatcactattga

SEQ ID NO: 7630 - DNA, 406 bp, Homo sapiens
  SIMILAR (3)..(158): 961254mologous to Homo sapiens NAD(P) transhydrogenase,accession number Z50101,Smith-Waterman Score=249.
gaacgctgattagttttatttacccagcccaaaatccagagttgctaaataaactttcccaaagaaaaactacagttctggcaatggaccaggttccaagagtcacaattgctcagggatatgatgcgctaagctccatggccaacattgcgggattctgatagttggtggtggtgttgctgggcttgcttctgcaggcgcagcaaagtcgatgggtgcaattgttcgaggatttgacacaagagctgcagctttggaacagttcaagtctcttggtgctgagcccttggaggtggacttgaaggaatctggtgagggacaaggaggatatgcaaaagagatgtccaaagagttcattgaagctgaaatgaaactctttgctcaacaatgcaaggaggtagacatc

SEQ ID NO: 7631 - DNA, 446 bp, Homo sapiens
  SIMILAR (67)..(219): 1001254mologous to Homo sapiens NAD(P) transhydrogenase,accession number Z50101,Smith-Waterman Score=280.
cctcccggcccagtgatttgccttcaaggaaactggggagtcagaaaattgggaactcatatcaacatggcaaacctattgaaaacagtggtgactggctgctcgtgtcctctacttagcaatttggggtcctgtaagggtctacgtgtgaagaaggattttttacgaacattttatactcaccaagaactgtggtgtaaagcgcctgtaaaaccaggtaaagtctcacttcagtgattgtaaatgaaaccttcaagtcataggaactaatagatctgatgattgataaaaggaaaagccatgtagttttatggcctggtgcttgtgagtgatcattttaaacaaacaacaagtaagtgctatcttgtattttccatgtactatagacgttcctgatttccagcgctaacagagaagacaaggtaatagaaaaaaaaaaaaaaaaa

SEQ ID NO: 7632 - DNA, 981 bp, Homo sapiens
  SIMILAR (232)..(675): 911254mologous to Homo sapiens NAD(P) transhydrogenase,accession number Z50101,Smith-Waterman Score=659.
atgtggaaacaactttggaactgggtaacaggcagaggctggaacagtttagagggctcagaagaagacaggaaaacgtgggaaagtttggaactccctagagacttgttgaacagctttgatcaaaatgctgataacgttatggacaatgaaatccaggctgaggtggtctcagatggagatgaggaacttgttgggaactggggcaaaggtgactcttgttatgtcttagcaaagagaatgacggcattttaccccaccctagaggtgcgagcccctatggttaatccaacattaggtgttcatgaagctgaccttttaaagacatcaggaacgctgattagttttatttacccagcccaaaatccagagttgctaaataaactttcccaaagaaaaactacagttctggcaatggaccaggttccaagagtcacaattgctcagggatatgatgcgctaagctccatggccaacattgcgggttataaggctgttgtcctagcagcaaatcattttggacgtttttttactggtcagatcacagctgctggaaaagttcctccagctaagattctgatagttggtggtggtgttgctgggcttgcttctgcaggcgcagcaaagtcgatgggtgcaattgttcgaggatttgacacaaggctgattccacttgtggttgcaactttacctccagggggcaatctgggctaccagattccttgctcaagccagcagagggagaacctcttgctcaaccatggactagctgcagctttggaacagttcaagtctcttggtgctgagcccttggaggtggacttgaaggaatctggtgagggacaaggaggatatgcaaaagagatgtccaaagagttcattgaagctgaaatgaaactctttgctcaacaatgcaaggaggtagacatccttatcagcacagcacttattccaggaaattcaaactgtggtgataaataa

SEQ ID NO: 7633 - DNA, 547 bp, Homo sapiens
  SIMILAR (64)..(2): 951254mologous to Bos taurus nicotinamide nucleotide transhydrogenase,accession number L02543,Smith-Waterman Score=96.
  misc_feature (1)...(547): n = a,t,c or g
ctcttgtgtcaaatcctcgaacaattgcacccatcgactttgctgcgcctgcagatagcaagcccagcaacaccaccaccaactatcagaatctagaagacagacccagttatgtgttaaggctcattatcaactaataatgaaaaatcatcagctaacaattattggtgcctagtataagtttagcatcaataaatggcggtgcagatggtgataatgatgatcagcccttagtaactgtatgggagtacataggactattctttaactggaaccaccactggatcttggaaatttttattcaaggaaacaactggctaggccaaaggccaacaacaattcactaaaaataggcctaataattcaggaatatccgtgttaaaacttaccttaaggcatgatncagcattacgtatgttggagggtttaacaggttcttttccactgtcttaaaagttccttcttacttaaagtcccgtgtgggccttcttaactacctttaccctatccaattntaggggtttttctttggttcctccaacctctt

SEQ ID NO: 7634 - DNA, 408 bp, Homo sapiens
  SIMILAR (170)..(235): 401254mologous to Homo sapiens metallothionein old gene name 'MT2',accession number M26637,Smith-Waterman Score=37.
tttcgtccgccccagctttcttcccgccaggtccccttcacccgatcgccgcgcgctctccgaaccaaaaggcgacctcacgaaatgcccctttgagctcaaaggctagttacccccaggggcccttccactctcggggacaggcgaaacctctttgtctctgcctcggcctgcggcccccagcccagcctccgcgctttccctccgccagtccttgtcaatcaaacctggtgccaaacgcggcagctgaagttttcagggacacatttgcttctccccttgaagaaccagttacaaagcgtgatgtcctctctggggtcccatcagaacaaagaaacagggaagcagcggaatacaagagactgaactgtatctgcctctgtttccaaaagattcacgttcaacttt

SEQ ID NO: 7635 - DNA, 2572 bp, Homo sapiens
  SIMILAR (911)..(2197): 631254mologous to Homo sapiens NAD(P) transhydrogenase,accession number Z50101,Smith-Waterman Score=1195.
atggccaagtccaagaaccacactacacacaaccagtcccgaaaatggcacagaaatggtatcaagaaaccccgatcacaaagatacgaatctcttaagggggtggaccccaagttcctgaggaacatgcactttgccaagaagcacaacaagaagggcctaaagaagatgcaggccaacaatgccaaggccatgagtgcacgtgcccaggctatcaaggccctcgtaaagcccaaggaggttaagcccaagatcccaaagggtgtcagccgcaagctcgatccacttgcctacattgcccaccccaagcttgggaagcgtgtttgtgcctgtattgccaaggggcccaggctgtgctggccaaaggccaaggccaaggatcaaaccaaggcccaggctgcagctccagcttcagttccagctcaggctcccaaaggtaaaaaagctccagttttatttaataaagaaatgattgagtcaatgaaggaaggttcagttgttgtggatttagctgctgaggctggtggaaactttgaaaccactaagccaggagaactctacattcataagggaattactcacataggctacacagacctgcccagccgaatggccactcaggccagcaccctatattccaacaacatcaccaaactcctgaaggccatcagcccggacaaagataatttttattttgatgtgaaagatgactttgactttggtacgatgggtcatgtcattagaggaactgtagtgatgaaagatggtaaagtagattttcccagctcccacaccgaaaaatattcctcaaggtgccccagtaaaacagaagacagtggctgagctggaagctgaaaaagcagctaccattacacccttcaggaagacaatgtcaacggcttctgcatatacagcaggtctcacagggatactgggtttgggcattgcggctcccaatctagccttttctcagatggtgaccacttttggcttggctggcattgtggggtatcataccgtctggggagtgacccctgctctccactcaccactgatgtctgtgacaaatgcaatctcagggctgactgcagttggtgggttggcactgatgggaggacatttgtatccttccacaacttctcagggccttgctgctcttgctgcattcatatcctctgtcaacattgcaggtggctttctggtgactcagagaatgctggacatgttcaagcgtcccactgaccccccagaatacaactacctgtacctgctccctgccggcacctttgttggtggatatttagctgccctctacagtggttataacattgaacagggaacagcacgtcttggcaatgcactgggcatgattggggttgctggaggactggcagccaccctcggagtcctaaaaccgggcccagaattactagctcagatgtctggagcgatggctttgggtggtaccattggattgacaattgccaaacgcatccagatttctgatttacctcaattagttgctgcttttcacagtttagtgggtttggcagctgtacttacttgcatagctgagtacattatagaatatccacattttgctacggatgcagcagcaaatctcaccaagattgtggcctacctcggcacttacattggtggcgtcacctttagtgggtctctcattgcctatggaaaattgcagggtctcctgaaatctgcccctctcctactgcctggaaggcacttactcaatgcaggcttactggctgctagtgtgggcgggataatcccattcatggtggacccaagctttactactggcatcacctgtctgggttcagtgtctgctctctctgctgtcatgggtgtgactttgacagctgctattgggggtgctgacatgcccgtcgttatcactgtgctgaacagctactcaggctgggccctgtgtgcagagggcttcctgctcaacaacaatctgctgaccatcgtgggtgcactcataggctcgtctggtgctatcctgtcatacatcatgtgtgtggaaaacttcagaacaatttctgctctgagggtcattcaagagtcagatacatcatcaggggacccaggcaaaggctcaggacataaaccagtaaagatttcacaaacactatcctgggtccggggtttgtctgatctgcatgcacctccagaaaccaaccacaggcctcattcctacacttacagatgctcccattgcctgagccctgccgaaacccccatatcagactcctacctgtctgcttcatctagccgctctggggggatgcggttatctggagagacgagctcacctatcacctgggttaacagaggacagaaagaaaaacacatttggaaggcttgttttccccaacaagctcacagatctgatgccaatcaattctttgtccttgggtttatattagccaggttttttgttgtgggggaagctactggaggagagtttctcctctttcatagcctcatgacaaagcaaattctaattctccacagcacctcagagaaagtgaggctccttcactag

SEQ ID NO: 7636 - DNA, 4651 bp, Homo sapiens
  SIMILAR (2648)..(3442): 831254mologous to Homo sapiens NAD(P) transhydrogenase,accession number Z50101,Smith-Waterman Score=1069.
ggcgcatcgccgcggtgcccaagcccgggtctgccagctctgacgtcctctcgcggccctcatggcacagcccaaggctgtcatcctcccggcccagtgatttgcctttaaggaaactggggagccagaaaattgggaactcatatcaacatggcaaacctattgaaaacagtggcgactggctgctcgtgtcctttacttaacaatttggggtcctgtaagggtctacgtgtgaagaaggattttttacgaacattttatactcaccaagaactgtggtgtaaagcgcctgttaaaccaggaattccatataagcaactgactgttggagtccccaaagagatattccaaaatgagaagcgagtggcattgtctcctgctggtgttcagaacttggtcaagcagggttttaatgttgtcgtggaatcgggtgcgggcgaagcttccaagttctcagatgatcactatagagtggcaggtgcccaaatccaaggggcaaaggaagtgctggcttctgatttggtggtcaaagtgcgagcccctatggttaatccaacattaggtgttcatgaagctgaccttttaaagacatcaggaacgctgattagttttatttacccagcccaaaatccagagttgctaaataaactttcccaaagaaaaactacagttctggcaatggaccaggttccaagagtcacaattgctcagggatatgatgcgctaagctccatggccaacattgcgggttataaggctgttgtcctagcagcaaatcattttggacgtttttttactggtcagatcacagctgctggaaaagttcctccagctaagattctgatagttggtggtggtgttgctgggcttgcttctgcaggcgcagcaaagtcgatgggtgcaattgttcgaggatttgacacaagagctgcagctttggaacagttcaagtctcttggtgctgagcccttggaggtggacttgaaggaatctggtgagggacaaggaggatatgcaaaagagatgtccaaagagttcattgaagctgaaatgaaactctttgctcaacaatgcaaggaggtagacatccttatcagcacagcacttattccaggtaaaaaagctccagttttatttaataaagaaatgattgagtcaatgaaggaaggttcagttgttgtggatttagctgctgaggctggtggaaactttgaaaccactaagccaggagaactctacattcataagggaattactcacataggctacacagacctgcccagccgaatggccactcaggccagcaccctatattccaacaacatcaccaaactcctgaaggccatcagcccggacaaagataatttttattttgatgtgaaagatgactttgactttggtacgatgggtcatgtcattagaggaactgtagtgatgaaagatggtaaagtgattttcccagctcccacaccgaaaaatattcctcaaggtgccccagtaaaacagaagacagtggctgagctggaagctgaaaaagcagctaccattacacccttcaggaagacaatgtcaacggcttctgcatatacagcaggtctcacagggatactgggtttgggcattgcggctcccaatctagccttttctcagatggtgaccacttttggcttggctggcattgtggggtatcataccgtctggggagtgacccctgctctccactcaccactgatgtctgtgacaaatgcaatctcagggctgactgcagttggtgggttggcactgatgggaggacatttgtatccttccacaacttctcagggccttgctgctcttgctgcattcatatcctctgtcaacattgcaggtggctttctggtgactcagagaatgctggacatgttcaagcgtcccactgaccccccagaatacaactacctgtacctgctccctgccggcacctttgttggtggatatttagacgaccctctgacagtggttataacattgaacagatcatgttacctaggctcgggtttgtgctgtgtcggtgccttggctggcctctccacccagggaacagcacgtcttgggcaatgcactgggcatgattggggttgctggaggactggcagccaccctcggagtcctaaaaccgggcccagaattactagctcagatgtctgggagcgatggctttggggtgggtaccattgggatttgacaatttgccaaacgcatccagattttcttgattttacctcaattagtttgctgctttttcacagtttagtggggttttggcagctgttacttaactttgcatagctgagttacattatagaatatccacattttgctacggatgcagcagcaaatctcaccaagattgtggcctacctcggcacttacattggtggcgtcacctttagtgggtctctcattgcctatggaaaattgcagggtctcctgaaatctgcccctctcctactgcctggaaggcacttactcaatgcaggcttactggctgctagtgtgggcgggataatcccattcatggtggacccaagctttactactggcatcacctgtctgggttcagtgtctgctctctctgctgtcatgggtgtgactttgacagctgctattggggggtgctgacatgcccgtcgttatcactgtgctgaacagctactcaggctgggccctgtgtgcagagggcttcctgctcaacaacaatctgctgaccatcgtgggtgcactcataggctcgtctggtgctatcctgtcatacatcatgtgtgtggcagggaatcgctccctggctaatgtgattcttggaggctatcgcaccacttcaacagctggtggaaaacccatggaaatttctggcacacatacggaaatcaaccttgacaatgcaattgacatgattcgagaagctaatagcattattattacaccaggctatggtctctgtgcagccaaagctcaataccccattgctgatttggtaaagatgctcactgagcaaggcaaaaaagtcaggtttggaattcacccagttgcgggccgaatgcctggtcagcttaatgtgctgctggctgaggctggtgtgccatatgacattgtgttggaaatggatgagatcaaccatgattttccagatactgatttggtccttgtaattggagctaaggacactgctaattacaacagctcaaggaagatcccaactctatttattggcagggcatgccagtccttggaggtctgaaaatcaaagcaggtgattgttatgaagaggtctttgggtgttggctatgctggcagtgggacaatcccaatcttctacaaacctaacacggccatgcttcttaggtgatgccaagaaaacatgtgacgcgctccggggaaaagtttaggagaatcctttcagaagttaattttaagggttcaagctgtttagctaattattgccacctttgcagttttgggaacaggcaaataaagtatcagtatacatgggtgatgtacatctgtagcaaaagctcttggagcaaaatgaagacttgaagaaagcaaagcaaaaactgtatagagagatttttcaaaagcagtaatccctcaatttttaaaaaaaggattgaaaattctaaatgtctttcctgtgcatattttttgtgttaggaatcaaaagtattttataaaaggagaaagaacagcctcattttagatgtagtcctgttggattttttatgcctcctcagtaaccagaaatgttttaaaaaactaagtgtttaggatttcaagacaacattatacatggctctgaaatatctgacacaatgtaaacattgcaggcacctgcattttatgttttttttttccaacaaatgtgactaatttgaaacttttatggaacttctgaggctgtccccttggcaattgcaacccgcagtttgaatttaatcatatcaaatcagttttaattttttaaattgtaccttccagagtcctatatttccaagggcacattttcttcactactaattttaaatacattaaaggcctaaataatctttcagagatgctggaaacaaatccatttgcctttatatgtttcattagaataccaatgaaacatacaacctggaaaattagtaaatagtatttttgaagatccccatttcctaattggagatctcctttaatttcgatcaacttataatgtgtagtacctatattaagtgcacttgagtggaattcaacatttgacctaataaaatgagttcatcatgttggccaagtgatgtggcaattatctctggtgacaaaagagtaaaatcaaatatttcctgccctgttaccaaatatccaaggaagaccctgctactatgaaatagatgacattaatctgtcttcactgtttataatacggatggattttttttcaaatccagtgtgtgttttgaggtcttatgtaattgatgacatttgagagaaatggtggttttttttagctaccctctttgttcatttaagcaccagtaaagatcatgtctttttatagaagggtagattttctttgtgactttgctatcgtgcctaaagctctaaatataggtgaatgtgtgatgaatactcaaaa

SEQ ID NO: 7637 - DNA, 378 bp, Homo sapiens
  SIMILAR (6)..(131): 381254mologous to Pseudorabies virus EP0,accession number U27486,Smith-Waterman Score=63.
  misc_feature (1)...(378): n = a,t,c or g
ggaattccccgccaccatccaatcaaatcgggcgaggggcgcgaagcccgggagacgcgtagaccgcggcccccaggcccggtgttttgacgtcggcggctgcccgcgttccgcgccgagtaacggtcttcggaattcagagccttcgccttagggaaggtgggacggtcgccagtttctccagcactttcttcgtccagggacgtcaacctcccttgcatgctgtcctcagggactgacagcggggcctgctcagaagttctcgtcgggactctctacaggcctttgtgattaagtgctaggggtgaggagagacgtggcttatttatgtgtttttcagtttgttatgannnnnnnnnnnnaattttacttcccccg

SEQ ID NO: 7638 - DNA, 522 bp, Homo sapiens
  SIMILAR (505)..(401): 441254mologous to Homo sapiens HSPC081,accession number AF161344,Smith-Waterman Score=70.
tcattcacagtgtctggaatatgttaagctccggatgtaaggctggtaagtagcgcttccacatgagctccctttctgcctctccaccaccgagacgcttatggacccagatgaacacgcaatgccttgtcttttccgcttctcatctccccagatgtcaagagatgttgttccagggaacagtctgagaaaagccccattctcctcgctgcttctcacctgccaagaagccccggcccgcaggtgcccctgctgcttcgcacaaatgcaggtgaccccatgaccagggcctccctcggagcccacagttcttctgacaaagccccgcttgttggaaacgctgagtctcagagagtcgccagtccttctggccccccagctccctgctctccagttgtgctggccaggaacatacaaggccattcccgcctctgggactgttgctcctactcctctgtctgctgggaccactgacatgacaaggctctgcccactctccctggagtttctgctcaatgacat

SEQ ID NO: 7639 - DNA, 1101 bp, Homo sapiens
  SIMILAR (611)..(291): 341254mologous to Helicoverpa armigera nuclear polyhedrosis virus basic DNA-binding protein BDBP,accession number AF197913,Smith-Waterman Score=100.
  misc_feature (1)...(1101): n = a,t,c or g
ctagggctggggccgggcggagtgagcgggccgtcgcagaggagagctgaggcggcctgagcggcagctgcggccggcacaaccccgggcagtcgcggctccagaggcgtccttctcaggatgttgaacttgaagactgttgccgcggttgttgaagcggaagcctttggcttcggacgttgcgcccgaagagacccgcccccttcggcggcttctcagttccggcttcttccgcggcttcaattccgaccggaagcgcggttgttcagcccgggccccttccgggcccaacgggcaaaagcccacccgtttttgcagggtccggcccttccagcaatccccaaccggctttttcccaatatgcggacgcgcgacggttcgaagcccggttccgcccctttgcccccttgacgcctccgttggaacccccggccggccttcgcgccccttcttcgggggtctccccgcttcttcccgccaccatccaatcaaatcgggcgagggcgcgaagcccgggagacgcgtaggccgcgcctcccaggcccggtgttttgacgtcggcggtgccgcttccgcgccgagtaacggtcttcggaattcangagccttcgcccctgctgttcgcacaaatgcagtgaccccatgaccagggcctccctcggagcccacagttcttctgacaaagccccgcttgttggaaacgctgagtctcagagagtcgccagtcccatggtgggtgaaatttgaacccatgtcgttgagagacacggcggcttttaaggcaaggataacctggaaatcagccgccaatatttcgaagccatcggccgtatccaagagccgcctcgcgagtggagcgctaggattcaggtccagatctgactgggaagttccgcagggaattccgccccggacccctggagacccacatcgtccggtgtgttttcctttcacaacacttcccacagccactggattctcaggctccgcactcaggaaaggttcagcgaggtttgtgttcagggaacttagggaagaaagggccactgtcccacctcttttcttagggaatttccggggggaaagattttcatcctccat

SEQ ID NO: 7640 - DNA, 237 bp, Homo sapiens
  SIMILAR (3)..(236): 331254mologous to Saccharomyces cerevisiae Ydr438wp; CAI: 0.11,accession number U33007,Smith-Waterman Score=77.
cccccaaaaagtctcgtgtgaggttcagtaatatcatggagattcgacagcttccgtcaagtcatgcattggaagcaaagttgtctcgcatgtcatatcctgtgaaagaacaagaatccatactgaaaactgtggggaaacttactgcaactcaatggtttttggcaaatttgtcatatcaagaagcactttcagacacacaagttgctatagttaatattttatcttcaacttccg

SEQ ID NO: 7641 - DNA, 186 bp, Homo sapiens
  SIMILAR (182)..(96): 371254mologous to Homo sapiens lambda 1 immunoglobin light chain variable region,accession number AF124168,Smith-Waterman Score=50.
cacaaccacaggaactctgagagtactgttccaataaggccattaatgataatgcacattaatactactttattgggaaactcgaagtcctcaaatccagtataatgaagtaaaaagaaacctactgtgtctcttccagcaggtttttcagaccctgccaggtttaccagtacaacgcctccaatg

SEQ ID NO: 7642 - DNA, 2375 bp, Homo sapiens
  SIMILAR (389)..(568): 291254mologous to Arabidopsis thaliana putative integral membrane protein,accession number AC012395,Smith-Waterman Score=69.
  misc_feature (1)...(2375): n = a,t,c or g
caagaatccatactgaaaactgtggggaaacttactgcaactcaagtagcgaaaattagcnnnnnnnnnngctttggggggtttttggcaaatttgtcatatcaagaagcactttcagacacacaagttgctatagttaatattttatcttcaacttccggactttttaccttaatccttgctgcagtatttccaagtaacagtggagatagatttaccctttcgtgagaactattagctgtgattttaagcattggaggcgttggactggtaaacctggcagggtctgaaaaacctgctggaagagacacagtaggttccatttggtctcttgctggagccatgctctatgctgtctatattgttatgattaagagaaaagtagatagagaagacaagttggatattccaatgttcctttggttttgcaggtttgtttaatctgctgctcttatggccaggtttctttttacttcattatactggatttgaggacttcgagtttcccaataaagtagtattaatgtgcattatcattaatggccttattggaacagtactctcagaggttcctgtggttgtggggctgctttcttacctcatcattgataggcacacttgcactaagccttacaatacctctgtccataatagctgacatgtgtatgcaaaaggtgcagttttcttggttattttttgcaggagctatccctgtatttttttcattttttattgtaactctcctatgccattataataattgggatcctgtgatggtgggaatcagaagaatatttgcttttatatgcagaaaacatcgaattcagagagttccagaagacagcgaacagtgtgagagtctcatttctatgcacagtgtttctcaggaggatggagctagttagctgtctgttgtctgtagcccagcttgataatggaactatacagccgaagagacaatctctggcaagtttttgtagaaaaaatgtttcagtgcctagtctgaaaaataacagtttgagttctttgaaactctaaaatatatttttctcatacctgttttcttcattttcataatgaagcactttgctatgtagctgtgtacatatcactacagttataggaagtttcagtctacagtccatccaaaggaccaacctgccttacacatctcaagggattcagcttgttgaaatcatttgaactaatcaaggaataaatcctaatgttctggggactttattttcacatgttaaatgctgggaatatattatggaaaatgtttttcaaggaaatcacttaagtgttcataggaccagtatttctggacaggtaaaatgctaaaataagctacctgtaataagtgtggattatatttttgggttttgtagaatattgcaaattaacccaccaccaaaaaaatgtttaatttatgccaaccaaggcatggtttggtgcaaaatttccatgggacttttaaaaaaggaataagtatttgagaaatattctgggttccctcacactacatttacctgtattattcctttatagcattagggtgccctgtattttaaaatcctgtgacaaaccatggcaaatttttaaaggggaagtattattataaaatgaagaaatatgtatttctaaaggctatattgctgtaaacttaattgataaagctctgtttaatttagagttttgaagaaatagtctcccttcaattaagaaattttcataatggaatgatttaaattgaagtgacaaagagtattattaaaatacaatgtttatacgtctatttgtgtactgtagatgtatcaagtgatttctaatttttttcacatatgaatgtgccagattactctagaactagatgtctcttctttaaataattttagttttcctggaataaatttgtaatggttaaagtaccaagtaagtaaggcgagaagggattctgtttttaaaatcacatcagaacttttcctctactaagattataaattaaatgtaaaatactcctaattgcaattcttaaacttaggccttacatgtacttattatgcaactgcttctggactttatttcaccatagatatcagtaaacgtatgtcccaggattcacaggcttttgattaatcaatattcttttcaagtttgctgtgaagagtttagttctcttcaaaatttcttaactaatctgatttttaggaattctctttgcagtgtttagcttcctattcacattcttaaaattgctttggtgttaccatgagtctaaaatgaagtttagccttccttttgtttcattctgagaacttctatattatattacctttaaaaattgtttatgatattaaatttaaaatacaaac

SEQ ID NO: 7643 - DNA, 422 bp, Homo sapiens
  SIMILAR (1)..(198): 1001254mologous to Homo sapiens phospholipid transfer protein,accession number L26232,Smith-Waterman Score=334.
ttcctagcgctgctggcaggcgcacatgcagagttcccaggctgcaagatccgcgtcacctccaaggcgctggagctggtgaagcaggaggggctgcgctttctggagcaagagctggagactatcaccattccggacctgcggggcaaagaaggccacttctactacaacatctctgaggtgaaggtcacagagctgcccccacaccgtccacagcagctgtctgagccctcaatccccaagctggcagctgtcattcaggaccccaacccctctcagcccctcttttcccacattcatagcctgtagtgccccctctaacccccagtgccacagagaagacgggatttgaagctgtacccaatttaattccataatcaatctatcaattacagtccgtccaccaccaaaaaaaaaaaaaa

SEQ ID NO: 7644 - DNA, 500 bp, Homo sapiens
  SIMILAR (158)..(313): 551254mologous to Homo sapiens phospholipid transfer protein,accession number L26232,Smith-Waterman Score=104.
agttcccaggctgcaagatccgcgtcacctccaaggcgctggagctggtgaagcaggaggggctgcgctttctggagcaagagctggagactatcaccattccggacctgcggggcaaagaaggccacttctactacaacatctctgaggtgaaggtcacagagctgcaactgacatcttccgagctcgatttccagccacagcaggagctgatgcttcaaatcaccaatgcctccttggggctgcgcttccgaagaaccggcctgctgatgtcagggcgtccactgcccccacaccgtccacagcagctgtctgagccctcaatccccaagctggcagctgtcattcaggaccccaacccctctcagcccctcttttcccacattcatagcctgtagtgccccctctaacccccagtgccacagagaagacgggatttgaagctgtacccaatttaattccataatcaatctatcaattacagtccgtccaccaccaaa

SEQ ID NO: 7645 - DNA, 963 bp, Homo sapiens
  SIMILAR (715)..(954): 971254mologous to Homo sapiens phospholipid transfer protein,accession number L26232,Smith-Waterman Score=397.
atgagtgaggccacgtcagtggttgatgtcgaccctggccctaggcccattgatatgactggtcatgtgtctgcagaacggagccccccacctgatgggcagtggggcagtcagctcctggcgcggcagctgcaagatttctggaagaagtcccggaacaccttggcaccccagcggctgctcttcgaagtgaccagcgctaacgttgtcaaggacccgccctccaatacgtggtttgtcgatagcaccgtaatgttgaataccacagacgatcgtttaaggagcaatcttagactcaagtacagaagccatctgacaggaaatagactacagtcgcagaagtgtgaccgccgggggcgatggcgctcccggctcctgcaccggctgcggcacgccttggccggcgacggccccggggaggcggcggccagtccagaggccgagcagtttccggagagctcagagctggaggacgacgacgccgagggcctgtcctcccgactcagcggcaccctcagcttcaccagcgccgaggacgacgaggacgacgaggacgaggacgacgaggaggctggccctgaccagctgcccctcggggatgggacatggaggaagggggccatgacccaagttattaaaaattttaagacagtgacggcagagccttacaccaagctcatggctttcctgaatgtggggggctgtgcagccgtgcagggggccttcttccccctgactgagaggaactggagcctggggaaccgggcagtggagccccagctgcaggaggaagagcggatggtgtatgtggccttctctgagttcttcttcgactctgccatggagagctacttccgggcgggggccctgcagctgttgctggtgggggacaaggtgccccacgacctggacatgctgctgagggccacctactttgggagcattgtcctgctgctgctgtga

SEQ ID NO: 7646 - DNA, 1497 bp, Homo sapiens
  SIMILAR (1124)..(1219): 281254mologous to Homo sapiens phospholipid transfer protein,accession number L26232,Smith-Waterman Score=43.
gcaagatccgcgtcacctccaaggcgctggagctgggtaaggcgcaggggcagacagggacggacgggagcggacggggttggggtcgccccaacagtgggggcaaagaaggccacttctactacaacatctctgagtaagtggggggcggggcctcgcgatccggggcggggcctcggcggtggaggcggggcccgagaatgcttcaaatcaccaatgcctccttggggctgcgcttccggagacagctgctctactggttcttgtaaggacccagcaccctcaggggagtggagagtgggtcaggagggctggaggtgctgtggggctcccgggatcccgctggacggatgaaagtgtccaatgtctcctgccaggcctctgtctccagaatgcacgcggccttcgggggaaccttcaagtaagccccagccccaaccccagctcacccttttcgagccccacagctcatctgcctagcgcaagtgtgggcagcgacaggtcgcagggtggcaagggtgggcatgctctcactttgagaaggccctggtgagttggtggcgggtgagtctgggtgtgcagctgtcatgcagcacctcagagcaggccccttccgagccctgctgttcaccagcaacctggacatggacttccgggtgagctgcttgggctggtgtatgacctctgacttcctaacaagacctctttctctgctaagtttgcaggaggaagagcggatggtgtatgtggccttctctgagttcttcttcgactctgccatggagagctacttccgggcgggggccctgcagctgttgctggtgggggacaaggtatgtcatggcctgtttgtgggatgggcaagagaaggtctgtgacagagctcactccctcactgtgctggcgggggcagggatagggccacctgcacaccagtgagaccaaggaggggtgcagccatcaagccctctggcaccaccatctctgtcactgctagcgtcaccattgccctggtcccaccagaccagcctgaggtccagctgtccagcatgactatggtacgggtcccagagtgggggctgctggctgggggtcagggaaaaatgggctgtgggttactgagcaggtaggcaggcgcacttccctgcacctcagtgattggaggacaatcacacctgtccacagggatgggctgggctgggttcgtgagatcctgaccctcaccatccccccgtaaggctggggtgtgaggatggaggaagaaaggaggggtgaactgggcgggcccagactgagcgacgaaccatgcggtgagtgggggcaggatggggaaggagggagggccttcccctctctctatagctccccagtgccaccggcctgctgatgtcagggcgtccactgcccccacaccgtccacagcagctgtctgagccctcaatccccaagctggcagctgtcattcaggaccccaacccctctcagcccctcttttcc

SEQ ID NO: 7647 - DNA, 725 bp, Homo sapiens
  SIMILAR (2)..(358): 511254mologous to Homo sapiens Mammalian phospholipid transfer protein,accession number R79382,Smith-Waterman Score=186.
gatggctctccgggggaaggccctgcgcacgacatcggacctgcgcaggttccgaatctattccaaccattctgcaacttggaagtcgctggcttctgaatcccattacaggcccctctgaaaaaccatgctgccagaattggggtgaatgccccaatgctcaaatgagcggaccctggcgtgggggtgcaagatccccactaccctgagggcatcaaactttgtgccatgaaggtggtgacgaacccatgcgggattccctcacccatcggggcttgatctcccacttttgccaaagggctgcgagaggtgattgagaagaaccggcctcgctgatgtcagggcgtcccactgcccccacaccgtcccacagcagctgtctgagcccttaatccccaagctgggcagctgttcatttcagggaccccaacccctcttcagcccctcttttcccacatttcatagcctgttagttgccccctctaaacccccagtgccacagagaagacgggatttgaaagctgtacccaattttaattccataatcaatctatcaattacaagtccgtccaccacctccctgtgggctgtcctgagctctgttgggtttcctgggatggaatcagtgcatcataaagggcattctttaagcagagaaggggccaggccaccccattcaggaactgctgcgggaataaagtgctaacttgcccccaggaaacaaa

SEQ ID NO: 7648 - DNA, 189 bp, Homo sapiens
  SIMILAR (47)..(172): 401254mologous to Homo sapiens exosome component Rrp46,accession number AF281134,Smith-Waterman Score=74.
tcaccacgatccctgctctggtggagcccccgtgcggaacacaggatccgaagatggcagcggaagctccgcagcggccccaaaagcgacactccaatctctccggtcttccaaggccttgctcagtcgtcctgccgggcgggccctgaggatgcaagggacggaggaagtttcgtgcgtgcgcccttc

SEQ ID NO: 7649 - DNA, 1599 bp, Homo sapiens
  SIMILAR (1557)..(1): 1001254mologous to Homo sapiens PDZ domain containing- protein; PDZK1,accession number AF012281,Smith-Waterman Score=2669.
catctctgtatcttcagaattggaagaagaatgtgaggctgtactgtgggcccgttcttttgccatgtgcgagtcatggtttgactccaccactattccttctttagaatctggaggggtgtcaagtggatcagccagggaggaaacaatagggattttcttagcttggaaataatcataggccttctttccacagactagaagtgtgacattcttcccactgctctggattctatccaccaccttctcatagggttcatctagcacattcaccccattcacttcaatgatgacatcctcatcctctagcccagccaagtcagcaggaccgcccttctgtacctctttgatgaatgagcctggcagaccccgaatcgcatttaagtgaaagccatagccattttcacctttagccagcctgcagagtttaggcttatgatctacttcctctgtagtatctggtggacttgagacttccagagaagtgggagtaggagctggagcctccttgacagagccattgggcagttcttgactttgatagtagagaaatggagaaaaatgagccagtctgtacatgttgtccgtctctttgtctaccaccaacagtgaagtctgatctccaccctttctaatcatttctaccacactgtcatgatccagggtttccacagactcgccgttgacagcaactaccagatcattgttcttcaagccagcctcctctgctggacttccagaatctatgtccttgatgatttgacctttctgttctgagcctgccctcagatagaaaccatagccattgcttcctttcttcatctccacaattcggggctggtggggtaacagtttcaaactggctgtttctcttttgaattgtatcttctgctcaacatgacgcttgtcagtttctttgtccaccagcaggaacatgacacggcttcctgacttcttcaccttttcaaccactttctcatggctggcatcctctacattctctccattcacttcaatcaagtgatcatcagccagaactccagctctcatagccacaccttgaggtgtaatatcagtcatgtacaccccctttttaccttggacagttttcagagagaagccatagctgcctccttccttcacgagatagcagagccggggctgggtccaagtttgcacacctccattcatcacaggggaaagtatattatcactcaaaccttgctccttctgactttgacccaactctttcaagtccacccgtgttttcactgctttctcataggaatccccatccagaactagtaaagtcactgaattcccactctttctgaccagatccacaacctgcatatgttcttctttgtccacaaagacaccattgatcctaagaactctgtctccatcttgaaggccagccttctctgctgggctacacttctcaaccacccggaccaggtggccctcggtgtccttctcaattcgcaggaagaagccatagttttgcccttcttgcttggacagtttacattctcgggggttgaaggtggaggtcatttctggagatggaagaggacctgctctgttcgttcactcagg

SEQ ID NO: 7650 - DNA, 780 bp, Homo sapiens
ctcctagcttggcacgaggggcaaaggcctctttctgctgagacaaagtgatttggagagtcacctggcccctgaagggggagtggtaggatccagccacccagtgtgcagtgaattggagcagggatctcagcacacagggaggtggggaggctccccctaacctcgggcacctgttgctcctccagactgcagcgcatgctcttagctcatcctcttaactggctctcaccgtgctcctggctttggtcaccacgtagctctcactccagcttcaggtagccatcagtaggacctggcaatatacactgatttggtttgttttatgtttgtctgcaggtgaaatccctaagggctctgccgtgtactccagccttgtgacccttgccttccaggaaccatgcaagaagcgcagccaccagaagtccttaaaacagcaggaaagaactacaagtttataggacatggatttcagtgccctcatctggccaagcatcttcagctgccaatgcccaagtgtcttcctggtagtacacatgaagatgtcccgctctcccctgctcaaggagagagtgcctgacctgagctgggcccatcagatccagtacttacctggaataggaaaacgatggggagggtgaccaaagattgcaaaaatctttgaagcttatctacttgagagagagtccctgaagatactggcctctcattcctgctatgtatatccaatgtgactgaactctgaataaaatatacaagttctaaaaaaaaaaaaaaaaa

SEQ ID NO: 7651 - DNA, 1246 bp, Homo sapiens
  SIMILAR (1056)..(1163): 331254mologous to Homo sapiens unnamed protein product,accession number AK000726,Smith-Waterman Score=40.
tcctcagggccctcccagcaggacgactgagcaaggccttggaagaccggagagattggagcggtaagtcgcgctggtcacgttggacacctgcgcgttgggagattctggagccagaaggatagccgaatggccttcgcccgccctgcccctcgcctgcttcagaaacccccggaaacgccccggtctgcgacccgggttcgagcagccagggggctcaagggaagctgaacgcctggtgggctcccgggatggctcttcccgttctttgcacagccttcacccagtgagggagcctgtgccctccctgcccagtcgcttttggggccgctgcggagcttccgctgccatctttcggatcctgtgttccgcacgggggctccaccagggcagggatcgtggcaatataaagtcctggttcacgctcaggaacgagagctgacccagttaagggagaagttgcgggaagggagagatgcctcccgctcattgaatgagcatctccaggccctcctcactccggatgagccggacaagtcccaggggcaggacctccaagaacagctggctgaggggtgtagactggcacagcaccttgtccaaaagctcagcccagaaaatgacaacgatgacgatgaagatgttcaagttgagttggctgagaaagtgcagaaatcgtctgcccccagggagatgcagaaggctgaagaaaaggaagtccctgaggactcacaggaggaatgtgccatcacttattcaaatagccatggcccttatgactccaaccagccacataggaaaaccaaaatcacatttgaggaagacaaagtcgactcaactctgattggctcatcctctcatgttgaatgggaggatgctgtacacattattccagaaaatgaaagtgatgatgaggaagaggaagaaaaagggccagtgtctcccagaagcccgaggaaacgccctcgtccgcgacccgagccgccgcctcgaggctcaggggaagctgaacgctcggtgggctcctgggatgcatcttcgcgttctttgcgccgccttcacccactgagggagcctgtgcccaccctgcccagtcgctttcggggccgctgcggagcttccgctgccatcttcggatcctgtgtcccgcacgggggctccaccagggcagggatgatgggtagcaaggaagtcggcaaaggcggcgaccctggcgaggaaacttccccagtagctttgttcagcg

SEQ ID NO: 7652 - DNA, 6697 bp, Homo sapiens
  SIMILAR (3)..(5309): 961254mologous to Homo sapiens Human phosphodiesterase interacting protein, myomegalin,accession number Y71159,Smith- Waterman Score=8439.
tgttgcttgagaaacttcgccagcgaatacatgataaagctgttgctctggagcgggctatagatgaaaaattctctgctctagaagagaaagaaaaagaactgcgccagcttcgtcttgctgtgagagagcgagatcatgacttagagagactgcgcgatgtcctctcctccaatgaagctactatgcaaagtatggagagtctcctgagggccaaaggcctggaagtggaacagttatctactacctgtcaaaacctccagtggctgaaagaagaaatggaaaccaaatttagccgttggcagaaggaacaagagagtatcattcagcagttacagacgtctcttcatgataggaacaaagaagtggaggatcttagtgcaacactgctctgcaaacttggaccagggcagagtgagatagcagaggagctgtgccagcgtctacagcgaaaggaaaggatgctgcaggaccttctaagtgatcgaaataaacaagtgctggaacatgaaatggagattcaaggcctgcttcagtctgtgagcaccagggagcaggaaagccaagctgctgcagagaagttggtgcaagccttaatggaaagaaattcagaattacaggccctgcgccaatatttaggagggagagactccctgatgtcccaagcacccatctctaaccaacaagctgaagttacccccactggccgtcttggaaaacagactgatcaaggttcaatgcagataccttccagagatgatagcacttcattgactgccaaagaggatgtcagcatacccagatccacattaggagacttggacacagttgcagggctggaaaaagaactgagtaatgccaaagaggaacttgaactcatggctaaaaaagaaagagaaagtcagatggaactttctgctctacagtccatgatggctgtgcaggaagaagagctgcaggtgcaggctgctgatatggagtctctgaccaggaacatacagattaaagaagatctcataaaggacctgcaaatgcaactggttgatcctgaagacataccagctatggaacgcctgacccaggaagtcttacttcttcgggaaaaagttgcttcagtagaatcccagggtcaagaaatttcaggaaaccgaagacaacagttgctgctgatgctagaaggactagtagatgaacggagtcggctcaatgaggccttacaagcagagagacagctctatagcagtctggtgaagttccatgcccatccagagagctctgagagagaccgaactctgcaggtggaactggaaggggctcaggtgttacgcagtcggctagaagaagttcttggaagaagcttggagcgcttaaacaggctggagaccctggccgccattggaggtgcagctgcaggggatgacaccgaagatacaagcactgagttcactgacagtattgaggaggaggctgcacaccatagtcaccagcaacttgtcaaggtggctttggagaaaagtctggcaactgtggagacccagaacccatctttttcccctccttctccgatgggaggggacagtaacaggtgtcttcaggaagaaatgctccacctgagggctgagttccaccagcacttagaagagaagaggaaagctgaggaggaactgaaggagctaaaggctcaaattgaggaagcaggattctcctcagtgtcccacatcaggaacaccatgctgagcctttgccttgagaatgcggagctgaaagagcagatgggagaagcaatgtctgatggatgggagatcgaggaagacaaggagaagggcgaggtgatggttgagactgtggtaaccaaagagggtctgagtgagagtagccttcaggctgagttcagaaagctccagggaaaactgaagaatgcccacaatatcatcaacctcctcaaagaacaacttgtgctgagtagcaaggaagggaatagtaaacttactccagagctccttgtgcatctgaccagcaccattgaaagaataaacacagaactggttggttcccctgggaagcaccaacaccaagaggaggggaatgtgactgtgaggcctttccccagaccccagagccttgaccttggggctaccttcacagtggatgcccaccaattggataaccagtcccagcctcgtgaccctgggcctcagtcagcgtttagcctaccagggtccacccagcacctgcgctcccagctgtcacaatgcaaacaacgctatcaagatctccaggagaagctgctgctatcagaagccactgtctttgctcaggctaacgagctggagaaatacagagttatgcttacaggtgaatccttggtgaagcaggacagcaagcagatccaggtggacctccaggacctgggctatgagacttgtggccgaagcgagaatgaggctgaacgggaggaaaccaccagtcctgagtgtgaggagcacaacagcctcaaggaaatggtcctgatggaggggctgtgctctgagcagggacgccggggctcaacactggctagttcctctgagaggaagcccttggagaaccagctagggaagcaggaagagttccgggtatatggaaagtcagaaaacatcttggtcctacgaaaggacatcaaagatctgaaggcccagctgcagaatgccaacaaggtcattcaaaacctcaagagccgggtccggtccctctcagttacaagtgattattcgtctagtctggaaagaccccggaagctgagagctgttggcaccttggaggggtcttcacctcatagtgtccctgatgaggatgaggggtggctgtctgatggcactggggctttctactctccagggcttcaggccaaaaaggacctggagagtctcatccagagagtatcccagctggaggcccagctcccaaaaaatggactagaagagaagctggctgaggagctgagatcagcctcgtggcctgggaaatatgattccctgattcaggatcaggcccgggaactgtcttacctacggcaaaaaatacgagaagggagaggtatttgttatcttatcacccggcatgcaaaagatacagtaaaatcttttgaggatctcctaaggagcaatgacattgactactacctgggacagagcttccgggagcaactcgcccagggaagccagctgacagagaggctcaccagcaaactcagcaccaaggatcataaaagtgagaaagatcaagctggacttgagccactggccctcaggctcagcagggagctgcaggagaaggagaaagtgattgaagtcctgcaggccaagctggatgctcggtccctcacaccctccagcagccatgccttgtctgactcccaccgctctcccagcagcacctctttcctgtctgatgaactggaagcctgctctgacatggacatagtcagcgagtacacacactatgaagagaagaaagcttctcccagtcactcagattccatccatcattcgagtcattctgctgtgttgtcttctaaaccatcatcaaccagtgcatctcagggggctaaggccgaatccaacagcaaccccatcagcttgccaactccccagaatacccccaaggaggccaaccaggcccattcaggctttcattttcactccatacccaagctggctagccttcctcaggcaccattgccctcagctccatccagcttcctgcctttcagccccactggccctctcctccttggctgctgtgagacaccagtggtctccttggctgaggctcagcaggagctacagatgctgcagaagcagttgggagaaagtgccagcactgttcctcctgcttccacagctacattgctgagcaacgacttggaagccgactcttcctactacctcaactctgcccagcctcactctcctccaaggggcaccatagaactgggaagaatcctagagcctgggtacctgggcagcagtggcaagtgggatgtgatgaggcctcagaaagggagtgtatctggggacctatcctcaggctcctctgtgtaccagcttaactccaaacccacaggggctgacctgctggaagagcatcttggtgaaatccggaacctgcgccagcgcctggaggagtccatctgcatcaatgaccgcctacgggagcaactggaacaccggctgacctctactgctcgtggaaggggatccacttctaacttctacagtcagggcctggagtccatacctcagctctgcaatgagaacagagtcctcagggaagacaatcgaagacttcaggctcaactgagtcatgtttccagagagcactcccaggaaacagaaagcctgagggaggctctgctgtcctctcgatcccaccttcaagagctggaaaaggagctggagcaccagaaggtggaaaggcagcagcttttggaagacttgagggagaagcagcaagaggtcttgcatttcagggaggaacgtctttccctccaggaaaacgactccagtgggccttgcctctccctggtcagactgcagcacaagctggttctcctgcagcaacagtgtgaagagaaacagcagctctttgagtccctccagtcagagctacaaatctacgaggcactttatggcaattccaagaaggggctgaaagcttacagcctggatgcctgtcaccaaatccctttgagcagtgacctgagccacctggtggcagaggtacgagctctgagagggcagctggagcagagcattcaggggaacaattgtctgcgactgcagctgcaacagcagctggagagcggtgctggcaaagccagcctcagcccctcctccattaaccagaacttcccagccagcactgaccctggaaacaagcagctgctcctccaagattcagctgtgtcccctccagtccgggatgttggtatgaattccccagctctggtcttccccagctctgcttcctctactcctggctcagaaacgcccatatttcaacagagcaaatggcttgggtttggatacttctccagtaatgaagacccctcccaagctagagggtgatgctactgatggctcctttgccaataagcatggccgccatgtcattggccacattgatgactacagtgccctaaggacagcagattgcgggagggcaagctcgctggtcaaaaaagatagtgtctcttgtgagatcagcgtgcagctttcccgggccttgaagcccaaggcacagaggtgcttagggcaggcaaaggtatttcatgagctttcgggaggcaggcaccagttgcccttgcaccatgccctagaggagtcggcttccctcctcaccatgttctggagagcagccctgccaagcacccacatccctgtgctgcctggcaaagtgggagaatcaacagaaagggaacttctggaactgagaaccaaagtatccaaacaggagcggctccttcagagcacaactgagcatctgaagaacgccaaccagcagaaggagagcatggagcagttcatcgtcagccagctaaccagaacacatgatgttttaaagaaggcaaggactaacttagaggtgaaatccctaagggctctgccatgtactccagccttgtgacccttgccttccaggaaccatgcaagaagcgcagccaccagaagtccttaaaacagcaggaaaggtgggcctgtcccccttttgtgcagctacctatctgctgaggagcatctgggcctcattcctccaagtccacgggagggtccagaagagggagtcagagatgtatcctggtggagctgggagaaaggcagaaagcctttctgacagctatggaatacgattagccaaggtccacttggcccagcactaagaaaaagatgcgtagtttgcacagaaggttttgtgatcctgcctctcaacagccccagcagcttgggaactagcaagagcacatttcttgcctcatcagctgtcctgagatggaaaactcagtggatataggaccctgattccgatgaaaggggcacgtggtcccaatgctggagctcctctggcaggttctaaaagcacactactgagcagcggtgccctgccggacactgctggcgggggctcagtgagcactactcacagatccacacctgaccctgttgggtcgagtcaggctgggccttggtctgcactgtagcacctgtgttctttgagttcacatcatgaatgtggtgacttcccagataccatctcaggcttaacctagcacatcctatttcttttcttctatgatatccaaattggactgacctcacttcaaagttgctgtcccattttgtcaccctatcttatctcggggaaattgcagactgatggccagaccaactctgttgaaattcttgcatagagcaaacctgtgctcatttttaagtggcatgggagaggcccccagcctagtaaagcctagtctgtgtcttcacagtgctggtagaatgtgtttgtgtgtataaatatatgatatagatttatatatgttgctaacgccatatattgaaggccaacataactggtggacagggtgggtgacagaaaatgaaagcctttttggtgattgttaaagcaagatgtgtataaagaaataaatagtttttctttc

SEQ ID NO: 7653 - DNA, 1098 bp, Homo sapiens
  SIMILAR (793)..(981): 931254mologous to Homo sapiens Human phosphodiesterase interacting protein, myomegalin,accession number Y71159,Smith- Waterman Score=303.
atgaagaaaggaagcaatggctatggtttctatctgagggcaggctcagaacagaaaggcttgggtttggatacttctccagtaatgaaggcccctcccaagctggagggtgatgctactgatggctcctttgccaataagcatggccgccatgtcattggccacattgatgactacagtgccctaagacagcagattgtggagggcaagctgctggtcaaaaagatagtgtctcttgttgtggatctggtcagaaagagtgggaattcagtgactttactagttctggatggggattcctatgagaaaagcatgaaaacacgggtggacttgaaagagttgggtcaaagtcaagaagagcagagactagggctcagcagggagctgctggatgagaaagagcctgaagtcttgcaagactcactggatagatgttattcaactccttcagtttatcttggactgactgactcatgccagccctacagaagtgccttttacgtattggagcaacagcgtattggcttggctgttgacatggatggtgaaatccctaagggctctgccatgtactccagccttgtgacccttgccttccaggaaccatgcaagaagcgcagccaccggaagtccttaaaacagcaggaaaggctggggggcaagaaccaggttgactgtagaggatcccctgagggagcctgtgcccaccctgcccagtcgctttcggggccgctgcggagcttccgctgccatcttcggatcctgtgtcccgcacgggggctccaccagggcagggatgatggcttgggtttggatacttctccagtaatgaaggcccctcccaagctggagggtgatgctactgatggctcctttgccaataagcatggccgccatgtcattggccacattgatgactacagtgccctaagacagcagattgtggagggcaagctgctggtcaaaaagatagtgtctcttgagcctgtgtggcggtgggaggaagtagtgttctgtcctgatgcctgcttgcggcctcgaaggcgatttgaatctgccttcaggaacaatcgccgtcttcgtgcggtgtctcgttga

SEQ ID NO: 7654 - DNA, 5994 bp, Homo sapiens
  SIMILAR (2309)..(5779): 551254mologous to Homo sapiens laminin A3,accession number X76939,Smith-Waterman Score=2529.
tctaagtcacagtctctattttagcaacacagtagtcactttgggcacaaagaatggcctaacatcttacaatgggcctgttttcttctgcagagaggggcttcatccgtccagcaagaactgatgcttagatgtgctgtctctaaaatttctttcgcatccttgtcaatcttcttgtcttttgtctcatagcactgccagcggaacacaacaggagagcactgtgaaaagtgtctggatggttatatgataaaaagttaagacagtctctttggtgatgtatggaattgacttccaatatttgcttccaattttagttttgcagaattataaaagtaggggtttgtcagggactatcataagtaaacttttgtatgctcattttgttaaatccatagggtccagagtttgtaggaaagaagattaaaaggaagaaaaaccatgatgctaaatatttaaatgtgtgatattcctcttcagatgtgctcccggttactatggaaaccccttactcattggaagcacctgtaagaaatgtgactgcagtggaaattcagatcccaacctgatctttgaagattgtgatgaagtcactggccagtgtaggaattgcttacgcaacaccccaggaaaatattgccatattttaagcattaagaagtgcatttctcgtctcttgtttttgtttcccacagtgtgcaactgcgggggaggcccatgtgagttacactaggaacaaaacttttggtttaaaaactattttaatagtaggcatcccctcccccaaacagatgtatcttggtgttctgctaaaacggcctgcctttagcatgcttttgacttgtgattctgaagaaatgtttcacctccaggctgtgataagtgcgtctgggacctgactgatgcactgcggttagcagcgctctccatcgaggaaggcaaatccggggtgctaagagttttatgtacattttttaaaacctggtgtgcccattgactattctcaaaacacattcttctgcagacaaaattgtcagaaagagaaaaccaatacgccctaagaaaacccaaatctcacaagttacatccacctagctacgggttttgtctgaacttccctttctaaattctccagccttctactgggaagtcctacagccctttcccaccacttatgtctgggattcccctaaaggatgcccatccatctgtgttcataaatacccagtgctcaaaagatgctccctttggtgctgctgatcttgtcccctatctgtgcttatacaacattcttttctcatacatttaatctagcctttatacggattatttgtaggaaaatcaagcctccagaaaaggacaacttgttcagaaggaatgctcccttgcatttctagtgcctggtcatctctccctgctgccttgtttcaccatgttcttcctttcagagatcaacaacaagatgctctattatggggaagagcatgaacttagccccaaggaaatctctgagaagctggtgttggcccagaagatgcttgaagagcaaaatgctgggaggaatggaagcgaacaggagaaagccacactgagcctttatctccatttcttcccagtactgagccaggctgagagctggcagcggctgcacaatgagacccgcactctgtttcctgtcgtcctggagcagctggatgactacaatgctaagttgtcagatctccaggaagcacttgaccattactgctctccccaacgctttccctaaagacatattcacttcactctcccttactcttccttcccgcagaaacaacaggaaagagtgagggaacaaatggaagtggtgaacatgtcttttggtgcctaggaaaaatgttttaagttcttctaaattcaatgtatttattaaaatttttttctttagaatgcgtcagggatttatgcagaaatagatggagccaaaagtgaactacaagtaaaactatctaacctaagtaacctcacaagcattaaacatggccccattccccaagaaggtaagaaggagaaataacaatgtttgtttattaacaggaagttgcacagttcagatatgaacgggctggtacagaaggctttggatgcatcaaatgtctatgaaaatataatccttcaactatgaatagctgatttcttctgctgtcatttttaccctcttctctcaattcctttgtaggcggtgagtgggattgatactcaaatcaagtcactcacaagcagtattacaagtgttctgcaattctgtacctcgaattttaaatgctactttccagaattgttgatctatgttcagagtattcagaatactgcaaatactgcagatgactgcatcgtacaaatgagaagtttccttgttgaaatggaatccttttcgaggcatcttggctccactagtacttctttctgctgctcttccacaggcagtgatgaagcagtggctgacactagcaggcgtgtgggtggagccggggtgttaatgttccccaacaaatatccggcttctctgcaaagtgaatgaccctgtgctctgtgtaaaggggatgcccagcagcgcctggggcagtctagactgatcaccgaggaagccaacaggacgacgatggaggtgcagcaggccactgcccccatggccaacaatctaaccaactgtctacatctgattcttgaaatataatattgagttattttcttaaatgattaatttttattaactgcagtaagaaatctgaccgaggttgtccctcagctcctggatcagcttcgtacggttgagcagaagcgacctgcagggaagcacgggaaagcactctgcccatttctgcaaagcacttttaatgaaaccgttgtgtcactccagatccaagtctccatgatgtttgatggccagtcagctgtggaagtgcactcgagaaccagtatggatgacttaaaggccttcacgtctctgagcctgtacatgaatcctttaaaaaagatgatgttcattcttatgaattttatttaaatgacttcttacttcttgatatttcaggccaaaaaagagtatatgggtcttgcaatcaaaaatgataatctggtatacgtctataatttgggaactaaagatgacattttgacatttaaaaagtattttctatgaattatataataacaagtgaaaattatttatctcaatagggtgggaaaacatggaaaggtgtttttaacagtcccgagtctaagtagcacagcagaggaaaagttcattaaaaagggggaattttcgggagattgtctgttctgtgatgtctgagtaaaatatgaccatgagacaagtggttttactttttctattgcatagctccctaccagcttaaacctgcctggctttgttggctgcctggaactggccactttgaataatgtaaaagggcttcacttgaaaagcataacagaaactgtagtgttcaaatgaccgttgtgtttccatttcagagataagctggccttcactcagagtcgggctgccagttacttcttcgatggctccggttatgccgtggtgagagacatcacaaggagagggaaatttggtcacaaattcagctaaatctgactctactcgcataacagatgttcctatcttacaattcctttctctcctcagagtatgtttttcagactggaaatgcgcaatggttacctacatgtgttctatgattttggatttatatagaagtcatcaaagaactgaatattaaatagttaatcaaggcttactatatattatctctcccagatctcaatcatttaccacaatgataagaaaatgatcttggtagttgacagaaggcatgtcaagagcatggatatccatagcctacatatgcagggtaacatcatcatcatggctgtatcagtgaggctgactttcttttccagggccctcagagcacaccttcccctagatatcaacttcagaggatgcatgaagggcttccagttccaaaagtgaaacattgatagttttaagcatttgataattctcaaaaacactatctccacttgttctggcacacagatatctcgcagagcatatttcaatggacagagcttcattgcttcaattcagaaaatatctttctttgaaaatgttgaaaacatttccgtcttttggatccctagactccctacttacatgcctgtgcttgcatttcagtcagacgtgttctccatctcactggataatggtactgtcatcatggatgtaaagggaatcaaagatccaacctagagtgggtcaaggtaaaatgctagctctgtggtatgtaaagaagcctttttcttttgcagatatgaactgatagtagataaaagcagagttgggagtaagaatcctaccaaagggaaaatagaacagacacaagcaagtgaaaagaagttttacttccataatattcatcatgtaattctgaacaatatttttaatatttattttttcctctgttacaaacacagggtggatagagatgtggaggttgaagatttccaacggtatactgaaaaggtccacacttctctttatgagtgtcccattgagtcgaggacatcacaaattactttttgctgctagtatgtcacttttatcccttaatttggtttacttttatagggagggaaaagtaaagatgcaccttcatgggatcctgttgctctgaaactcccagagcggaatactccaagaaactctcattgccacctttccaacagccctagagcaatagagcacgattttaagaagttagagattatcctcagtctcattttacatatggtaatccctttcttttcatttaccagatctcagttttccattcgtctgagaactcgttcctcccatggcatgatcttctatgtctcagatcaagaagagaatgacttcatgactctatttttggcccatggccgcttggtttacatgaggaaacacagccttttctgcaatcttggaatgtacctgagatgtgctattgtccttctcttcatccaggtgatatttattcgagaaaggagcagtggccgactggtaattgatggtctccgagtcctagaagaaagtcttcctcctactgaagccctcattttgcttccccttggtgcatttgtgttgagaaaattgattttaagaaatatcttcttccctcagattaactccatctacagttttagtggctgtctcagcaatctccagctcaatggggcctccatcacctctgcttctcagacattcagtgtgtacaaaatcacaccatagttacaaatatgatcttgctgttcttgggagtttatagtgtttctctccacagatgaatctttcaatattggattgaagtttgaaattgcatttgaagtccgtcccagaagcagttatttaagaaattcagttttatcacaatgaggacaaactaaatcatacaatgtgtcctatcttttgcaggtcatagtgaaagtcaataatggcatagtctttctcaggttaaaaattcatcactccagtgccacttatgaccagtctttgccctgcatttcagttattagagattctaatgtggttcagttggatgtggactctgaagtgaacaccaggaagtaatatttgggcttggaatacctcaattgcaatctttgtttttatttcttgctcttttcagaatctctactgacaccacgcttggcccccagcaaacccttcacaggggacacccagtgagcttcagtaaagcagccctggtcagcggcgccgtaagcatcaactcctgtccagcagcctgacatgacagagcacagctgcccaaatacaaagttctttagagcactgaaagaaacacaaagccagccaggaggaacagtaactcttccttcgggtggaagctttcatcgagttgaacaggacttaaacgaatcatcagggac

SEQ ID NO: 7655 - DNA, 935 bp, Homo sapiens
  SIMILAR (1)..(534): 541254mologous to Homo sapiens Laminin Ah,accession number X70904,Smith-Waterman Score=379.
  misc_feature (1)...(935): n = a,t,c or g
accccttgctttgaaagccccaatgaacagggacttacttttcaacaaaagnaggatacgtgttnntaaatgatcttccaatatggaattgagtttgaaattgcatttaaggtcngtccaagaagcagttcgggaaccctggtccacggccacagtgtcaatggggagtacctaaatgttcacatgaaaaatggacaggtcatagtgaaagtcaataatggcatcagagatatttccacctcagttaacacccaagcagagtctctgtgatggcagatggcacagaattacatgttattagagattctaatgtggttcagttggatgtggactctgaagtgaaccaatgtggttggaccccttggaatccaaaaaccaattgatcacagggagcctgtgttaggttggaggtgttcccagaattctctactgacacccacgcttttgccccccacaaaaccctttcacagggctgcatacgcccactttgtgattgatggaccaccccagtggagcttccaggtaaaagcagcccctggtcaagcgggcgcccgtaaggcatcaaactccctgtcccagcagcctggacatggacagaagcacagctgccccaaatacaaagttcctttaagagcactggaaaaggaacacaaagccagcccaggagggacagtaactctttccttcggggttggaagcttttcatcgagttgaccagggacttaaaacgaatcatcagggaccggatatttcttatttctcatttggattcttaaccttggaatccaaagtgtctgcaatggacaacaattgaaggagtggcaaacttacttgctattgagagcacacgcaattcctactggtgaaattactgtttctgttttctaataaaatagaagggattccaaataaacacttgcacacaaaaaaaaaaa

SEQ ID NO: 7656 - DNA, 901 bp, Homo sapiens
  SIMILAR (194)..(15): 681254mologous to Homo sapiens PRO0974,accession number AF113685,Smith-Waterman Score=206.
  misc_feature (1)...(901): n = a,t,c or g
gagatggagtctcccactgtcgcccaggctggagtgcagtggcatgatctcagctcactgcaacctctacctcctgggttcaaatgattgcgtgcttcancctcccgagtagctgggactacaggtgcacaccaccatgcctgactaatttttgtgtgtgtatttttagtagagacagggtttgggccatgttggcaggctggtcttaaaaactcctgacctcaagcgatccgcccacctcagcctcctaaagtactggggattacagggcatgagccaagggcgcctggccagaaaattttaacttttcatattttaacttagcaaagcctaaagttagacaatatctttatcctgttctagagcattacaaatgaacccacagaaaaaggctatctggaacccacagaaggggccaactaggtcaggagaaggaagggggatgttggtcgcacttagaatactcaccagaccagtttaaagatgacttccgagaaactatttctacatgacagttaggcccaggcacgatgggtcaacagtgcctcactggcaggacagctgcagagggacatcagcagagaccctcagttctggagaaataagtggccgtcagagctcacctccaggtcagtcggacctgtggggaaccaatgaactgcaagcaggcacccacaagggaaatttatcaaaatattttctgatctatccagcccttctaaagctccatggaactttagttggtcaacaaaagccagcccccaactccaatctagatgcgatggtcacagccagctcaagcttgctgtccactgcacggccttataccatgtcaccaccagccctgtggaagtcccagagagtcagagatgagagcacttgtaactcaaactttcactga

SEQ ID NO: 7657 - DNA, 480 bp, Homo sapiens
  SIMILAR (251)..(370): 371254mologous to Cricetulus griseus intermediate filament associated protein,accession number X77631,Smith-Waterman Score=82.
atacagtcctcctgaatgtccattctgtggaaaaatagaggagcacagtgaagatatggaaactcatgtgaaaacaaagcatgccaatcttttagacattccattggaagactgtgatcaaccactctatgattgtcctatgtgtgggctcatatgtacaaattaccatattcttcaggaacatgttgacttgcatttggaagaaaacagctttcagcaaggcatggatagagtccagtgttctggtgatctacaattggctcaccagcttcagcaagaagaagacagaaagaggagatctgaagaatcaagacaagaaatagaagaatttcagaagctgcagagacaatatggtttagataattctggaggatacaaacaacaacaactacgaaatatggagatagaagtaaataggggaagaatgcctccatctgaatttcataggagaaaagctgatatgatggaatcattagctct

SEQ ID NO: 7658 - DNA, 468 bp, Homo sapiens
  SIMILAR (238)..(393): 291254mologous to Manduca sexta broad-complex Z2- isoform,accession number AF032674,Smith-Waterman Score=74.
gcacgagaaggaagtgcttttgaatgaggtactgagggccaaggtgttggaagttcctaattctttcctcggttaactgtgaaactctgcgtattgggaaggcctggcctcagtcatcaggccaggagaggtactggacgccgcgcacgcactcgtctgccagcgaggcccaaaggggaagcctagcggagctcaatgtggcagctgctggcctctgggccgctacttgtcaataccatgctttcctgtaatatttgtggtgaaacagtaacctcagaaccagacatgaaagctcacctaattgttcacatggaaagtgaaattatatgtccattttgcaagttgtcaggtgtgaattatgatgaaatgtgttttcatatcgaaacagctcattttgagcagaatacacttgaaagaaactttgagaggataaatacagtacaatatggaacttcagataacaagaaa

SEQ ID NO: 7659 - DNA, 1862 bp, Homo sapiens
  SIMILAR (1222)..(1323): 611254mologous to Arabidopsis thaliana gene_id:MXC17.7~,accession number AB016881,Smith-Waterman Score= 113.
atgcactgcatagagaccggcgtggagcggcgcattctgggattacttcttttccgtgggagcctggcctcagtcatcaggccaggagaggtactggacgccgcgcacgcactcgtctgccagcgaggcccaaaggggaagcctagcggagctcagtgtggcagctgctggcctctgggccggcccaaagctttgacccagttagtgcctgctagtttcgtgtgcctggcttgtgcctttggcgcggaacgtttgggagactcggccttgcggtcttctgacctcacccaccacctacttgtcaataccatgctttcctgtaatatttgtggtgaaacagtaacctcagaaccagacatgaaagctcacctaattgttcacatggaaagtgaaattatatgtccattttgcaagttgtcaggtgtgaattatgatgaaatgtgttttcatatcgaaacagctcattttgagcagaatacacttgaaagaaactttgagaggataaatacagtacaatatggaacttcagataacaagaaagacaacaccctacagtgtggaatggaagttaattcaagtattctttcaggttgtgcatctaatcatccaaaaaattcagctcaaaacctgactaaagatagtactttaaaacatgaaggcttctattcagagaacttaactgaatctagaaaattcctgaaaagtagggaaaaacagtccagcctgaccgaaataaaaggatctgtttatgaaacaacatacagtcctcctgaatgtccattctgtggaaaaatagaggagcacagtgaagatatggaaactcatgtgaaaacaaagcatgccaatcttttagacattccattggaaggcatggatagagtccagtgttctggtgatctacaattggctcaccagcttcagcaagaagaagacagaaagaggagatctgaagaatcaagacaagaaatagaagaatttcagaagctgcagagacaatatggtttagataattctggaggatacaaacaacaacaactacgaaatatggagatagaagtaaataggggaagaatgcctccatctgaatttcataggagaaaagctgatatgatggaatcattagctcttggttttgacgatggaaaaacaaaaacttccggaattattgaagcacttcataggtattatcagaatgctgccacagatgtgagacgggtgtggctttcttcagtggtggatcactttcattcatctttaggcgacaaaggttggggttgtggttacagaaatttccaaatgctactttcatcattattacaaaatgatgcttacaacgattgcttaaaaggtcacagtcgaactgttattgggaattgaaggagaaaaaaaaccgaacattatgcttacttaatacttgatcctgggatgtccttcttcgagaaatggcaggaaattatttaaagcaagacatagaggcttaggcagtcctcaagcaaccttcggaaatcctatgggaaatttaaaaccataagcaatacccagatattgggcagtagagggtgctctttctctagaggagaaacttgccagggagacaagcttctcaagtctttacagccgagaagattccttgaaggaatcaagcatttaaggcatttccagtgattggaggaacattactttgttttccttaaatgtagatattgaactccttaatacaattatgaatctgtgaattctcttaagtcttaacatataatttaatttctaaaatgcctggtggttaattggaattataccctatccatacttccattggtttggtaaattatttcaataaaatgtcttgtttttgcattgtg

SEQ ID NO: 7660 - DNA, 303 bp, Homo sapiens
  SIMILAR (86)..(205): 951254mologous to Homo sapiens unnamed protein product,accession number AK022547,Smith-Waterman Score=195.
tgtctgtactcgtgaactatgcgttttctccttctacacactgggcgtcatgtctggagctgcagaggaggtggccactggagcagagggctcatatttggaaatcaagaaacagatggacaagttggatgccctggcccatcctctcctgcagtggatcatctctagcaacaggtcacacattgtcaaactacctctcagcaggtgggtccacattgagaactggcattcgatcctgcgcaatgggctggtcaatgcatcctacaccaaactgcaggaatgggaaaaggacagcacaggatg

SEQ ID NO: 7661 - DNA, 473 bp, Homo sapiens
  SIMILAR (88)..(213): 381254mologous to Pleuronectes platessa metallothionein,accession number X56743,Smith-Waterman Score=60.
ctctgtgatcatccagatcagcacttgactgtttattttcaaatctcacgaacctcaccccaagatcttcacattctggatctcagctgctcttgaaggacagtgacttgttaccaccgcaacagcagagcctgccatccccaacagatcaccagttgtccctgacatcgtgccctaccttgtctccctttgtggtctcctaaatgcccatctcgttggccttggttcggctagtggtatggaggggtgctgcctagcactgacctgagagtgtgtgtgacccactgacccaatggacatcaaaggccagttctggaatgatgacgactcggagggagataatgaatcacaggaatttctctatggcgttcaggggagctgtgcagctgacctgtatcgacacccacagcttgatgcagacattgaagccgtgaaggagatctacagtgagaactctgtatccatcagagaat

SEQ ID NO: 7662 - DNA, 649 bp, Homo sapiens
  SIMILAR (334)..(188): 281254mologous to Drosophila melanogaster CG12643 gene product,accession number AE003450,Smith-Waterman Score=52.
aactcttaggctaggctagttgccctcctctaggctcacaccatgctctataatctgcatcacaaccccttaccatgctgtgttgttaattacttgttcttgcttgtaatttccagcagactaaattctgtgggggaaaataatcttctttgttttattctctgctgttttgatgagcatctagctcagtgctgggacatagtaggcactttcgtaaatttttgataaatgaagtgggtgtattgttctgtgacaggaatgggaaaaggacagcacaggatgcccctccaagggatgaggctgggtccagagatacaacagggatggaataccatccccccgggtattggaactattctaatgagggcagggacctttccctgggggctaatttaggctccagagctggacagggaaacagtggggtgagaatgggttggggagtgatttgagatcatttaaaggagtcaggtatgttctaaagtgaacacacgtctggagtcatatgtagctgaagtcatgagtataaaagcagaggctgagtttagatgaaaatgtaaagatggaagctgtgaccctatccagactgattatgggaaagaagaattttctgtgcggcgagggggtgtgcttgggaccccaagaaatt

SEQ ID NO: 7663 - DNA, 1188 bp, Homo sapiens
  SIMILAR (859)..(1167): 921254mologous to Homo sapiens N-acetyl-alpha-glucosaminidase prepro-polypeptide,accession number M13520,Smith-Waterman Score= 516.
atgtcgactatagatgatccccggctgcaagggagacgaatgtgtctgatgctcaggggtacccctgagcagaaggctctggtgattggtggagaggcttgtatgtggggagaatatgtggacaacacaaacctggtccccaggctctggctatgtcccccaagtactcaagacctagccaacgaaggaatcagggaaatgactatcttacacaggcacatccctgacagaggcaaaggtgtcatgagatcctgctctttcaggaccccaagacccttcacacttgcctgtggtcctgagaagagcctgatggatccacaaagccagagtaattctgagggcgcctcgtccagcctcgtggtcaagctggcggacaccgaccgggagcgcgcgctgcggcggatgcagcagatggccggccacctgggcgccttccaccccgcgccactgccgctaggggcctgcggcgcctacaccacggcgatcctgcagcaccaggcggccctgctggcggcggcacagggcccaggcctaggcccggtggcggcagtggcggcccagatgcaacacgtggcggcctttagcctggtagctgcgcctctgttgcccgcggcagcagccaactccccgcctggcagcggccctggcaccctcccaggtcttccggcgcccatcggggtcaatggattcggccctctgaccccccagaccaatggccagccgggctccgacacgctctacaataacgggctctccccttatccaggctggtcccagtccaggcctattctcaggatcatgaagtatgcagaacagaggattccaacattgaatgagtactgtgtggtgtgtgatgagcagcatgtcttccaaaatggatctatgctgaagattcagccagacacaatcatacaggtgtggcgagaggatattccagtgaactatatgaaggagctggaactggtcaccaaggccggcttccgggcccttctctctgccccctggtacctgaaccgtatatcctatggccctgactggaaggatttctacatagtggaacccctgtcatttgaaggtacccctgagcagaaggctctggtgattggtggagaggcttgtatgtggggagaatatgtggacaacacaaacctggtccccaggctctgggcacaccgtattcagctctga

SEQ ID NO: 7664 - DNA, 1213 bp, Homo sapiens
  SIMILAR (584)..(1102): 501254mologous to Homo sapiens unnamed protein product,accession number AK021790,Smith-Waterman Score=323.
  misc_feature (1)...(1213): n = a,t,c or g
atgcatgtacagcatagagttcaggctggagtggagagtctgtacaagagcaccaacgaccacacgggacagtcgacacaacacaaacaagaaaaaagtcttctcctggcaaagggaacagggatgcctgcagggcagctgaagttcatgcacacctcacaccagttcctcctgctgagcagccctcctgccaaggaggctcggttccggaccgccaagaagctctatggcagcacctttgccttnccagtgtacctgtccatcttcatgtcctgtgtgggtgagaatggtgggtcccacattgagaactggcattcgatcctgcgcaatgggctggtcaatgcatcctacaccaaactgcaggacatcaaaggccagttctggaatgatgacgactcggagggagataatgaatcagaggaatttctctatggcgttcaggggagctgtgcagctgacctgtatcgacacccacagcttgatgcagacattgaagccgtgaaggagatctacagtgagaactctgtatccatcagagaatatggaactatcgatgacgtggacattgacctccacatcaacaatcagtttcctggaatgaagaagtctctacagcctgggaaggtcctccggacaagaacctattgtgttgaggctgcgatttttttctctcccagtacctagatggaccagacccatcccattgaggttttccagccatcaaataagaaaggatttgggctgggtcttcagttgaaaaagatcctgggtatgtttacatcccaacaatggaaacatctgaggcaatgatttcttgaagacccagcaggagaagaggcacagttggttcaagggcaagtgggtaccatcaagaagttccgagctgggccttcagcattctttttcacccatccccaagtcttcccagttttccctattcataacagggactccatggctggaaagggcaaactaggtgtaaccagagcttcgggttgggcgcctcatgaaccgttccatctcctgtaccatgaagaaccccaaagtggaagtgtttggctaccctcccagcccccaggcaggtctcctgtgccctcagcactttgaccccaacgagatcaaagttgtatacctgaggtgcactggaggtgaagtcggtgccacttctgccctggcccccaagatcggccccctgggtctgtctccaaaaaag

SEQ ID NO: 7665 - DNA, 1728 bp, Homo sapiens
  SIMILAR (1)..(324): 951254mologous to Homo sapiens hypothetical protein,accession number AL122091,Smith-Waterman Score=536.
ttgaaaaagatcctgggtatgtttacatcccaattttggaaacatctgagcaatgatttcttgaagacccagcaggagaagaggcacagttggttcaaggcaagtggtaccatcaagaagttccgagctggcctcagcatcttttcacccatccccaagtctcccagtttccctatcatacaggactccatgctgaaaggcaaactaggtgtaccagagcttcgggttgggcgcctcatgaaccgttccatctcctgtaccatgaagaaccccaaagtggaagtgtttggctaccctcccagcccccaggtcagtggtcactgcaagaacattcccactctggagtatggattcctcgttcagatcatgaagtatgcagaacagagtgattccaacattgaatgagtactgtgtggtgtgtgatgagcagcatgtcttccaaaatggatctatgctgaagccagctgtctgtactcgtgaactatgcgttttctccttctacacacttgggcgtcatgtctggagctgcaaaggaggtggccactggagcaaaggtggtggatctgctggtggccatgtgtagggcagctttatagtcccctagaaagagcatcatctttgagccctaatcctttgggggggaaccccactgatcccaagactctggcctttaacccctaagaagaagaattatgaagcggcttcagaaagctctgggatagtgtgatgtctattccgggagatgacccagggctcataatttggaaatcaagaaacagatggacaaagtttggatccccctgggcccatcctctcctgcagtggatcatctctagcaacatggtcacacattgtcaaactacctctcagcaggcagctgaagttcatgcacacctcacaccagttcctcctgctgagcagccctcctgccaaggaggctcggttccggaccgccaagaagctctatggcagcacctttgccttacagtgggtcccacattgaggaactgggcattcgatcctggcggcaatgggctggttcaatggcattcctacaccaaactgcaggaatgggaaaaggacagcacaggatgccctccaaggatgagctggtccagagatacaacaggatgaataccatcccccagacccgatccattcagtcaccggttcctgcagagtcggaatctaaactgtataggcactttgttgaagtgattacatctaaggacctccagaaggcatggggaacatctggggtgttgccctgtgttccgacccatgtcctgcacaagattccttcctttgtaatatgaggatggtccaggtgggcgatgcccaacattatatacctcacggaccccagagagtacacgagagggaaatcagtgcgtgttgatcgggagactcacggtttacacaaagctcgagggggccccaggccctcggtacccacccctgttacccccaggatccatctgcccctcataaaagtgttcaggtaacacggctgaggctgccctgaggaatcaaggggccattaccaaggggcaaggaaaaggatatgtaagaggtggccttcatggtagagcttgacccaagaactactccacattcggatggcccagactgactccatcccctgactttcccttttgacttcaccctgtttgtaaataaaacaataaaatggaaggtgctgtggattggaaaaaaaaaaaaaaaaaa

SEQ ID NO: 7666 - DNA, 525 bp, Homo sapiens
  SIMILAR (441)..(43): 271254mologous to Bombyx mori pupal cuticle protein,accession number X68930,Smith-Waterman Score=96.
ggagagaacagacttcttgcagatgtcgctggaggatgagaagtgtgacgggagcctctgcgaagaggcattcctggcagagggtgccgcaaatacaggcgcacagaggtgtgcgatggctccgctgtgactggggactgccgactgtgactggggctttggggaagggctctggctctactggctgtgtgagcgagctgctggatacttcggagaatggggtgtgagccagggaggtgtggaagtcacctgctgccccgggacacccagatgatgccctgcccacctcccctgcagacaccaatgtgctccgctacatccagctgactcagctgaagatgaatcgttgcagcctccagcgggaagacagtggggctgggtcccagactcgggatgtaattggctgaggccaatccagggggacctctctatccctcgccctcccacctcaccatgtaacttcccccgactcatgtgtttgttggtaaaacacttgtcactggtgatcaaaaaaaaaaaaaaaaa

SEQ ID NO: 7667 - DNA, 840 bp, Homo sapiens
  SIMILAR (172)..(354): 451254mologous to Homo sapiens Human secreted protein, SEQ ID NO: 5056,accession number G00975,Smith-Waterman Score=149.
atgcagcgcggcgcgctgtccccggtgctgatgctcagcgctgccccggagcctccgccgcgcccgcctcccggcctctccccaccgggctcgggcccaggctcgggctcccgccatggctcggctcgtcccggtcctaccccagagccgtcggggagcctgggcgcggcgctcgacagcagcctgcgtgccgccgtggcgttcaaggcagagggccagcgctgctatcgagagaagaagttccgggaggccatcggcaagtaccaccgagcgctgctgcagctgaaggcggcgcagggggcccgccctagcggcctgcccgcccccggcccccggggcccaccagcagccccgggccggcgcgcctcagcgaggagcagcggcgcctggtggagagcacggaggtggagtgttacgattcctcaccggcttggcctgctgcagtcggagctggtaaactacgagcgcgtgcgcgagtactgtctcaaggtactggagaagcagcagggcaacttcaggcccccctaccgtgccgggcattgccttttaccccctgggggactacgcacgcgcgttgcgcttcctgcaggaggcccccagccgggaacccccagacaccaatgtgctccgctacatcmcagctgactcagctgaagatgaatcgttgcagcctccagcgggaagacagtggggctgggtcccagactcgggatgtaattggctgaggccaatccagggggacctctctatccctcgccctcccacctcaccatgtaacttcccccgactcatgtgtttgttggtaaaacacttgtcactggtgaaaaaaaaaaaaaaaaa

SEQ ID NO: 7668 - DNA, 658 bp, Homo sapiens
  SIMILAR (1)..(204): 951254mologous to Rattus norvegicus G-protein signaling regulator RGS7,accession number AB024398,Smith-Waterman Score=350.
  misc_feature (1)...(658): n = a,t,c or g
aacgggaaggaacctggacgatacacatttgaagatgctcaagagcacatttacaaactgatgaaaagtgattcatacccacgttttataagaaccagtgcctatcaggagcttctacaggcaaagaaaaagggcagaaacatccctattttcccatgccataaaaactgtacaccaacactgagggccagcactaacctgttatgaaaagaggggaaatctctcacgtccaagaggttaacaagccttgctcagtcttactaaacggatcatcttgtagcatgaatgcagactggagtcactgcacacactttgtagctcaatgttgtgacctggagcagaggacattagaacaagatgttgcatgagcaaaggacctaaattgttatttttgtgtgtacattccatctccaatggactcttccgtctcaatgcctccatttcaaactgggtgctgcttttttcntcttctactatgctggatctggggctcttccttttntacaagntcaagtgaaagaaaccttttctttnttnccctcttcncctctctctctctcaaagcttcagtagaacacangtcactgaaaatcagtcagtcaaaaactggagaactgtaaagaaaaagttatatcataagatactgtggctcacatat

SEQ ID NO: 7669 - DNA, 1395 bp, Homo sapiens; identical to SEQ ID NO: 4254
  SIMILAR (931)..(1392): 971254mologous to Cloning vector pZC320 SopA,accession number U26464,Smith-Waterman Score=779.

SEQ ID NO: 7670 - DNA, 2108 bp, Homo sapiens
  SIMILAR (1)..(1437): 821254mologous to Homo sapiens regulator of G-protein signaling 7,accession number AF090116,Smith-Waterman Score=1939.
atggcccaggggaataattatgggcagaccagcaacggggtggccgatgaatcacccaacatgctggtgtacagaaagatggaagacgtcatagcacggatgcaagatgaaaaaaatggaattcctattcgtacggtcaaaagctttctttccaagatacctagcgtcttctctggttcagacattgttcaatggttgataaagaacttaactatagaagatccagtggaggcgctccatttgggaacattaatggctgcccacggctacttctttccaatctcagatcatgtcctcacactcaaggatgatggcaccttttaccggtttcaaaccccctatttttggccatcaaattgttgggagccggaaaacacagattatgccgtttacctctgcaagagaacaatgcaaaacaagggcacgactgggagctcgcagactatgaggctgagagctgggccagggtttgcagagagcatttgccccgaagtggggagttcattttcatggcaagcaggagcacaagcaaaagtggacaagaagagagacaagattgaaaggaagatccttgacagccaagagagagcgttctgggacgtgcacaggcccgtgcctggatgtgtaaatacaactgaagtggacattaagaagtcatccagaatgagaaacccccacaaaacacggaagtctgtctatggtttacaaaatgatattagaagtcacagtcctacccacacacccacaccagaaactaaacctccaacagaagatgagttacaacaacagataaaatattggcaaatacagttagatagacatcggttaaaaatgtcaaaagtcgctgacagtctactaagttacacggaacagtatttagaatacgacccgtttcttttgccacctgacccttctaacccatgggctgtccgatgacaccactttctgggaacttgagggcaagcaaagaaccgagccagcagagggtaaaacgatgggggttttgggcatgggacgagggcattggaaagacccagttggggaggaggaacagtttccttaaaattttctaggagttcaggatttcaggttcgggaaattttaaggttctgggctgggccagtgggaggaccttgaaaaagaggcctttttaaagaagtaccctcaagagttcaggaaatatggcaagagtttctggctcccggagcccccagtgctattaacttggattccaagagttatgacaaaaccacacagaacgtgaaggaacctggacgatacacatttgaagatgctcaggagcacatttacaaactgatgaaaagtgattcatacccacgttttataagatccagtgcctatcaggagcttctacaggcaaagaaaaaggggaaatctctcacgtccaagaggttaacaagccttgctcagtcttacttaaacggatcatcttgtagcatgaatgcagactggagtcactgcacacactttgtagctcaatgttgtgacctggagcagaggacattagaacaagatgttgcatgagcaaaggacctaaattgttatttttgtgtgtacattccatctccaatggactcttccgtctcaatgcctccattccaaactgttgtctgctttctttctccttctactatgctggatctgtgtctcctcccttttaaacaagttccaagtgaaagtaaaaccttttctttttttcccttcctttcctctctctctctctctcaaagcttccagttagacacacagttccactgaaaattcagtcagtcaaaaacgggaagaactgtaaaagaaaaaagtatatatcaataagtatacatgtggcttcacatttattaaacaataaattccgcacagaaagtttcatttcaccaatgtgtcacagtcagaaacaaactcatgtcttcggtctgttgtctgtacattctccgttaatgtttctcgcatttatttttataccatatttaaagaagaaacaccttttactccaaatgtattaaagttgatcccttctctgtaaatttgtgtatgtttatattgttgttttatctttcattaaaagatgtcagaatctcaaaaaaaaa

SEQ ID NO: 7671 - DNA, 439 bp, Homo sapiens
  SIMILAR (79)..(32): 621254mologous to Homo sapiens Human 5' EST secreted protein SEQ ID No: 433,accession number Y11833,Smith-Waterman Score=57.
  misc_feature (1)...(439): n = a,t,c or g
cccacgcgtccgaataagcttttactgcataaactttacatccagcactgtagttaagtacccaaaattgaatagaaataatggcnnnnnnnnnnnnnnnnnnnnnnnnnnnnnnnnnnnnnnnnnnnnnnnnnnnnnnnnnnnnnnnnnnnnnnnnnnnnnnnnnnnnnnnnnnnnnnnnnnnnnnnnnnnnnnnnnnnnnnnnnnnnnnnnnnnnnnnnnnnnnnnnnnnnnnnnnnnnnnnnnnnnnnnnnnnnnnnnnnnnnnnnnnnnnnnnnnnnnnnnnnnnnnnnnnnnnnnnnnnnnnnnnnnnnnnnnnnnnnnnnnnnnnnnnnnnnnnnnnnnnnnnnnnnnnnnnnnnnnnnnnnnnnnnnnnnnnnnnnnnnnnnnnnnnnnnnnnnnnnnnntggggcaaagcaaagggaaatatttttcttat

SEQ ID NO: 7672 - DNA, 825 bp, Homo sapiens
  SIMILAR (223)..(822): 1001254mologous to Homo sapiens dJ139D8.1 (guanylate cyclase activator 1B (retina)),accession number AL096814,Smith-Waterman Score=1053.
atggcggcgcggacagcgttcggtgctgtgtgccggcgcctctggcaggctgtcacgggaaaacttcactgtacactggtaacaatctctgatgaaccagacatattatataagcgcctctcggttttggtgaaaggtcacgataaggctgtattggacagttatgaatattttgctgtgcttgctgctaaagaacttggtatctctattaaagtggctagcatggggcaggagtttagctgggaggaggcggaggcagctggcgagatagatgtggcggagctccaggagtggtacaagaagtttgtgatggagtgccccagcggcacactctttatgcatgagtttaagcgcttcttcaaggtcacagacgatgaggaggcctcccagtatgtagagggcatgttccgagccttcgacaagaatggggacaacaccatcgacttcctggagtacgtggcagctctgaatctcgtgctgaggggcaccctggagcacaagctgaagtggacattcaagatctatgataaggatggcaatggctgcatcgaccgcctggagctactcaacattgtggagggaatttaccagctgaagaaagcctgccggcgagagctacaaactgagcaaggccagctgctcacacccgaggaggtcgtggacaggatcttcctcctggtggatgagaatggagatggccagctgtctctgaacgagtttgttgaaggtgcccgtcgggacaagtgggtgatgaagatgctgcagatggacatgaatcccagcagctggctcgctcagcagagacggaaaagtgccatgttctga

SEQ ID NO: 7673 - DNA, 1927 bp, Homo sapiens
  SIMILAR (26)..(88): 801254mologous to Homo sapiens MSTP040,accession number AF113220,Smith-Waterman Score=88.
  misc_feature (1)...(1927): n = a,t,c or g
caaacctacaccgttgatgtcccaaaaggatttcaccaaacctgtgataacaatctctgatgaaccagacacattatataaaattttaaagnttgcattgtcaagtccatctttcccttatagatttacctttactgataatgttttttgttgttgttgttttgagactgagtttcactcttgttgcccaggctggagtgcagtggcgcgatctcgtctcactgcagcctccaccgggcccgggttcacgcgattctcctgcctcagcctcctgagtagctgggattacaggcacgtgccaccatgtccagctaatttttgtatttttattagagacggggtttcaccgtgttagccaggatggtctggatctcttgacctcgtgatccgcctgcctcggcctcccaaagtgctgggattacaggcgtgagccaccgtgcctggcctgctttgggccatttttaaaagccatttatttctattcaattttgggtacttaactacagtgctggatgtaaagtttatgcagtaaaagcttattgaatgaatgaatcataggataaataatacaactagtaatttcttaagatcataaattccattacagtaacccctggtaggcaactctataaagttctgggctccaagaagaggtcagtgcatgccataaatgtgtttgatctgctgtgaagtatattcagtcttcaaaatgtaatgcttacatgagataaaatcggttggttaccacccccaaattagcatatgccagcctgcacaaaggtaaatagcaaaaactttaactgctcaatctgaattaaccaaagattccttctaggaatcttaaaaaaaaataagggtacgaacactccaagcacttattttcagatgcatcaactgacataaattaaaaatggtacaaactaataattgaacaccagtagcgtaacaaaatagaattttcattctttttgctttcagtcaaagtggtttgctcatgtttgctgaaatcagaactgaaacaatgaataaaaagaatagataaaagtggttcttccattaaagttccattccctgccctcagctgatgagggcacgagaactcaatggagcagttagggcagactcaaatcatctcagctggaagcactctccacttaaacatactcatctggcccacccttcatttcaaaatttaggcaaaaatggcctccctgaaggctttatgacttgctttcttctttttcttttgataagggttcccaagattggctccttgatgtgttctggtaactgttctaattgtgtctaaaaaaataaagaaacaaaactttgttacttccatggcaaccccttcaggtaaagtttcgctgaatatattccaagtagacatctgctgtgcttccagttagatgttctaactctaaacatctgtaaagtgttctcatttcatactgaactctgtgcttcttgtaaatatgcactgattggagaagagtaaatcgctctattttccttggaggttcatgtactttaatagaaatcccaagttcctttagcagcaagcacagcaaaatattcataactgtccaatacagcctttatcgtgacctttcaccaaaaccgagaggcgcttatataatatgtctgggttcatcagaggattgttaccacaggtttggtcaaatcctttggaacatcaacgtgtaggtttgaaaactgtacccacttcatattggtactgctatgtgtggggaaaaaaagagaaacagaagcaagccaccacttttgccctgtattgcccttagaagtgtttacagaaaaattccccaatccatgccataggcgccggcacacagcaccgaacgctgtccgcgccgccatcttgacttccaccgcactgcactaatggttatcgaaatacaaattt

SEQ ID NO: 7674 - DNA, 448 bp, Homo sapiens
  SIMILAR (34)..(189): 941254mologous to Homo sapiens Human secreted protein encoded by gene 88 clone HTEHV08,accession number Y41395,Smith-Waterman Score=257.
  misc_feature (1)...(448): n = a,t,c or g
attgcttttgaggcnccccacccgtccgcggatacctgcgtgtatcctgtgtttgccaaactcattctcttgggtctagcatctttcttctctctcagctacgtcttcatcgccagcatctacctacttggagagaagctcaaccactggaaatggggtgacatgaggcagccacggaagaagaggaagtaattgcacaccattttccaagaaccaagaaagaagaaaacacaagagatttttctcatccnnnnnnnnnnnncnnnnnnnnnnnnnnnnnnnnnnaacttaccaaagtgggggggccaaaaagggatccttaattttaaaaaaaggttcgggagggagcctaaatttgaaaactttggtttttttgaagggtggatggcccttcccaaaaacacctcttgttttttaaaaataaattatttttgaccttcggggaggg

SEQ ID NO: 7675 - DNA, 1037 bp, Homo sapiens
  SIMILAR (95)..(859): 1001254mologous to Homo sapiens dJ413H6.1.1 (hamster Androgen -dependent Expressed Protein LIKE PUTATIVE protein) (isoform 1),accession number AL022724,Smith-Waterman Score=1357.
agctctccggcctgctgttggacttaggctgtgacccacagaaggacgccagaaagtactcaagacattcacggtgccccggtcagcactcgccatgacgaagacttctacatgcatataccacttccttgttctgagctggtatactttcctcaattattacatctcacaggaaggaaaagacgaggtgaaacccaaaatcttggcaaatggtgcaaggtggaaatatatgacgctgcttaatctgctcttgcagaccattttctacggggtcacctgcctggatgatgtgctgaaaagaaccaaagggggaaaagacattaagttcctaactgccttcagagacctgcttttcaccactctggcttttcctgtatccacgtttgtatttttggcattctggatcctctttctctacaatcgagatctcatttaccccaaggtcctagatactgtcatccccgtgtggctgaatcatgcaatgcacactttcatattccccatcacattggctgaagtcgtcctcaggcctcactcctatccatcaaagaagacaggactcaccttgctggctgctgccagcattgcttacatcagccgcatcctatggctctactttgagacgggtacctgggtgtatcctgtgtttgccaaactcagcctcttgggtctagcagctttcttctctctcagctacgtcttcatcgccagcatctacctacttggagagaagctcaaccactggaaatgggtttctgttcagatcttgcaaagatggaggctagaatctgttggaatctgcttccagtggcccgattggaagtcaccagccaagcaccaactggtcaagaatatcaggtgaaatatcagggctataaaaatatttctagcccttgctactatctgacagcagttaaaggaataaaacaagtcggggtgaatctaacttcctatctgccaactaggatactttctactgggaaaaatgcttctcaatcaagaaaatatttataataaacataattttccaattacaa

SEQ ID NO: 7676 - DNA, 602 bp, Homo sapiens
  SIMILAR (168)..(350): 1001254mologous to Homo sapiens Human secreted protein encoded by gene 88 clone HTEHV08,accession number Y41395,Smith- Waterman Score=331.
  misc_feature (1)...(602): n = a,t,c or g
agagaagtaggttccaggaaacaaaaaggtcagaggtgtacccagtgaagacaacagcaggtgtgaaagccaagaaactgcagcgctcagttcactcaagaaacaaaggggttcaatatggatggactgcagatctccagatggaagcggggcatggccaggccagcatcctatggctctactttgagacgggtacctgggtgtatcctgtgtttgccaaactcagcctcttgggtctagcagctttcttctctctcagctacgtcttcatcgccagcatctacctacttggagagaagctcaaccactggaaatggggtgacatgaggcagccacggaagaagaggaagtaattgcacaccattttccaagaaccaagaaagaagaaaacacaagagatttttctcatccnnnnnnnnnnnnctgggggggggannnnnnnnnnnaacataccaaagtcggagggacaaaaagggatccttaaatttattaaaaggttggggaagggaccttaacttgaaaactctgggttttttgaagggtggactgcccatgccaaaaacaactcctggtatttaaaaattaattatctttgaccttgg

SEQ ID NO: 7677 - DNA, 1383 bp, Homo sapiens
  SIMILAR (275)..(553): 921254mologous to Homo sapiens dJ413H6.1.1 (hamster Androgen- dependent Expressed Protein LIKE PUTATIVE protein) (isoform 1),accession number AL022724,Smith-Waterman Score=437.
gggtgaattacagattgatgaagaggaggggcatggaggagataccaagcaaaacctgggggcccttccacctggccccatctcagaatgtagagccacagaccagtgagtctaggcagaaattgtagcacaggaagttagtgaggaaggaggtaaaagtaggaaaggacctcagtttgggaagagccaatatcaggaactaattcgcagatcggaatgtggcctgaatagaggagagggagagagtattaaggcaaatatgcagcaggtgatatacatattccccatcacattggctgaagtcgtcctcaggcctcactcctatccatcaaagaagacaggactcaccttgctggctgctgccagcattgcttacatcagccggtaagaatggctctactttgagacgggtacctgggtgtatcctgtgtttgccaaactcagcctcttgggtctagcagctttcttctctctcagctacgtcttcatcgccagcatctacctacttggagagaagctcaaccactggaaatggggtcagtgtcaggaactctaccctgattctgtatataaggatggcaaagagtcacacccagtcccccacatcactcgcccacatgccattctgttctatcaaaatagagatggcagaagtgccatcttccgcccaatctatgaactggtgtgaaaaactgctggttttccctccacgttgatgttgtttcttacgtccacgggattctgtgtctcctccagtctttgcctggttcatactcatgcatttcaacactcgcctcttccaggaagccttccctggtcagccccagatcttgcaaagatggaggctagaatctgttggaatctgcttccagtggcccgattggaagtcaccagccaagcaccaactggtcaagaatatcaggtgaaataaaacagttgccacagtggaaattccccaaacgtgaagccctcgggggatcacccaaatgttccacaccccagaggtgactcgggctgcgtaactctcagtcacagtaagctcacgttgctgaatgtacagttgggaagagatgtggacaaccacttagtcctcgagagcctgttgtgcaaactggctccagcacacctctgcgttcagagcagggaaatgacaagtccaaggtcacatgagtaccgggtcatccaaaaactttatttaaaaaacaaaacagaaatgtgtccacatcttgcagagctggacaaaagaaggtggtcaagagatcccaaattggtggaaactgtccccgttacaggaggaggaaggacgctgccaccactaccccagggactggcctatactcatgcttctgttccagtgttgctgtctcacatttgaaaccaatt

SEQ ID NO: 7678 - DNA, 626 bp, Homo sapiens
  SIMILAR (345)..(626): 491254mologous to Homo sapiens FLJ00012 protein,accession number AK024423,Smith-Waterman Score=168.
  misc_feature (1)...(626): n = a,t,c or g
cccaggaacttttgttggtgggtactagtagggtaaggcagttcttcccatcatgagggagaccttgggagactttcattaccaaatccattgctgccccgaccttcctgggactgatctgggtcaccctgggtctcctgatcttggagaagtcaagttcttatcccagacttgagaggttacaagcctccaggtctctggcaaagtgtggagatgatggacagccatttgtacacacaccagccagtcccttagcatatctctcttggttttgtctcaggtctgcctcagccacctccctgacgctgtcccactgtgtgaatgtggtgaaggggcttctggattttaagaagaggagaggtcactcaattgggggagcccctgagcagcgataaccagatcatccctgtgtgtgtggcttgcccgacttcctaacccgggctcaggatgtgcttgcagcctcctgggccactgggaggggcttgaccgcctgattccacctctggaatgttnttggggaagttcgcctgggaggccaaccagaccctgggagggagctggtggcagcatcaccagtgtgggactttgacccctcgggctaccacgttttagcagcaacttacaac

SEQ ID NO: 7679 - DNA, 768 bp, Homo sapiens
  SIMILAR (530)..(559): 1001254mologous to Homo sapiens FLJ00012 protein,accession number AK024423,Smith-Waterman Score=56.
atgaagacagtgggaagttgggaggtggtccgggactacaatcttcagctgtttttgcaagaaaacgctgtatttcacaaaccccagcccttccagttccagccttgtgacagtgatactaagaagagaggtcactcattggggggagcccctgagcagcgataccagatcatccctgtgtgtgtggctgcccgacttcctacccgggctcaagatgtgctggatgcccacctctctgaggtcaatgctgttcgttttggccccaacagcagcctcctggccactggaggggctgaccgcctgatccacctctggaatgttgtgggaagtcgcctggaggccaaccagaccctggagggagctggtggcagcatcaccagtgtggactttgacccctcggtgaggaactctgccccagtggcatgggattgtgccctctctgatctccacactgggcagggctaccaggttttagcagcaacttacaaccaggctgcccagctctggaaggtgggggaggcacagtccaaggagacactgtctggacacaaggataaggtgacagctgccaaattcaagctaacgaggcaccaggcagtgactgggagccgcgaccggacagtgaaggagtgggacctcggccgtgcctattctccgaagagacagcgaccatcgagaacgggccatgatgacgatggcggttttgtcgaaaagaaaagggggaaatgtggggaaaagagagatcagattgttactgtgtctgtgtag

SEQ ID NO: 7680 - DNA, 1589 bp, Homo sapiens
  SIMILAR (370)..(528): 981254mologous to Homo sapiens FLJ00012 protein,accession number AK024423,Smith-Waterman Score=266.
  misc_feature (1)...(1589): n = a,t,c or g
agcaggcgcgggtgtcccaggagctgaagaaggctgccaagcggaccgtgagcatcagcgagggcccggacaccctaggcgatgggatgagggagagaagggagactctggctctggcccctgagccagagcccctggagaaggaagcttgtgagaagtggaagaggcccttcaggtctgcctcagccacctccctgacgctgtcccactgtgtggatgtggtgaaggcgcttctggattttaagaagaggagaggtcactcaattgggggagcccctgagcagcgataccagatcatccctgtgtgtgtggctgcccgacttcctacccgggctcaggatgtgctggatgcccacctctctgaggtgcaatgctgttcgttttggccccaacagcagcctcctggccactggaggggctgaccgcctgatccacctctggaatgttgtgggaagtcgcctggaggccaaccagaccctggagggagctggtggcagcatcaccagtgtggactttgaccccttcgggctaaccaggttttagcagcaacttacaaccaggctgcccagctctggaaggtgggggaggcacagtccaaggagacactgtctggacacaaggataaggtgacagctgccaaattcaagctaacgaggcaccaggcagtgacttgggagccgcgaccggacagtgaaggagtgggacctcggccgtgcctatttctccagggaccattcaatgttccttttcctactgtaatgacgtggtgtgtggggaccatatcatcattagtggccacaatgaccagaagatccggttctgggacagcagggggccccactgcacccaggtcatccctgtgcagggccgggtcacctccctgagcctcagccacgaccaactgcacctgctcagctgttcccgagacaacacactcaaggtcatcgacctgcgtgtcagcaacatccgccaggggtttcagggccgatggtttcaagtgtggttctgactggaccaaagctgtgttcagcccgggacagaagctatgcactggccanactccctgtgatggggcccttttaaatctgggaatgtggaacacccgggaaaaactggaagaaacaagaactaacagggacccccattgcgctgcccgttcaaacgccgtggccctggtgcctactcccgggaagcccacatggtgaaacgtggacccagggcaggaaaggttgtgcttttggcagtagggcccacgacctgcctgccctgggctggaggcttttgcccgaagcctgaagcttcctttgggcgccatgccaggggttggggttgggactggagctggccttgggatttaatggggaagaaggcctggcaggacctggcctgtttgtttaaaaatgaagtatgggttgggggattacgctagtttttctttgtatttttatctctatctatctcctcactttttctcccaaagtagaaaaaaatgatatctgaacgaataaaaaataacatacatgacgtgatcattacatatgtgtatgatattgaatctattcagatcttgtagatctcataatatcatg

SEQ ID NO: 7681 - DNA, 463 bp, Homo sapiens
  SIMILAR (382)..(462): 921254mologous to Homo sapiens U5 snRNP-specific 200kD protein,accession number Z70200,Smith-Waterman Score=130.
gacttattttgcagacacattttcatgcagccttgactcttgttaggtgcttgaacataaattctgagttgagaggcccgaatttgtagttgtagtctatttaaagttgctgttcaagataggatgttgaagttggtttaatttctcagctccaggactgtgaacttggtgggtgcattcccttaaaagtctttccagccgtgtttaggcttcctctgagcctgcacacattcctgcccttgcccctctccaggaccttggcttctggtggtgatggtgcaacttctgcttcctgctgcaggtgccctggggctgtgagtatctcgtgactgtagcaaactgtggcttctccttaggtgctggtgtttgtccactcccggaaggagaactggaaagacagccagggccatccgggacatgtgcctagaaaaggacactctgggtctgtttctgagggagggct

SEQ ID NO: 7682 - DNA, 492 bp, Homo sapiens
  SIMILAR (316)..(477): 851254mologous to Homo sapiens U5 snRNP-specific 200kD protein,accession number Z70200,Smith-Waterman Score=235.
atgggacatcgccttggggttggtgaggatgaggaacctgatctgacatcaagggaggaaaggtcccggagagagcgagtgcgtcagtctcgaatggacacagatctggaaaccatggatctcgaccagggtggagaggcactggctccacggcaggttctggacttggaggacctggtttttacccaagggagccactttatggccaataaacgctgtcagcttcctgatggatccttccgtcgccagcgtaagggctatgaagaggtgcatgtgcctgctctgaagcccaagccctttggctcagaagaagtaatgtttaaccttgtatccaacagtgacgacaacgtgtttgtgggggcccccacgggcagcgggaagactatttgtgcagagtttgccatcctgcgaatgctgctgcagagctcggaggggcgctgtgtgtacatcacccccatggaggccctggcagagcagagcctcgtggaatga

SEQ ID NO: 7683 - DNA, 426 bp, Homo sapiens
  SIMILAR (106)..(330): 801254mologous to Homo sapiens U5 snRNP-specific 200kD protein,accession number Z70200,Smith-Waterman Score=313.
atggtgggcgcccctccctcagccttgctgccaccttgcagtttgatctcagactgctgtgctagcaatcagggggactccgtgggcataggaccctccaagccagcttgtgagacccagctgcctgtctccttccggcacctgatcttgccggagaagtacccccctccaaccgaacttttggacctgcagcccttgcccgtgtctgctctgagaaacagtgcctttgagagtctttaccaagataaatttcctttcttcaatcccatccagacccaggggtttggtgataactgggacaagcagattgtaagttattgtccagaaggacggtggttcctggacctgaaaaaggacgacaccatggctatctcgcttttcttttggtttctccggttcccccaacaggattcttttccttattag

SEQ ID NO: 7684 - DNA, 900 bp, Homo sapiens
  SIMILAR (640)..(888): 931254mologous to Homo sapiens U5 snRNP-specific 200kD protein,accession number Z70200,Smith-Waterman Score=420.
atggtgtccaggccccttcaagcattcctgcctgatgtagttttcctcccacagcgcctggccacttatggcatcactgttgctgaactgactggggaccaccagctgtgcaaagaagagatcagtgccactcagatcatcgtctgcacccccgagaagtgggacatcatcacccgcaagggtggtgagcgcacctacacccagctggtgcggctcatcattctgaaaatcactaccaagaatgcttttggtttgcacttgattgattttatgtcagagattcttaaacagaaagacaccgaaccaaccaactttaaagtggctgccggtactctggatgccagcaccaagatctatgctgggcgcgtggatgccgtccatgccgatgtatacagagtccttgggggggctgggcaaagatgcaccgtcttttgcttcttgcactgcaccgagaaggatctgattccgtacctggagaagctaagtgacagcacgctcaaggaaacgctgctaaatggggtgggctacctgcatgaggggctcagccccatggagcgacgcctggtggagcagctcttcagctcagcataccagagattttcaaaatactgtttaggactcttggctgttaactcatttgatcctcccaagaacctcgtgaggcagatggtgggccacgccaaccgccctttgcaggacgatgaggggcgctgtgtcatcatgtgtcagggctccaagaaggatttcttcaagaagttcttatatgagccattgccagtagaatctcacctggaccactgtatgcatgaccacttcaatgctgagatcgtcaccaagaccattgagaacaagcaagatgctgtggactacctcacctggacctttctgaccgccgcatga

SEQ ID NO: 7685 - DNA, 1827 bp, Homo sapiens
  SIMILAR (613)..(888): 861254mologous to Homo sapiens U5 snRNP-specific 200kD protein,accession number Z70200,Smith-Waterman Score=408.
ggcttcgagggcgcgggcgcacagcgcttccccgttcgggttctccccgccaaccagacaagctctcccggcacaaaccccgtggccagcgtgcagggccagcggctccccaccacgtggctctgtccgcacgaaggcccccatggaagtgctactgaaatgggaacaaccaaaaaggctgtaaagccaaagaagaagcacttacacagaactattgagcagaacataaacaacctcaatgtctccgaagcagatcggaagtgtgagacggccagtgatgatcgggaatgtgaaaatcagctggttctgctgcttggtttcaacacctttgatttcattaaagtgttgcggcagcacaggatgatgattttatactgtaccttgctggccagtgcacaaagtgaagctgaaaaggaaaggattatgggaaagatggaagctgacccagagctatccaagttcctctaccagcttcatgaaaccgagaaggaggatctgatccgattacttaagatggcccagggccatagggtagagactgagcattatgaagaaattgaagactatgattacaacaaccctaacgacacctccaacttttgccctggattacaggtatacatggactggtacgagaagttccaggacaggctcaacaagaaggtggtactcctgacaggcgagaccagcacagacctgaagctgctgggcaaagggaacattatcatcagcacccctgagaagtgggacatactttcccggcgatggaagcagcgcaagaacgtgcagaacatcaacctcttcgtggtggatgaggtccaccttatcgggggcgagaatgggctagagcccccaggtgaattgatgattccaaaaagaaggattctgccccctggggatattgatgcattttggctgcagcgacagctcagtcgtttttatgatgatgccatcgtgtcgcagaagaaggcagatgaagtattggagattttgaagacggccagtgatgatcgggaatgtgaaaatcagctggttctgctgcttggtttcaacacctttgatttcattaaagtgttgcggcagcacaggatgatgattttatactgtaccttgctggccagtgcacaaagtgaagctgaaaaggaaaggattatgggaaagatggaagctgacccagagctatccaagttcctctaccagcttcatgaaaccgagatggattttgccgatttcggaaccaccatcaaacaggattttcgcctgctggggcaaaccagcgtggaccgcttgctgcaactctctcagggccaggcggtgaagggcaatcagctgttgcccgtctcactggtgaaaagaaaaaccaccctggcgcccaatacgcaaaccgcctctccccgcgcgttggccgattcattaatgcagctggcacgacaggtttcccgactggaaagcgggcaaccatgcttgtccgagcgtctgaacgtctggctgagcgcggtgggcccctacgacccccagcacgcggctcagagggcgcccgcgcgccgcagccgctcccgccgtccgggctcctccccgcccacccagtacaagctcctccccgcccaaacccccgtggcccagcgtgcaggggcagcggcctccccacaccgggtctctgtccgcaccgaggcccccgtgggtttgctgggagagtggaggggccgtggccacacactctccgctgctcggcctccctggggtggcaaatggggcaccgccgtgcctgctgtcagctgcactcagctcagttcagtggagaacagacttactaggattcgggtgtaa

SEQ ID NO: 7686 - DNA, 969 bp, Homo sapiens
  SIMILAR (115)..(966): 751254mologous to Homo sapiens putative RNA helicase,accession number AF085356,Smith-Waterman Score=1075.
atgctgttcatcaaactggcctttcccctgttcatcaaactgcccagattctccaagcaaatattaaacatgtcctgcaaatctcaggaatcagcacacagagaaacacaaagaagaaccaaggtgcgagggcttattgagatcatctccaatgcagcagggtacgagaatatccccatccagcaccatgaagaaaacttcctgaggcagttggctcagaaggtccctgacaagctgaataaccctaagttcaatgatccgcacatcaagaccgaacctgctcctgcaggctcacctgtcgccgcatgcagctgagtgctgagttgcagtcagatacggaggaaatccttagtaaggcagtccggctcgtccaggcctgcgtggatgtcctctccagcaatgggtggctccagctctgctctggcagctatggaattggcccagatggtcacccaagccatgtggtccaaggactcatacctgaagcagctgccacacttcatctctgagcatatcaaacgttgcacagacaagggagtgaagagtgttttcgacatcatggagatggaggatgaagaacggaacacaattcttcagctgactgacagccagattacagatgaggtggtggataaggacagcatccgcagtggcgggccagcggtggtgctggtgcagctggagcgagaggaggaagtcacaggccctgtcattgcgcctctcttcccgcagaaacgtgaagagggctggtgggtggtgattggagacaccaagtccaatagcctcatctccatcaagaggctgatcctgcagcagaaggccaaggtgaagttggactttgtggctccagccactggtgcccacaactacactctatacttcatgagtgatgcttacatgggatgtgaccaggagtacaaattcagcatggatgtgaaagaagccgagacggacagtgattcagattga

SEQ ID NO: 7687 - DNA, 5521 bp, Homo sapiens
  SIMILAR (419)..(1423): 541254mologous to Arabidopsis thaliana putative U5 small nuclear ribonucleoprotein-specific protein,accession number AC002561,Smith-Waterman Score=890.
  misc_feature (1)...(5521): n = a,t,c or g
aagagatcagtgccactcagatcatcgtctgcacccccgagaagtgggacatcatcacccgcaagggtggtgagcgcacctacacccagctggtgcggctcatcattctggatgagattcatcttctccacgatgacagaggtcctgtcttagaagctttagtggccagggccatcccgaaacattgagatgacccaagaggatgtccgactcattggtctcagtgccaccctacccaactatgaagatgtagccacctttctacgtgttgaccctgccaaggtcctcttttactttgacaacagcttccgtccagtgcctctggaacagacatatgtgggtatcacagagaaaaaagctatcaagcgtttccagatcatgaatgaaatcgtctatgaaaaaatcatggaacatgctgggaaaaaatcaggtgctggtgtttgtccactcccggaaggagactggaaagacagccagggccatccgggacatgtgcctagaaaaggacactctgggtctgtttctgagggagggctcagcctccacagaagtcctgcgaacagaagctgagcagtgcaagaacctatagctgaaggatcttctgccttatggctttgctattcatcacgcaggcatgaccagggttgaccgaacactcgtggaggatctttttgcttgataaacatattcaggttttagtttccacagcaactctagcttggggtgtgaatcttccttgacataacggccttattcaaaggcacccaggtgtacagtccagagaaggggcgttggacagaactgggagcactggacattctgcaaatgctgggacgtgccggaagaccccagtatgacaccaagggtgaagggcatactcatcacatctcatggggagctacagtactacctgtccctcctcaatcaacaacttcctattgaaagccagatggtttcaaagcttcctgacatgctcaatgcagaaatcgtgctaggaaatgtccagaatgccaaggatgcggtgaactggctgggctatgcctacctctatatccgaatgctgcgatccccaaccctctatggcatctctcatgatgacctcaagggagatcccctgctggaccagcgccgactagatctggttcatacagctgccctgatgctggacaagaacaatctggtcaagtacgacaagaagacgggcaacttccaggtgacagaactgggccgtatagccagccactactacatcaccaatgatacagtgcagacttacaaccagctgctgaagcccaccctgagtgagattgagcttttcagggtcttctcattggcctctgagttcaagaacatcacagtgagagagggggagaagctggagctgcagaagttgctggagagggtgcctatccctgtaaaggaggagcattgaggaacccagtgctaagatcaacgttcttctgcaagccttcatctcacagctgaaattggagggctttgcactgatggctgacatggtgtatgtcacacagtcggctggccggttgatgcgagcgatatttgaaattgtcctgaaccgaggttgggcacagcttacagacaagaccctgaacctctgcaagatgatcgacaaacgcatgtggcagtccatgtgtcctttgcgcccattccggaaaactccctgaggaagtagtgaagaagattgagaagaagaatttcccctttgagcgtctgtacgacctgaatcataatgagattggggagcttatccgcatgccaaagatggggaagaccatccacaaatatgtccatctgtttcccaagttgggagttgtcagtgcacctgcagcctatcacacgctccaccctgaaggtggagttggaccatcacggccagactttccagtgggatgaaaaggtgcatggttcatccgaggctttttggattctggtggaggatgtggacagcgaggtgattctgcaccatgagtattttctcctcaaggccaagtacgcccaggacgagcacctcattacattcttcgtgcctgtctttgaaccgctgccccctcagtacttcatccgagtggtgtctgaccgctggctctcttgtgagacccagctgcctgtctccttccggcacctgatcttgccggagaagtacccccctccaaccgaacttttggacctgcagcccttgcccgtgtctgctctgagaaacagtgcctttgagagtctttaccaagataaatttcctttcttcaatcccatccagacccaggtgtttaacactgtatacaacagtgacgacaacgtgtttgtgggggcccccacgggcagcgggaagactatttgtgcagagtttgccatcctgcgaatgctgctgcagagctcggaggggcgctgtgtgtacatcacccccatggaggccctggcagagcaaggtatacatggactggtacgagaagttccaggacaggctcaacaagaaggtggtactcctgacaggcgagaccagcacagacctgaagctgctgggcaaagggaacattatcatcagcacccctgagaagtgggacatactttcccggcgatggaagcagcgcaagaacgtgcagaacatcaacctcttcgtggtggatgaggtgcaccttatcgggggcgagaatgggcctgtcttagaagtgatctgctcccgaatgcgctacatctcctcccagattgagcggcaccattcgcattgtggcactcagctcttcgctcttcaatgctaaggatgcggcccactggctgggctgcagtgccacctccaccttcaacttccatcccaatgtgcgtcccgtccccttggagctgcacatccagggcttcaacatcagccatacacaaacccggctgggtttcattggccaagcctgtgtaccatgctatcaccaagcactcgcccaagaagcctgtcattgtctttgtgccgtctcgcaagcagacccgcctcactgccattgacatcctcaccacctgtgcagcagacatccaacggcagaggttctttgcacttgcaccgagaaggatctgattccgtacctggagaagctaagtgacagcacgctcaaggaaacgctgctaaatggggtgggctacctgcactgaggggctcagccccatggagcgacgcctgggtgggagcagctctttcagcttcaggggctatccaggtggttgggtggcttctcggagtctctgctggggcatgaacgtggctgcccacctggtaatcatcatggatacccagtactacaatggcaagatccacgcctatgtggattaccccatctatgacgtgcttcagatggtgggccacgccaaccgcccttttgcaggacgatgaggggcgctgtgtcatcatgtgtcagggctccaagaaggatttcttcaagaagttcttattattgagccatttgccagtagaatcttcacctgggaccactgtatgcatgcccacttcaatgctgagatcgtcaccaagaccattgagaacaagcaggatgctgtggactacctcacctggacctttctgtaccgccgcatgacacagaacgccaattactacagcctgcagggcatctcccatcgtcacttgtcggaccacttgtcagagctggtggagcagaccctgagtgacctgggagcagtccaagttgcatcagcatcgaggacgagatggacgtggcgcctctgaacctaaggcatgatcgccgcctactattacatcaactacaccaccaattgaagctcttcagcatgtccctcaatgccaagaccaaggtgcgagggcttatcgagatcatctccaatgcagcagagtatgagaacattcccatccggcaccatgaagacaatctcctgaggcagttggctcagaaggtcccccacaagctgaattaaccctaagttcaatgatccgcacgtcaagaccaaacctgctcctgcaggcctcacttgtctcgcatgcagctgaagtgctgagttgcagtcagatacggaggaaatccttagtaaggcaatccggctcatccaggcctgcgtgggatgtcctttccagcaaatggggtggctcagccctgctcctggcaagctatggaactgggcccagatggtcacccaagccatgtggtccaaggacttcataccttgaaagcagctgccacactttcaccttttgaggcatattcaaacgtttgcacaggacaaggggaatggagagtgtttttcgacatcatgggagatggaggattgaagaacgggaacgcgttgcttcaagctgacttgacagccagatttgcagatggtgcctcgcttttgtaaactgcctacccctaatatcgaaactaccttaaggaggtggtggaataaggacaggcatccgcagtggcgggcccagtttatgtgcttggtgcagctggagcgagaggagggaagtcacaggcccctgctcaatgcgccttttcttccgcaggaaacgtgaagaagggctggtgggtggtgattggagatgccaagtccaataggcctcatctcaatcaaagaggctgacctttgccagccagaagggcccaaaggtgaaagtttggacttttttggcccccagcccactgggttgcccacaaacttacactctggtaccttccatgaagtgacgccttaacatggggatgtgccccaggagtacaaattcaagcgtgggatgtgaaagaagcctgagacagacagtgattcagattgagtccctgaggcattttactttttgggtaaagggagagttgagccctgaattaggaatgtgtacattgtaggaatcctgggttgtgggggagcaggtctgtggggcctcaggtctgggccagcccagggctggtggctgtccccgcctacctcccacttccttttcccttgttcacactctggatccaagtgacagcaggtgtccatgggtcaagcataaatcatatatagcattttccaggcatgttcctgggtagttccttttgagtctgacatttctaataaaaataatttgtagaaaccatttgtctttgtagtgattccaaattaaaagttttctttctcccaacctgaagggcacggccaaaaagatctggttattttttagcccaggaacgtgcttgttaatgagtatgtctggaggacagacctgctcattaggtgtgctgtcccctgtagccttcgtgagtcagcccagaggagggtacatgcgactgtgggcctgggcntcaagtggtacccacacatcagcactaccacaagaaccaacacttgagccttcgggaagctagattcacaggttagggggttttttctaggatggggggttcttgaaattttgcagtgtctgctcctgggaggcagcaccagaaaggggcactgaaatgtactagctggatgtgacccagtcttaataaacaggttttctaatccaaaaaaaaaaaaaaaaaaaaaaaaa

SEQ ID NO: 7688 - DNA, 518 bp, Homo sapiens
  SIMILAR (263)..(517): 971254mologous to Homo sapiens A human interferon-alpha- induced protein,accession number W80369,Smith-Waterman Score=444.
cgcgggctcggccgtgatgctctgggatcccgcgcttccgagactcgcagtctacgcgagctgcctgtttttttcctgcggggacgcgcatgagggccccgtccatggaccgcgcggccgtggcgagggtgggcgcggtagcgagcgccagcgtgtgcgccctggtggcgggggtggtgctggctcagtacatattcaccttgaagaggaagacggggcggaagaccaagatcatcgagatgaagattggataacccagaaattgactaatccagagtccgccgtacatgtgaaaatgatgccagaattccagaaaagttcagttcgaatcaagaaccctacaagagtagaggagattatctgtggtcttatcaaaggaggagctgccaaacttcagataataacggactttgatatgacactcagtagattttcatataaagggaaaagatgcccaacatgtcataatatcattgacaactgtaagctggttacagatgaatgtagaaaaaaggtat

SEQ ID NO: 7689 - DNA, 1732 bp, Homo sapiens
  SIMILAR (376)..(897): 771254mologous to Homo sapiens 21-JUN-1996 DNA encoding human interferon-alpha-induced protein p36,accession number A52599_cd1,Smith-Waterman Score=635.
cgcgggctcgtccgtgatgctctgggatcccgcgcttccgagactcgcagtctacgcgagctgcctgtttttttcctgcttggacgcgcatgagggccccgtccatggaccgcgcggccgtggcgagggtgggcgcggtagcgagcgccagcgtgtgcgccctggtggcgggggtggtgctggctcagtacatattcaccttgaagaggaagacggggcggaagaccaagatcatcgagatgatgccagaattccagaaaagttcagttcgaatcaagaaccctacaagagtagaagaaattatctgtggtcttatcaaaggaggagctgccaaacttcagataataacggactttgatatgacactcagtagattttcatataaagggaaaagatgcccaacatgtcataatatcattgacaactgtaagctggttacagatgaatgtagaaaaaagttattgccaactaaaggaaaaatactacgctattgaagttgatcctgttcttactgtagaagagaagtacccttatatggtggaatggtatactaaatcacatggtttgcttgttcagcaagctttaccaaaagctaaacttaaagaaattgtggcagaatctgacgttatgctcaaagaaggatatgagaatttctttgataagctccaacaacatagcatccccgtgttcatattttcggctggaatcggcgatgtactagaggaagttattcgtcaagctggtgtttatcatcccaatgtcaaagttgtgtccaattttatggattttgatgaaactggggtgctcaaaggatttaaaggagaactaattccatgtatttaacaaacatgatggtgccttgaggaatacagaatatttccaatccaactaaaagaccaatagtaacataattcttctggggagactcccaaggagacttaagaatggcagatggagtggccaatgttgagcacattctgaaaattggatatctaaatgataggagtgggatgagcttttaggaaaagtacatggactcttatgatattgttttaggtacaagatgaatcattagaagtagccaactctattttacagaagattctataaacaagcattctccaagaagacctctctcctgtgggtgcaattgaactgttcatccgttcatcttgctgagagacttatttataatatatccttactctcgaagtgttccctttgtataactgaagtattttcagatatggtgaatgcattgactggaagctccttttctccacctctctcaacacactcctcaccgtatcttttaacccatttaaaaaaaaaaaatcttaaagccaaaattagaaaaattaactcccctaccttttccaaagtgaatttttggagtttaatggttatcatgcagcttttgaggagtcttttacactgggaaagtttgtagaaattttaaaataagttttatgaaatggtgaaataatatgcatgattttaagtattgccatttttgtaatttgggttattatgctgatggtatcaccatctcttgaaattgtgttaggtttggttattttgtctggggaaaaaatatttactggaaaagactagcagttagtgttggaaaaacctggtggtgtttacaatgttgctaatcattacaaaacattctatattgaagcactgataataaatatgaaatgcaaaacctttttaaaaaaaaaaaaaa

SEQ ID NO: 7690 - DNA, 564 bp, Homo sapiens
  SIMILAR (1)..(165): 501254mologous to Homo sapiens Human secreted protein, SEQ ID NO: 6721,accession number G02640,Smith-Waterman Score=126.
atgcccaccaatcacaaggatctttataagagaaacaaggagaaacaggaccttgccctgtcactcaggatggagttcagtggtccaatcatggctcattgtagcctcaaactcccaggctcaagcaatcctaccacgtcagtcttcccagtagctggtgggaccatccagttgcaggaaaacgagcttaacacgcccactgattctacattatggcccagctcttcctcccggctgcgtctccaggcccgactcctgcctcccaacaacctctttggactcagtgcctgcccatctcctggcggccttggtcggcccacagcttcctcaagccaagctccccaggcccaggcccaactccggcctcccaacaaggtctttggactcagctcccccgcagcttccagcggccctggcctaagtcgtcctcaagtcggcctggaaatgggcctggaagagctgcaagtcggcctccccgggcccagctccgtcctctcggcggcctctccaggtttaatgacggtcatggcaactttttggcacaatgaaaaatatcgcccatga

SEQ ID NO: 7691 - DNA, 736 bp, Homo sapiens
  SIMILAR (375)..(166): 911254mologous to Homo sapiens bA476I15.3 (novel protein similar to septin),accession number AL137028,Smith-Waterman Score= 376.
tcagtcacgcagcgcacggacgaacggcagcggcgtgcggatactgcactcactttggcggattatcggaatacctctgttactggggtattcgctggtttgttctagagtgcttttggcctgcttttggcctggttccgatttttggccgcgaagcaggcgaaaaacctggctcagactcttgacgctgccctggctgccccaccactgcttctgcccgagagtcacgtgaggctgagagtaggggcaggggcagcagtggtgccagttggggggcggtccagtgggaggagcctcagcctcgcaggctgctccgtgggactgatgactgcatgatcttctgggcacctcacggatcttcaacttggcgaagaagatgtgtgcatagcaggtccactgctgctgaccctgtcctgactcccagccctgcctgaccccgagctcaaactgctcaggctctggcacaagcctggctgccctgccactgcctctgccccagacgttggggccttgacagcctggttggaaggggacaccccagccctgcctcaacacctggggggtctccataactagcacaggcaggtgggcaaccccaaagatcccaggactcacagtaccccctgagaacatggacagtatgtgggggtagcaatggagggcaggatggttatcttctcccaggtaaaagccatttaatcctttcagtttgggacggagtaaggccttccttttt

SEQ ID NO: 7692 - DNA, 887 bp, Homo sapiens
  SIMILAR (30)..(680): 311254mologous to Homo sapiens LDL induced endothelial cell protein,accession number AL359054,Smith-Waterman Score=123.
tcgctcttcctcccggctgcatctccaggccggactctggcccgactccggcctcccaacaacgtctttggactcagctcctgcccagctcccaggggccctggtaggcccacaaacttccctaagccaagctccccaagcccagctcaggcctcgcgggggcctctccaggctcagctcctggccctgcgatgacatctgcaggccccaaatggcctccggtcggggggctcctctaggcccagcttgggcctcccggcggccttcgcaggcccaaatcgtaccgaagtcaggctctccaggcttagctccagcctcccggcggcctctgcaggcccaaggcgtcctcaagtcggcctggaagtgggcctgggaagagcagcaagttcggcctccctgggcccagctccgtcctcttcgggcggcctctccagggtgcaaaacttcctcgagttcagcctctccagggcccagctttttcctggcctcccagtggcctctttcggcccagcccagctcatggctctcggcggccttcccaggcccccgcttttgacttttggcagcctcttcaggcgcagaacttgatctccagtcggcctttgcaggcccggcctcctggcctttcgaaggcctgcacgggcccggcctcggcctcggcctcacagcggactctccacgcccagctagctctcgcctcactgcggtctccccagtccaaagctcctggctttcggccacttcggcaggtccagctcctgcctgccagtggcctctttaggcccagctcattcctcacgtcggccattccaggccccgtttttcccttccggcagcctcttggcctctaatttgtttatcttttgtgtataaataccaaaatattg

SEQ ID NO: 7693 - DNA, 429 bp, Homo sapiens
  SIMILAR (2)..(91): 701254mologous to Homo sapiens Human secreted protein, SEQ ID NO: 7795,accession number G03714,Smith-Waterman Score=117.
tcctgacctcaagtgatccacctgccttggcctcccaaagtgctgggattacaggtgggagccaccatgcccggctgggaaaatattttctcctccatgaaccatactctcaatgcactaactggtgctgtgacaagcaccagggacaacagttagttgcaccgggtcagttgcatcagctctccctggtgttgctgtctctccccttgcccttgcagggtgagcgcagggacagggcgtgtcccttcatgtctgtgtcactcaggtgcctggaacaggcttgaccaggatattaacaggaataacagctgctagtgtgagccaccacacctggcccacttccttctaatgctggaatgaatgttcctgtcaactttcagacacacttggccagtgcagccagctgtcctgctcttgagtgaggacaca

SEQ ID NO: 7694 - DNA, 1392 bp, Homo sapiens
  SIMILAR (583)..(906): 691254mologous to Homo sapiens DC30,accession number AF255792,Smith-Waterman Score=358.
ttttttacacacaaaatatcttttattctgtggaatcaaagctccacacaagtactttataagatccattattttttttttttttttgagacagagtcctactccattgcccagggtggagtgcagtggggcaatcttggctcactgcaacctccatctcctgggttcaagcaattatcctgcctcagcctcccgagtagctggaactacaggtgcgcgcccccatgcccggctaattttgtatttttagtagagatggggtttcactggattaagccaggctagtctcggaactgacctcgtgatccacctgcctcggcctcccaaagtgctgggattacaggtgtgagccaccatgcccagccctaatgtagtatttttaaatgatatgattatacaacaactttctttaaaatctaagttcacaaaaatttgtcagtacatcatctgttttatctctattgactataattaccagttgtaagaacaattctaaccatattaatacctgacagaacgttgaggcctgattataactgggatattggggtagcatccagttaaagtatcagtagagcttggatgtatcaaagaaaatattttattcaagttcccaaaacaaacttgaggagttatgctgggtttgaattgaagaaaaaaggccaagttaaaataggaaaacaaatggttttcatttggtggcagttgaaatcaaagtatacatgtgtatacattctaatccgtcatctatcccatgtggcattttccaaggttttaagagtctaccaggccaaaccctttgccactttcactgcttttgctttgcttttcccctttcttttctctcgctttgccttcagcctttttctttgccttttggttcatccatattggggtaactgtccattgctggtctagaaagagtctttttttgtttctcttataattcagtctccattttcatgtcatctttttcatcttttacctcacattgcattttctcttggcaatgtttgggtttgggtaccaccacagttgctatctcttgaacatctttcattaaaacatcaccgtctagtttgagaatacttttaagcctgctggcctcctttgggcgcattcttttttctcttttcagcacgcatctttcttttccacttactccgtaagcttttagccatgttttacctgagaaacgaacacccacacctcacgctcacgccgaccggcatggacagtacccaatatggatgaaccaaaggcaaagaaaaaggctgaaggcaaagcgagagaaaagaaaggggaaaagcaaagcaaaagcagtggaaagtgggcaaagggtttggcctggtagactcttaaaaccttgggaaaatggccacatggggatag

SEQ ID NO: 7695 - DNA, 834 bp, Homo sapiens
  SIMILAR (589)..(831): 961254mologous to Homo sapiens dJ310O13.3 (novel protein),accession number AL031658,Smith-Waterman Score=408.
atgcctatcttgttcaccactgtatcctcagcacttagtggggcccagcatatagcagatgctcagtgtgacagaaaagggcaccgcactacaattcaggggtcaagggtcaacctggtccagccctctgtgggtcccaaggtggaggagacgcagtgctggggtccaggccgagggatgcctggcgcgccggaagcacctagagagcggcgcgtgcgcagcgggagtcgaagcggagatcccggggtcgcgcgagagccgcaagcggagttggtgggcgctatgctatcacccgaggcagagcgagtgctgcggtaccttgtagaagtggaggagctcgccgaggaggtgctggcggacaagcggcagattgtggacctggacactaaaaggaatcagaatcgagagggcctgagggccctgcagaaggatctcagcctctctgatgaggaaaacaacgtaaaatgcgtaattgaaaattgtaagaaagccagagatggaattggacttggggtgggtgttgagaatatatatccagaagaatgggacactttagatgaggccaagtggctgtggcagtggaagcaaatggggaaagatgtgatggtttgcttcgggaacatgtttatcaagatgcctcaccctgagacaaaggaaatgattgaaaaagatcaagatcatctggataaagaaatagaaaaactgcggaagcaacttaaagtgaaggtcaaccgcctttttgaggcccaaggcaaaccggagctgaagggttttaacttgaaccccctcaaccaggatgagcttaaagctctcaaggtcatcttgaaaggatga

SEQ ID NO: 7696 - DNA, 1391 bp, Homo sapiens
  SIMILAR (86)..(232): 1001254mologous to Homo sapiens Human secreted protein, SEQ ID NO: 6384,accession number G02303,Smith-Waterman Score=236.
ggggggttaattccgcgtgcgcagcgggagtcgaagcggagatcccggggtcgcgcgagagccgcaagcggagttggtgggcgctatgctatcacccgaggcagagcgagtgctgcggtaccttgtagaagtggaggagctcgccgaggaggtgctggcggacaagcggcagattgtggacctggacactaaaaggaatcagaatcgagagggcctgagggccctgcagaagggatctcagcctctctgaagatgtgatggtttgcttcgggaacatgtttatcaagatgcctcaccctgagacaaaggaaatgattgaaaaagatcaagatcatctggataaagaaatagaaaaactgcggaagcaacttaaagtgaaggtcaaccgcctttttgaggcccaaggcaaaccggagctgaagggttttaacttgaaccccctcaaccagggatgagcttaaagctcttcaaggtcatcttgaaaggatgagactcaagaaccaagatgggggaccagcaaccccccagggttcatgggaggacccacggacccctccaacctttgacacctgttaagggacagggttcttgccctgttaaggggcccagcccgtcaggaatctggccatgaaaacctcttttgtagtgcttggctactctgtgatggcaggagggaaccttcagcctgtctggcttgctgggacctgggacaccaggggcttcggttggacacaagatctattgacgggccttggtagccaccagtgggtgtgtggggcagtggctgtgggggtgtaagaatgactgcaacaggcacttcccaacaatggccttgctgctcacatggaccctgcgcctgtgaggagggcgggcagggcagagtggagtgtcattccaacattcctctcagagggcccagaggtttttcaggctggtgcccatgcgattggaataaagccaggaggctcatgggtggttgctgaatgaagaacagaatcttggtggccttgtggctcaaccaacagccaatctgtggggcaggccacccccccccttcccgccaggttccaaattttgccacttttttccctgcttgattccaagagtagggttgtgccttagcagcccgttcgtggccactcgtttactcaggagggccttgcagagtccctgcacccaggccctgggtgagtggatgcgcctcttaccatatgacacgtgtcaagatgcccttccgccccctcctgaaagtggggcccggccagcactgctcgttactgtctgccttcagtggtctgaggtcccagtatgaactgccgtgaagtcaaaactcttatgtgttcattaagggctcaataaatgttagctgaatgaaaaaaaaaaaaaaaaaa

SEQ ID NO: 7697 - DNA, 985 bp, Homo sapiens
  SIMILAR (331)..(456): 711254mologous to Jaculus orientalis NAD-dependent glyceraldehyde 3-phosphate dehydrogenase (phosphorylating),accession number X87226,Smith-Waterman Score=155.
ctgttttcactctattaaatcttgcaactgcacactcttctggtccacgtttgttctggctcctgctgagctttcgctcaccgtccgccactgctgttcaccgccgttgcagacccgccattgacttccacccctctggatctggcagggtgtcagctgcgtttctgatccagcaaggcacccattgccgctcctgatcgggctagaggctcgccattgttcctgcatggctaagtgcctgggttcatcccaatcgagctgaacactagtagctggattccatggttcgcttccatgacccacagcttctaatagagctataacactcatggcataactttccatgttcccactgccaatgtgttggttgtggacctgatgtgccatctggagaaacttgccaaatatgatgacataaagaagatggtaaaacaggcattggagggtccccttcaaaggcattctggactacactgagcaacaggttgtctcctccaactttactagtgatactcattccttcacctttgatgctggggctggcactgccttcaacaaccactttttcaaactcattttctgatacgacaatgaatttggctacagcaacagggtggtggaactcatgttccacccggcttccaaggggtaagagccctgtgtaagttatagctgccaacattccaatcaaggtcagagaactgatagaaaatgacaatgcagctaaaccatgactacttccaagttcttcaaatagggacttcactttttcccactctgtagaatttttgttattgggaacattcaatggaacaaaggcactgactccaagattgtcacttccataaacaatagcactagaagtgagcaccacccaactgagtgagtccccttctgatacagcagtacagctgtaggtcctccctggacccaccctgccctggcagatcttctgcaataaccaagcaaatgccagttccttcat

SEQ ID NO: 7698 - DNA, 1013 bp, Homo sapiens
  SIMILAR (111)..(605): 341254mologous to Leishmania major L8453.1,accession number AC008054,Smith-Waterman Score=186.
tcaggcgcgcagggcccgctctcgaaactcgcgcgggctctcgcagtcagccgcgcggcctttagccgcgaaaacagcgtggcgcacggtggcgccgccgcagccgtgggccgccgcgcccaggtagcgctccagctgcccgcatagctcctgcagcgccacctcgccggggcccgcgcgcgcctgccagagcagcgcccacagcccgagccccagactccaggccccgccgccgcccacgtccagctgcggggagcagcgttccagaggcggccacagcgccgctagctgccagcgcgcgccgcggaaccccgcggccgagaaccggccggcccagttgggcgggaacacggcagggcagctgggcggggacacagcggccttgggtttgggctccagccccagccgggccccctcgcgccgctgcggctgctgcgcggtgaggtcgtgacaagtcacagctaacttgccctccgcgccattccacgccaccaggaagcgcagccggtgcctctcggcatcggcgaagaggccttgccggaccggcgcccagccctccaggctgtcgagctgctcgtcctccatggccgtcggcggcagcggccctaggactcggcgggcgcgggcctgacctcgtcgcactgcattgtgaaatccactggcccttagaatttcaaagtctgtgctgttgtcttctaaccagtcgtggtggcgaagcctcatgccatcctgagtttcacttgtttatgcatgactttctccctggaagcttttaggagtttgtcttttccttggtgagctgaaatagcacaacagtgtacttagtgtgggtcttttttcattcattatgctgggtacaccaaatgaacaggcctatggataggctctttcaaagttggagtcttgaatcttgtcatatttttgttgttaactttctcttttccattttatttgttcatttggaagtgtctgttaattggattttagacctcttgtcttgagtcttatatctc

SEQ ID NO: 7699 - DNA, 555 bp, Homo sapiens; identical to SEQ ID NO: 2046
  SIMILAR (280)..(324): 801254mologous to Mus musculus alpha-1 type IV collagen,accession number M13043,Smith-Waterman Score=73.

SEQ ID NO: 7700 - DNA, 799 bp, Homo sapiens
  SIMILAR (117)..(242): 421254mologous to Homo sapiens type III procollagen (aa 892- 1023),accession number X01655,Smith-Waterman Score=71.
cctgggcaagtatatcactggtgacaaggtgctggcctcaaacacctaccttccaggacctcctggcctgcctgggggccagggccctcccggctcaccaggaccaaagggaagcccaggctttccccggtatgccaggccttctggggcagcccggctcacggggctcaattgggacccatgggaccatctcttgatctgtcccccactaagcaaggccggaggggccctgtgggtcctccagggccaccagaaagagatggttctaagggggagagaggagcgcctgggcccagagggtctccaggaccccctggttctttcgacttcctgctacttatgctggctgacatccgcaatgacatcactgagctgcaggaaaaggtgttcgggcaccggactcactcttcagcagaggagttccctttacctcaggaatttcccagctacccagaaaccatggacctgggctctggagatgaccatccaagaagaactgagacaagagacttgagagcccccagagacttctacccatagcacatcccaacaccgtcacgccaaaggaagagaaagatcaactcacctgcaagttaaaccatctaaagagaagaaagaccacttggagacctagaaaacatacatttttctcttctcttcgtcctgacgatctgtccactcctcttcttccaaatacgatgctattttcagagccctcttgtacgcctgcagacatgagggagtgaatgattgatttacctgcttctcactaagagtccattggggaggtttgcatagt

SEQ ID NO: 7701 - DNA, 373 bp, Homo sapiens
  SIMILAR (179)..(373): 981254mologous to Homo sapiens bA48B24.1 (A novel protein containing a formin binding protein (FBP28) domain),accession number AL161936,Smith-Waterman Score=324.
gatagggaagtaattttatgaccttgggccattttcacaaagaaatgagatctaagtttcagaacttgactgtcttctttaaaacaccacattttacatgtttcaagacgattacctagattttggggggagagatgtggattagatttggagaccatctcaccagattttgacatttcaggttagtactccagtagttaagcaaggaccagtgtcacagtcagccacacagcagcctgtaactgctgacaagcagcaaggtcatgaacctgtctctcctcgaagtcttcagcgctcaagtagccagagaagtccatcacctggtcccaatcatacttctaatagtagtaatgcatcaaatgcaacagttgta

SEQ ID NO: 7702 - DNA, 1639 bp, Homo sapiens
  SIMILAR (267)..(953): 591254mologous to Homo sapiens Human secreted protein encoded by gene 74 clone HGBAC11,accession number W78199,Smith-Waterman Score=569.
tgcgcccgctctcccccctccccgacacacactcacaggccgggcattgatggtaatgtatgcgaggaaacagcagagactcagtggatggctgtcacgaccggaggggggactcgcagccttaccaggggggtgatgttttacacgcactgaactattcatggcagaatcaccccatgtggcggctatcacaccacatgaaaagatggcgagacggccttagatccttcaccactccatgaactgctgctgcatatctgatagtccctgaaaacaaattaccagtgacagcacaaggtcacagtaaggccaaaaatgtgcatactcacagagttagagagagggatggtgggaccagttactctccacaagaaaattcacacaaccacagtgctcttcatagttcaaatttcacattctttctaatccaagcaataacccaaggcaaaactttcagatgcaatttttaagccttatgattctggcagatgactggtctggagcatattagctcttctggggaaaagtactactacaattgtcgaacagaagtttcacaatggggaaaaaccccaaagagtgggcttggaaagaggacagagaccaaaggatggcaaacaagatgggcagtcaacaggcttcccaaatgttaggggattacaggaaggagagggtgatgccaaggcaacagcccacttagtggggtttggcccagtggggattgggaggacaagcattcccagtgatgcccagtagtttgctccccacagaatattttgtctcaaacaagcagacacaatgacagagactacagactgccaagagcagagactcacagtagttcctacgcccagtacagcaccccatcaaacctagtggttcatccaactgctaccccaagcactgttccttctagtccatttacgctacagtctgattcaccagccaaagaaatcatttgatgctaatggagcatctactttatcaaaactgcctacacccacatcttctgtccctgcacagaaaacagaaagaaaagaatctacatcaggagacaaacccgtatcacattcttgcacaactccttccacgtcttctgcctctgcgactgaaccccacatctgcacctccaacatctgcttcagcgggtccctgtttctcctgttccacagctcgccaatacctcccttacttcagggacccaaatcttcttaggacaattgctgtcctgctttgcaaggccacggtggcagctttaattaattcttaatgtgggacatatcttaaaattaaatgaagttcttacagcagctgtgacacaagcctcactgcagtctataattcataagtgtcttactgctggaccatctgctttcaacataacgtctctgatttctcaagctgctcagctctctacacaagcccagccatctaatcagtctccgatgtctttaacatctgatgcgtcatccccaaggatcatatgtttctccaaggaataaggcacacctcaaacttaacacagtccctattcaaacctttggattcagtactcctcctgtttcatcacaggccaaaggttaggtactccagcctggcgagagagtgagactccatctcaaaaaaaaaaaacaagaac

SEQ ID NO: 7703 - DNA, 2372 bp, Homo sapiens
  SIMILAR (971)..(1483): 571254mologous to Homo sapiens bA48B24.1 (A novel protein containing a formin binding protein (FBP28) domain),accession number AL161936,Smith-Waterman Score=330.
atgcacttaattcctccagcaacaaattgtgacacacttgtggaatgttgtctaccagggaagctcactagagatttagtgtgcacggcttttactggatttgggaccagttactctccacaagaaaattcacacaaccacagtgctcttcatagttcaaattcacattcttctaatccaagcaataacccaagcaaaacttcagatgcaaatattttgtctcaaacaagcagacacaatgacagagactacagactgccaagagcagagactcacagtagttctacgccagtacagcaccccatcaaaccagtggttcatccaactgctaccccaagcactgttccttctagtccatttacgctacagtctgatcaccagccaaagaaatcatttgatgctaatggagcatctactttatcaaaactgcctacacccacatcttctgtccctgcacagaaaacagaaagaaaagtattacagcaactgtcaaaacacaacaggaaagtaatgattagaagtgcacttattaccagtatcattttagatcttctgtatattgaaaaggatttgagataccagaaaaatatagaatctacatcaggagacaaacccgtatcacattcttgcacaactccttccacgtcttctgcctctggactgaaccccacatctgcacctccaacatctgcttcagcggtccctgtttctcctgttccacagtcgccaatacctcccttacttcaggacccaaatcttcttagacaattgcttcctgctttgcaagccacgctgcagcttaataattctaatgtggacatatctaaaataaatgaagcccagccatctaatcagtctccgatgtctttaacatctgatgcgtcatccccaagatcatatgtttctccaagaataagcacacctcaaactaacacagtccctatcaaacctttgatcagtactcctccgtgtttcatcacagccaaaggttagttactccagtagttaagtcaaggtaccagtgttcacagtcagccacacacagcagcctgtaactgctgacaagcagcaaggtcatgaacctgtctctcctcgaagtcttcagcgctcaagtagccagagaagtccatcacctgggtcccaattcatacttcttaatagtagtaatggcattcaaatggcaacagttgtaccacaggaattctttctggcccgattccacgtgtttcatttaacgcctggcactaggcggccaccatttcagtggaaaatctcattaaaacacgtttcaagggatgggcctgcagattcatggcaggaggaaggcagggcatcaaggtttacggcggaaggaaggcggcattaacaggggggaactattttcacatgttccgaaatttgtactgaattaaaaaatttaagatctttagtccgagtatgtgaaaattcaagcaactttgccgagagccaaaggatactattttttgagacaacaaaattaagggaaccctgaaaaagccctaaaaaaatcccagaatcccccctccatggtgtggaaagatgtggaaataaattgccaccatggttttgaagaaaccaggaaacctgtaaaatcctgttgcccccccaaccctaaacatttttgaagcctgcatttaaagtagacctttggacccgttaagcctgggccaaaggaaatgaccaaggggacggggtcctgtgagagtcaattccaggggaaagataccaagattgatttgtaaaaccccttgaaatgtagatttcttgtagatggtatccttcacgttgtaaatatgttttgtagagtgaagccatggggaagccatgtgttaacaggagctttaggacatcccaaaacttaatccaatgcttggaggtgggctaaaataccttagcctttttacctgttaaaccttgtctgcaaaattagcttttttaaaaaaaaaaaaaaaaaaattgggggggttaatttatcattcagaaatcttgctttttaaaaaattcagggcaagcgccaggcgatttgtgtttaaggataccattttgaaccatatgggcagtgtacaaaatatgaaacaactgtttccacacttgcacctgatccaagagcagtgcttctccatttgttttgcagagaaaggtttttcatttcccgtgtgtttccatttccttctgaaattctgattttatccatttttttaaggctcctctttatctcctttcttaaggcactgttgctatggcacttttctataaccttttcattcctgtgtacagtagcttaaaattgcagtgattgagcataacctacttgtttgtataaattattgaaatccatttgcaccctgtaa

SEQ ID NO: 7704 - DNA, 2286 bp, Homo sapiens; identical to SEQ ID NO: 3628
  SIMILAR (1029)..(1124): 871254mologous to Mus musculus Pro-Pol-dUTPase polyprotein,accession number Y12713,Smith-Waterman Score=153.

SEQ ID NO: 7705 - DNA, 3632 bp, Homo sapiens
  SIMILAR (3303)..(3157): 341254mologous to Mus sp. alpha 2(XI) collagen,accession number S54563,Smith-Waterman Score=74.
  misc_feature (1)...(3632): n = a,t,c or g
atggcttttctgaccaatgtacttgcttttcatttcatttttgtttttgttaaagagggtaagccagagaaattttcatttggtcttctggatcttccttttcgtgttggagttccatttaatatccctctggagtttcaggatgaatttggtcataccagtcaactagtaactgatattcagccagttcttgaagcaagtggtttatctttacattatgaagaaataaccaatggaccaaattgtgtaattcgaggtgttacagccaagggccctgtaaactcttgtcaaggcaaggtngctccaaaccttccagtctatgttgtagattgcagtagttctggaaccagtattttaacaggatctgcaattcaagttcagaatattaaaaaagaccagacgcttaaagcaagaattgaaatacctagttgtaaagatgtggcacctgtggagaagactattaagttgcttcccagtagccatgttgcaagactacaaatattcagtgtagaaggacaaaaggcaattcagatcaaacatcaggatgaggttaattggatagcgggtgatattatgcataatcttatttttcaaatgtatgatgaaggagaaagagaaatcaatataacatcagctttagcagaaaaaattaaaggtctgcttcctgatgtgcaagtaccaacatctgtaaaagatatgcgctattgccaggtttcattccaagatgatcatgtgtctttggaaagtgcgtttacagtaagcatgttggaactacttcaattaatggtgtcactaaagacttctaacttgttaaacaatttcagaccacttcctgatgaacctaaacatttaaaatgtgaaatgaaaggaggaaaaacagtacagatgggccaagagcttcaaggagaagtagttataataattacagatcagtacggaaatcagattcaagcattttcaccaagttctttatcttctttgtcaattgctggggttggacttgatagctcaaatttgaaaacaacctttcagtccattccagtgattaatggaagagatttacagaaccctattattgttcaactttgtgatcagtgggataatccagcaccggtacaacatgttaaaataagtcttacaaaagctagcaatttaaaggttaaagccatctataacaaaagtatcatagaaggacctataattaagttaatgattcttccagacccagaaaaacccgttcgtctcaatgttaaatatgacaaagatgcatccttcttagcagggggtcttttcactggatatgttcgtccagtaccagtgccacgcagtttaaatagtgatatttcctattttggtgttgggggcaagcaagctgtcttctttgttggacaatcagccagaatgataagcaaacctgcagattcccaagatgttcacgagcttgtgctttctaaagaagattttgagaagaaggagaaaaataaagaggcaatatatagtggatatattagaaacagaaagatttctatgtttgaaaaagggaaggtacctaagattgtcaacctaagggaaatacaagacgacatgcagacgttgtatgtaaacacagcagctgatagttttgaattcaaagctcatgttgaaggagatggtgtagtggaagggattatcccttatcatccattcttatatgatagagaaacttaccctgatgatccatgctttccatcaaataattttggaatcagctttgtacattcacttgaagtaattctanaattaaaagatgaagatgatgaagatgattgtttcatacttgagaaagcagctagagggaaaaggcctatttttgaatgtttttggaatggacgattaataccatatacatcagttgaaganagagggcttgcaccaattgaatgctacaataggatatctggtgcattattcactaatgacaaattccaggtcagcacaaataaattgacgtttatggatcttgagctaaaattgaaagataagaacaccctttttacaaggattttaaatggacaggaacagcgaatgaaaattgacagagaatttgctttgtggctgaaggactgtcatgagaagtatgataaacaaataaaatttacactttttaagggagtaattacacgtcctgatcttccttctaaaaagcaaggtccctgggcaacatatgcagcaatagaatgggatggaaagatatacaaagcaggacagctggaacctcaggcactatatgatgaagtaagaactgtgccaattgcaaagctggataggacagttgctgagaaagctgttaaaaaatatgtagaagatgaaatggcaagcctgtggatcctgggctacaaacctgtacagcacatgactgtactgagtactgcaggcaattgtaacacaacgttttggaagaaaataaacattaccgtgatactaagatgtagatctctgaccaaggtcctactggcaactgagcgaacatttgaaacagctggtgtaggtggtttaattttaggtcaagttgaagaagcaagattaaaagaggcccaattgcgaaatgaactaaaaatacataatattgacattcctacaacacaacaggtgccacacattgaagcacttctgaaaagaaagctatcagaacaagaagaactgaagaaaaaacctagaagatcgtgtactcttccaaactatactaaaggcagtggagatgttttgggaaaggggcagagtacaggactgggacccgtggaagttacacagtccagcccatcatctaggacatcagagtacttctggttaacaaagttctgctggctggaagactgggcatctggtgaaagcctcaggctgcttccactcatggtggaaggtgaaggggagccagtgtatgcagagatcatatggcaaaagagggatgaaactgttaaagatggagtcaccttatacctgctacagtcggtcaatcagttactactgacagctacgaaagaacgaattgacttcttacctcactatgacacactggttaaaagtggcatgtatgaatattatgccagtgaaggacaaaatcctttgcnaatttacacgcacgtgggagaccgcgaagcgcaggcagcgttaaaactagggcgctggagtcacccccgtaccccgaatgccgtcggcgctccagggcccccagagggtgcggggggcggggacgctgtgacgtcacagagcgcccttctgacgttctcacggacccgctttgcctcgggggcccacgctggagcccacccagtactactaagaaatgaggaggaaaaaggggcgccggctctcgtagcgcctattttctcggcagagggacccacgtgctcgctttggtggactctgcgcccggcgagtaccgccggcctgaagcttcccgcacgccgcgtccacgcgacccagccagagagggctcagtcagccggcgcggcacctacaagctcagtcgggatcctggagaggcgggaaggcagcggggccctttccacagagagaacacagctcttcgggagattcccccgctgccacccgagccctgctctcccgcctcggcctctgaggactacccgcag

SEQ ID NO: 7706 - DNA, 594 bp, Homo sapiens; identical to SEQ ID NO: 5069
  SIMILAR (3)..(53): 941254mologous to Mus musculus Pro-Pol-dUTPase polyprotein,accession number Y12713,Smith-Waterman Score=79.

SEQ ID NO: 7707 - DNA, 561 bp, Homo sapiens
  SIMILAR (1)..(414): 781254mologous to Mus musculus Pro-Pol-dUTPase polyprotein,accession number Y12713,Smith-Waterman Score=536.
atgacagtggattatcgtaagcttaaccaagtggtgagtccaattgcagctgctgtaccagatgtggttttattgcttgagcaaattaacacatctcctgatacctggtatgcagccattgacttggcaaatgcctttttctccattcctgtccataaggcccaacagaagcaatttgccttcagctggcaaggccagcaatatacctttactgtcctacctcaggggtatatcagctctctggctttgtgtcataatcttattcgaagagaccttgatggctttttgcttctgcaaaatatcacactgctggtccattatgttgatgacattatgctgattggatccagtgagcaagaagtagcaaatgcactggacttattggtgttttctgaccatctagccataaagtgggtcatgcacagcagcattgcatcatcaagtggaagtggtatatgcgtgatcaggctcaagaaggtcctgaaggcacaacctgcaccaatggcctcatggggggttctctatgatcagttgacagaagaagagaagattagggcctag

SEQ ID NO: 7708 - DNA, 1275 bp, Homo sapiens
  SIMILAR (523)..(786): 711254mologous to Mus musculus Pro-Pol-dUTPase polyprotein,accession number Y12713,Smith-Waterman Score=318.
atggaaaagaatgacatagaccagagccgaagaagaaaagttgttgagatgaacgaaaacgtccaattagttagatatggagagcaagcaagtgaccttaaaacagcaacaaaatttaaatctccatcagaagtaaaacatatcagattcattcaacaagcatttattgggagcaaattgctgatgaggccctggactacagtaacgaagcagatactgagcctcaaatctgctaagattgccttgagcgagagtcttataccctgtagaaaaagagctgaatttgtggaaaaacagacacaagcttttatcatgcaagtgtctgacctgcaacaaaaggtgcatgcacagcctagccaggtgtctactgttaaagtgaaggcattgattggaaaagaatgggaccctgccacttggaatggggatgtgtgggagggtcctgatgaagctggggacactgagtttgtaaattctgatgaagcttttttgccagaagcaacagctttcccatccccagaagtgggaaatgatcagacagtttggggactactggacactggctctgagctgatgttgattccaggggacccaaaatattaccgtggtcctccagttaaagtaggggcttatggaggtcaggtaattaatagaggtttagctcaaatccaactttcaatggatccagtgggtcaccggactcgtcctgtggtcagttccccactgccagaatgcataattggcacagacatacttagcagcaggcagaacccccacattggctccctgactgatatcacactggtccactacattgatgacattatgctgattggatccagtgagcaagaagtaacaatcacactggacttattggtccaggctgttgcacaagctgctctgccagttgggccatatgacccagcagatccaatggagcttaaggtgtcagtggcagatagggatgctgtttggagcctttggcaggcccccatagttaccatgagacctgaacgacctatcatgaactgggtgctttctgacccatctagccataaagtgggttgtgcacagcagcattccatcatcaaatggaagtggtatatacgtgactgggctcgatcgggtcctgaaggcacaaaccactcacggcgagtgtgttctctccacaggtccaggcgccgtcagcgaggtgagcaacggcacgtcgaggagggcaggctgcgtctggctgctgcctcttctggtcttgcacctgcttctcaaattttgatgtga

SEQ ID NO: 7709 - DNA, 2031 bp, Homo sapiens
  SIMILAR (1650)..(1147): 1001254mologous to Homo sapiens Human signal peptide- contianing protein (SIGP) (clone ID 1273453),accession number Y21842,Smith-Waterman Score=900.
tcattgcaggtcagccacttgcatgatacgagcttgtgtctgtttttccacaatttcagctctttctctacaggagataagactctcactcagggcaatcttagaatatttgagggtcagtatctgcttctgaagctgggagacagaatccctgagttcatcattttctttcatcactttgtccactgaacttaggagcaaacaaccagcttcattatgttccttggttctccacacatgatcaaaggtattatatatagagtcactaaactccttgcacgatccacaaggtcccacaataggctgtctgcaagcttgaggagcaaggagagccagtccgagtctcaaaactgaaggacttggagtccaatgttcaagggcaggaagcatcatgatttcagccgaaccattcacgaaggggaattcaagtgttctaactttcccaataaaaagtggggtatcagtatcttcctcattagagcctttaatggtggctattatagtgccaaccaaatcaattccagtatggttgtcgtagtcatccgtgatactaagatgtagatctctgaccaaggtcctactggcaactgagcgaacatttgaaacagctggtgtaggtggtttaattttaggtactaacttcacaggttgattaggcaggacttcaactataacatttgctgggggtcggttcccactggtagacagcttccacattttcatggaaatacgtgctggattaatgtttttaatgatactgtcatcttcagaaataacactaatcataaaatcagtgaaaagaccccctgctaagaaggatgcatctttgtcatatttaacattgagacgaacgggtttttctgggtctggaagaatcattaacttaattataggtccttctatgatacttttgttatagatggctttaacctgaagagtatgctctcccctaggggcaaaaacactgaatactcccaaattagccctgcctttctcatctgttttatgctgttggtttgaaggcatgagctttaaattgctagcttttgtaagacttattttaacatgttgtaccggtgctggattatcccactgatcacaaagttgaacaataatagggttctgtaaatctcttccattaatcactatttgttcccctaagatcagacactgttttggaactggagctccaaataccattccccgaagtttatccattggaggagctttattctgaaggcccccaaactttccattacttcgaattcgatctccatctctggtcagcagtgtaggacagtgtgtaattttaacaacctcttttctataatgattggccgcatccagattatccaaaataatggtgtctcctaacagcataccaaatactgtttcacaatgttctacattatctggaaatgttaacaagtctcgagcaaagactggatctccaatgggtttaaaatacaattttccatttcggaaatgaggtagagatcttttccaatctggaagagtcttcttgtaaatagaatcaaggggcaacacctgctgacgaccttgggtttcatcatagatacgacgtgcagcgtcagtggttagggtgactacacagtccatgtcacttgccagatgccaagaaataaccatcgcagctctatcatcttcaatttgtgctagatgtgcaatctttcccaaaacatctccactgcctttagtatagtttggaagagtacacgatcttctaggttttttcttcagttcttcttgttctgatagctttcttttcagaagtgcttcaatgtgtggcacctgttgtgttgtaggaatgtcaatattatgtatttttagttcatttcgcaattgggcctcttttaatcttgcttcttcaacttgacatttcatttcattaagaagctgttggctggcttcaaataaacttttatacataacaatagactgagataattggtccttttcttttgtaagtgctgccatttgttgctgcttcttaacatcattgtaaaacat

SEQ ID NO: 7710 - DNA, 474 bp, Homo sapiens
  SIMILAR (226)..(471): 741254mologous to Mus musculus Pro-Pol-dUTPase polyprotein,accession number Y12713,Smith-Waterman Score=317.
atgactccaggggacttaaaacatcattgtggtcttccagttaaactaggggctcatggaagtcaggggtatatcaactctccggctttgtgtcataatcttatttggagagatcttgatcgcttttcgcttccgcaagatatcacactggtccattacattgatgacattatgctgactggatccagtgatcaagaaatagcaaacacactggacttattgcctgcactgatggcctcatggggagttccctatgatcagctgacagaggaaaagaagattagggcctgcttcacagacggttctgcatcatatgcagacaacacccgaaagtggagagctgcagcactacaacccctttctaggacatccctgaaggacaacaatgaagggaaatcttcccagtgggcagaacttcgagcagtgcacctggttgtgcactttgaatggaaggagaaatggccagatgtgtga

SEQ ID NO: 7711 - DNA, 3384 bp, Homo sapiens
  SIMILAR (2509)..(2847): 991254mologous to Homo sapiens Human signal peptide- contianing protein (SIGP) (clone ID 1273453),accession number Y21842,Smith-Waterman Score=604.
atgaagaacataaaaagaaatgaacatgaacggcatttggccacagtttatgtctttccaattttatcttccaccatctaccgctcagttctcctcacttccagccaaacaataatttacacgcacgtgggagaccgcgaagcgcaggcagcgttaaaactagggcgctggagtcacccccgtaccccgaatgccgtcggcgctccagggcccccagagggtgcggggggcggggacgctgtgacgtcacagagcgcccttctgacgttctcacggacccgctttgcctcgggggcccacgctggagcccacccagtactactaagaaatgaggaggaaaaaggggcgccggctctcgtagcgcctattttctcggcagagggacccacgtgctcgctttggtggactctgcgcccggcgagtaccgccggcctgaagcttcccgccgccgcgtccacgcgacccagccagagagggctcacggcggacggcggcgggcctggtggggcctctgtggggactgaggaggatggcggaggcgtcggccacaggacggtgtacttgtttgatcggcgcgaaaaggagtccgagctcggggaccggcctctgcaggtcggggagcgctcggactacgcgggatttcgcgcgtatgaaactgttaaagatggagtcaccttatacctgctacagtcggtcaatcagttactactgacagctacgaaagaacgaattgacttcttacctcactatgacacactggttaaaagtggcatgtatgaatattatgccagtgaaggacaaaatcctttgcgatatgttcgtccagtaccagtgccacgcagtttaaatagtgatatttcctattttggtgttgggggcaagcaagctgtcttctttgttggacaatcagccagaatgataagcaaacctgcagattcccaagatgttcacgagcttgtgctttctaaagaagattttgagaagaaggagaaaaataaagaggcaatatatagtggatatattagaaacagaaagccctctgattctgttcacattacaaatgatgatgaaagatttctacatcatcttatcatagaggagaaggaaaaagatagctttactgctgtggttatcacaggggtacaaccagaacacatacagtacttgaaaaattatttccacctttggacacgacagttagcgcatatttatcactactatattcatggcccaaaaggaaatgaaatacgaacatcaaaagaagttgaacctttcaacaatattgatattgaaatttctatgtttgaaaaagggaaggtacctaagattgtcaacctaagggaaatacaagacgacatgcagacgttgtatgtaaacacagcagctgatagttttgaattcaaagctcatgttgaaggagatggtgtagtggaagggattatccgttatcatccattcttatatgatagagaaacttaccctgatgatccatgctttccatcaaaattaaaagatgaagatgatgaagatgattgtttcatacttgagaaagcagctagagggaaaaggcctatttttgaatgtttttggaatggacgattaataccatatacatcagttgaagactttgactggtgtactcctcctaagaagagagggcttgcaccaattgaatgctacaataggatatctggtgcattattcactaatgacaaattccaggtcagcacaaataaattgacgtttatggatcttgagctaaaattgaaagataagaacaccctttttacaaggattttaaatggacaggagtggaaagagctgtcgatggagggctacccattaccctcccctcctccacaaaggagctgtcacctccccttaataggcaaacaactcaggggccatccccatttgtttcttaaacctgcaagtttctggtgggtggagtctcctgcttcagaacaaatgatatctttctcccaagtcagaggtctcaaggctcaacaccacgcagaagctgccaaggtgtgggacttccaccctctgaagccacagcccaagctgtacgttggcccctttcagccatggctggagtggctgggaacagggcaccaagtccctagactgcacactgcagatgttaagaagcagcaacaaatggcagcacttacaaaagaaaaggaccaattatctcagtctattgttatgtataaaagtttatttgaagccagccaacagcttcttaatgaaatgaaatgtcaagttgaagaagcaagattaaaagaggcccaattgcgaaatgaactaaaaatacataatattgacattcctacaacacaacaggtgccacacattgaagcacttctgaaaagaaagctatcagaacaagaagaactgaagaaaaaacctagaagatcgtgtactcttccaaactatactaaaggcagtggagatgttttgggaaagattgcacatctagcacaaattgaagatgatagagctgcgatggttatttcttggcatctggcaagtgacatggactgtgtagtcaccctaaccactgacgctgcacgtcgtatctatgatgaaacccaaggtcgtcagcaggtgttgccccttgattctatttacaagaagactcttccagattggaaaagatctctacctcatttccgaaatggaaaattgtattttaaacccattggagatccagtctttgctcgagacttgttaacatttccagataatgtagaacattgtgaaacagtatttggtatgctgttaggagacaccattattttggataatctggatgcggccaatcattatagaaaagaggttatagttgaagtcctgcctaatcaacctgtgaagttagtacctaaaattaaaccacctacaccagctgtttcaaatgttcgctcagttgccagtaggaccttggtcagagatctacatcttagtatcacggatgactacgacaaccatactggaattgatttggttggcactataatagccaccattaaaggttctaatgaggaagatactgataccccactttttattgggaaagttagaacacttgaattccccttcgtgaatggttcggctgaaatcatgctttttgatgaaacacaaggaaaacctgctgttgcagtgatagataatggaagaggaatgacctctaaacagcttaacaactgggccgtgtataggttgtcaaaattcacaaggcaaggtgactttgaaagagctctttttgcaaaacattcaggagtggaatctagtggagttatatatcagaatgtgcttgtagaaaatatcctgaatgaggatgtcacagggaaaacaaaatgtgctaaaagccatcagacataa

SEQ ID NO: 7712 - DNA, 333 bp, Homo sapiens
  SIMILAR (115)..(333): 761254mologous to Mus musculus Pro-Pol-dUTPase polyprotein,accession number Y12713,Smith-Waterman Score=285.
atgattagacatttcagggaccactggacatgctctgagctgacattgattccaggggacccaaaacctcattgtggtcctccagttaaagtagaggcttatggaggtcaggcccaccagaagcaatttgcctttagctggcaaggccagcaatatactgttactgtcctacctcaagggtatatcaactctctgactttgtgtcataatcttatttggagagaccttggtcgcttttcacttctgcaagatatcacactggtccattacattgatgacattgtgctgattggatccagtgagcaagaagtagcaaacacactggacttattg

SEQ ID NO: 7713 - DNA, 390 bp, Homo sapiens
  SIMILAR (2)..(22): 1001254mologous to Mus musculus Pro-Pol-dUTPase polyprotein,accession number Y12713,Smith-Waterman Score=43.
ggtaactgtgcattggggaaaggaaatgatcagacatttcggggattactggacactggctctgagctgactttgattccaggggacccaaaacatcattgcgatcctccagttaaatgtgcagccattgacttggcaaatgcctttttctccattcctgtccataaggcccaccagaagcaatttgccttcggctggcaaggccagcaatatacctttactgtcctacatcaagggtgtatgaactcactggctttgtgtcataatcttattcagagagaacttgattgctttttgactccagaagatatcacactggaccattacattgatgacattatgctgattggatccagtgagaaagaagtagcaaacacactggacttattg

SEQ ID NO: 7714 - DNA, 728 bp, Homo sapiens
  SIMILAR (3)..(656): 531254mologous to Mus musculus Pro-Pol-dUTPase polyprotein,accession number Y12713,Smith-Waterman Score=540.
gtgctgtaccagatgtggtttcattgcttgagcaaattaacacatctcctgctacctggtatgcagccattgacttgggaaatgcctttttctcgattcctgtccataatacccaccagaagcaatttgccttcagctggcaaggccagcaatatatctttactatcctacttcaggtgtatatcaactctccagctttgtgtcataatcttattgggagagattttgattgctttttgcttctgcaagctatcacactggtacattacattgatgacattatgctgaatggatccaacacactggactcatgggtgagaaatttgcatgccagaggatggaaaataaatccaacaaaaattcagggagcttctacctcagtaaaatttctagggatccagtggccatatgacccagcagatccaatggtgcttgaggtgttaatggcagatagggatgctgtttggatcctttggcaggcacccataggtgaatcacagcagaggcctctaggattttggagtaaggccctgccatcttctgcagataactactctccttttgagagactgctcttggcctgttactgtgctttcgtggaaactgaacgtttgactatgggtcatcaagtcatcgtgcgacgcgaactgcctatcatgaactgtatgctttctgactcatcaggccacaaagtgggtcacgcacagcagcatcatgaaattgaagtg

SEQ ID NO: 7715 - DNA, 529 bp, Homo sapiens
  SIMILAR (160)..(525): 771254mologous to Mus musculus Pro-Pol-dUTPase polyprotein,accession number Y12713,Smith-Waterman Score=494.
ggagacctctggccttttaccagggtaactgtgcattgggaaaagggaaatgatcagacactttggggactactggacactggctctgagctgacgttgattccaggggacccaaaatgtcactgtggtcctccagttaaagtaggagcttatagaggtcagaagacagatggatcttggagaatgacagtggattattgtaagcttaaccaagtggtgactccaattgcagctgttgtaccagatgtgatttcattgcttgagcaaattaacacatttcctggtacctggtatgcagccactggcttggcaagtgcctttttctccatctctatccataaggcccataagaagcaatttgacttcaactggcaaggccagcaatatacctttacagtcctacctcaggggcatatcaactttccagctttgcatcataatcttatttggaaagatcttgattgctttttgctttcacaagatatcacactggtccattacattgatgacattatgctgattggatctg

SEQ ID NO: 7716 - DNA, 837 bp, Homo sapiens
  SIMILAR (22)..(642): 821254mologous to Mus musculus Pro-Pol-dUTPase polyprotein,accession number Y12713,Smith-Waterman Score=879.
atgtcactgtggtcctccagtaaagtagaggcttacggaagtcaggtacttaaaggagttttagctcaggtccaacttacagtgggtccagtgggtcctcggactcatcctgtggtcattttcccagtgccagaatgcataattggcatagatatgcttagtagcaggcagaacccccacactggctccctgactggtagggtgtggactattatggtgagaaaggccaaatggaagccattagagctgcctctacctagaaaaatagtaaatcaaaaacagtatcacatccctgaagggattgtggagattagtgccaccatcaaggacttgaaggatgcaggggtggtgattcccaccacatccccattcaactctcccatctggcctgtgcagaagacagacggatcttggagaatgacagtgggttactgtaagcttaaccaagtggtgactccaattgcagctgctgtaccagatgtggtttcattgcttgagcaaattaacacacctcctggtacctggtatgcagccattgacttggcaaatgactttttccccattcctgtccataaggcccaccagaagcaatttgccttccgctggcaaggccggcaatacacctttactgtcctacctcaggggagatgggaaataaatatgactaaaattcagggaccttctacctcagtaaaatttctaggggtccagtggtgtggggcttgtcaagatattccttctaaggtgaaggataagttgctgcatttagtccctcctacaaccaagaaagagcacaatgcctatctggatttcggagggaacacattcctcatttgg

SEQ ID NO: 7717 - DNA, 469 bp, Homo sapiens
  SIMILAR (206)..(415): 261254mologous to bacteriophage bIL170 e34,accession number AF009630,Smith-Waterman Score=65.
ctccgacgttcagtgccggggcaagcaagctgtcttctttgttggacaatcagccagaatgataagcaaacctgcagattcccaagatgttcacgagcttgtgctttctaaagaagattttgagaagaaggagaaaaataaagaggcaatatatagtggatatattagaaacagaaagccctctgattctgttcacattacaaatgatgatgaaagatttctacatcatcttatcatagaggagaaggaaaaagatagctttactgctgtggttattacaggggtacaaccagaacacatacagtacttgaaaaattatttccacctttggacacgacagttagcgcatatttatcactactatattcatggcccaaaaggaaatgaaatacgaacatcaaaagaagttgaacctttcaacaatattgatattgaaatttctatgtttgaaaaagggaaggtccggtac

SEQ ID NO: 7718 - DNA, 1460 bp, Homo sapiens
  SIMILAR (728)..(814): 681254mologous to Mus musculus Pro-Pol-dUTPase polyprotein,accession number Y12713,Smith-Waterman Score=101.
ggtaccctgcttctgctggcttaatgcttcagaactttggtgtcattggtctcagataccactttgctatccactctccggctgctggtggtcttttggatggtttgcatgcagtggctgctatacagggcatcaccaagattgagaccacacctaaccatcagagagcaccagcacactggaccctactgacacaacaagctcacctgcagccttccccactccacttcaacctccccctgacactttgcttaatgcactgtcctacagccatcccccattgctttgccgatgcacgcacatgggtgaacctccccacttcttcactgataggacataaaaaagaaaatctgaaagaattcatctctggcagccttatagtacatgaaattttggaggaagtccttcaggcagaaggagacttccagccttttaccagggtaactgtgcattggggaaaaggaaatgatcagacatttaggggactactggacactggctctgagctgacattgattccaggggatccaaaacatcattatggtcctccagttaaagtagggggcttatggagctcagctgctgtagcagatgtggtttcattgcttgagcaaattaacacatctcctggtacctggtatgcagccattgacttggcaaatgcctttttctctattcctgtccataaagcccaccagaagcaatttgccttcagctgccataaagtgggtcgtgcacagcagcatccatcatcaaatggaagtggtatatatgtgatcaggcttgagcaggtcctgaaggcacaagtgacctcagcagaggaggatgttaataatcaagtggataggatgacccattctgtggacaccgctcagcctctttctccagccacccctgtcattgcccagtgggcccatgaacaaagtggccatggtggcatggatggaggagatgtatatgggttcaagttgacaagggttggacttgtgatggttaatactgagtatcgacttgattggattgaagggtacaaagtattgatcctgggtgtgtctctgccagcacagctagaatataagcaggcagaaaaatatgaaaacagagactggcctagcatcccagcctacatctttctccggtgttggatgcttcctgccctcgaacatcgggctccaagttcttcagttttggaattcagactggctctccttgctcctcagcctgcagacagcctattgtgggaccttgtgatcatctgggttacctatcttcttccaccttcaaatatcagagatccagattctccagactttgtactctggaacttgcaccagcagcttcccaggtgcttaggcctcagtctcagattgagttacagtgtaggcatccctgtttctcaggccttcagacttgaactgggctatgccactggcatccctagttctgcagcttgcagatga

SEQ ID NO: 7719 - DNA, 636 bp, Homo sapiens; identical to SEQ ID NO: 6687
  SIMILAR (184)..(291): 751254mologous to Homo sapiens reverse transcriptase,accession number AJ233632,Smith-Waterman Score=144.

SEQ ID NO: 7720 - DNA, 1431 bp, Homo sapiens
  SIMILAR (421)..(1053): 641254mologous to Mus musculus Pro-Pol-dUTPase polyprotein,accession number Y12713,Smith-Waterman Score=664.
atgtgggaggaccctgatgaagctggggacactgagcttgtaaactctgatgaacctttcttgctagaagaaacagcttcctcatccccagtagtggcaaaatcccctcctcaatccatgctgccttcagcctttccacctttgtttgaggagataaactctcttctgcctgaggcaatagtgatggcctcccctgaggcagttgccagtcaagataatgttgattctcctcagaagccacccccaatactcctatttgcttctagacctataactagactaaagtcctggcaggcccctagagatctaacagtgggaaccacagtcactcaactacaaaatttaaatacaatgggaataattggatcccgaggtggcaggggccaagtggcagtactcaatcatcaaaggcaagaaaaagtaaatcaaaaacaatattgcatccctggagagaaggcggagattcatgccaccatcgaggacttgaaagacacaggggtgatgattcccaccacatccccattcaactctcctatttggcctgtgcagaagatagatggatcttggagaatgacagtggattattgcaagcttaaccaagcagtgacttcaattgcagctgctgtaccaaatgtggtttcattgcttgagcaaattaacatatctcctggtacctggtatgcagccaacttggcaaatgcatttttctccattcctagaagcaatttgccttcagctagcaaggccagcaatatacctttactgtcctacctcagaggtatatcaactctctggctttgtgtcataatcttattcagagaggtcttgatcgcttttcacttccacaagatatccgcactggtccattacattgatgacattatgctgataggatccagtgagcaacaactagcaaacacactggacttattggtgagacatttgcatgccagaggacgggaaatacatctaactaaaattcagggaacttctacctcagtaaaatttctaggggtccactggtgtggggcctgtcgagatattccttctaaggaacacattccttattggggtgtgttactctggcccgtttatcaagtgacccgaaaagctgccagttttaagtggggtccaaaacaggagaaggctctgcaatgggtccaggctgctgtgcaagctgctctgccacttgggccatgtgacccagcagatccaatggtgcttgaggtgtcagtggcagataggaatgctgtttggagcctctggcagacccccataaataaaacacaacagatgcctctaagattttggagcaaggccctgccatcttctgcagataaccactctctttttgagagacagctcttggcctgttattgggctttgatgaaaactgaacgtttgactatgggtcatcaagtcgccatgtga

SEQ ID NO: 7721 - DNA, 1036 bp, Homo sapiens
  SIMILAR (294)..(1034): 741254mologous to Mus musculus Pro-Pol-dUTPase polyprotein,accession number Y12713,Smith-Waterman Score=954.
aggaagggatccaaaggcttaaaaagattgggatggtggagtggattagtcactttagacctactcctctcagcatggaaggtccagaacatatactcttgaccaacaccttgttaaatagatatgtgaaggcagcacctgcatctttgaagagccctttaactgctcttctctttatgtcagatctaactgtgggaaccacattctctcaactacaaaatttaaatacaatgggaatatttgggtcctcatgtgacaggagccaagtggcagcactcaaccatcaaaggcaagtgccagaatgcaaaattgtcatagatatacttaacatctggcggattccccacattggctcactgactggtagggtgagggaaattatggtgggaaaggccaaatggaagccattagagcagcctccacctagaaaaatagtaattcaaaaacaatatcacatccctggagctattacagagattagtgccaccattgaggacttgaaagaaacaggggtggtgattctcaccacatccccattcaaatcaagcatttggcctttgcagaagacagatggatcttggagaatgacagtgaattatcataagcttaaccaagtggagactccaattgcagctgctgtaccagatgtggtttcattgcttgagcaaattaacacatctcctggtacctggtatgcggccattgacttggtaaatgtctttttctccattcctgtctataaagctcaccagaagcaatttgccttcagctggcaaggccagcaatatacttttactttcctacctcaggggtatatcaactctccagctttgtgtcataatcttattgggagagattttgattgctttttgcttctgcaagctatcacactggtacattacattgatgacattatgctgaatggatccaacacactggactcatgggtgagaaatttgcatgccagaggatggaaaataaatccaacaaaaattcagggagcttctacctcagtaaaatttctagggatccagtg

SEQ ID NO: 7722 - DNA, 6914 bp, Homo sapiens
  SIMILAR (3260)..(2460): 1001254mologous to Homo sapiens Human signal peptide- contianing protein (SIGP) (clone ID 1273453),accession number Y21842,Smith-Waterman Score=1416.
gcaaaaaggcttggagagagttttatttcagttacttcaaaatacaagtaggctattattttcctttggaagaagaaaccagaaaaaaaacttcctgattgtaacattgtgacaaatttcagattatataacacataacacaggataaatggctgtagcattaatttttttctccagttacattcctttatactaaaagactagtattaaatcttagaagaaaatttcaattgttcttacgtgttacatattaaacacaaaagcaatttattattatttggtacaacatgaacctcagtatttgctcaaatgtagaaaaggattccttaatatgctgagaaatatccttagataaatccaactgtgaaaatatagaaaaactccttactgtaattactgggaaccacaaagttaatttttacagggtagaaaaactccacaaaaatggagattcatacttaaaaccttcttttactgatagaacattctttctggtattataaaatgaacaaaagtgtacagatatgggcttggggctagataatatccatagaactcgccattttaagcaataaaaattggcatgtgggtgcatgcctgtaatccctgctacttaggaggccaaggcaggaagactgcttgaacccaggagttcaagactagcctgggcaatgtagtgaggccactgtcgctcaagggaaaaaaagacatgtttttaaacacacttctaataaaaagaatttttaaaaccaacttttttgcttctagatagtctcaatgccttggatttaaaacatgactccttcttgatacaatgaattataaaagcaaactagttccacatattaattatacgttcaagtctagttcctaaaaagtcatttctctttaacctttcttacctatcaatcaatcattttcatataatctaatgtctaaggactccaaatattggtacggggtgagtatccctaatctaaaagtcagaaacaagaaatgttccaaaattcaaaacatttgagcgcagatatgacacataagggaaatgctcattgaagcatttccaatttctaatgaaagatttttggattagggatgctaaattggtaaatataatgcaaatattccaaaataataatttaaaaaccccacaaaaaaccaaaatccaaaacacttcaggtcccaaccattttgaataagggatactcaacctgtagtaccatgggagccaatcttccccacagctaattctgtaattaccattttgtttcttctgtaacaacaaacagtttaaataatttccaattataaagataggttaacatcatcatcgttttttaacaagataacttttatgaagcttccaattttaaaaaagaaaaacacttatctattcagtagggaagaaacaatcttatttattaatggcctgcatatttagaaagggtttaaaaacacatacatttcctgggacacaaacttacttaccaaatgtatgtccttacaaaataacttcacagatcaatagtcttgaacttacacaaagacatatatatgacatacattaggttaatatacatttcaaatgtttttgcagcaactttctaccagaaagtacactaatgtgagaatgtatgttctctttaaccccttaaaaatagtaataaaaaattacaaaataatgtaaatgtaaaattaaggctgagactacatattctagtattaataaagtcaaacaaacaatagttataaaacttggtgctgctgaatattttatatatatatatttatatatatatatatatatatacacacacacacacacacaggataagtcttttgaaatttgaaatgctaccactgtcacaagttcactcattgatttaatgttgttctgggtatcttaacatttcaattcccaaatacctgtgcttttaaaatttttatcctgaattctgcattgagtttcctcacatatttacaattaaacatctagcctctagaacctcccttacacaaaagacaaaacatctttgttaaataaattcacgcaaaagtaataaaaaggttttcaagaaatagttctgacatgttcattatatttatactgaaaaatagtacatgtacttttcttcaggattaataaatgccatgtgccagttttacagtcactgccacattagcacattttcctcttacacatttgcaaggtagtgacaaccaaagggcataatgtctggaataattccagtaaatccataatgtccagtaagattcataaaattgaatggttgtttccagtcccatctgaatcgaaatggaaattcatgcccaggtacttgtattgtccccagaaatactcagtctggtaagtcaccctcttggtcttctgaaacagagatgcagaaagcagggcattcttactgagaccaatggcctcttctctctgtcacctctcatacatctgttttggttataatcctattttgtcttgtagcttctcgtctcattcttttaggaggaactggacaatctgtcgtctcaacctttggtgaatgacgcaatgagtcattacacttacgtatgggagtcatacctagtttttcctctattagtttgagatttttctcatgttcatcaagttcttgctttttcttcctcatatccggagtgcgaaggtactctaattgactgttaagatccttattcacactgtctagtttgcacacagcagaacgatactgctgaagaagatctatttgttcccctaagatcagacactgttttggaactggagctccaaataccattccccgaagtttatccattggaggagctttattctgaaggcccccaaactttccattacttcgaattcgatctccatctctggtcagcagtgtaggacagtgtgtaattttaacaacctcttttctataatgattggccgcatccagattatccaaaataatggtgtctcctaacagcataccaaatactgtttcacaatgttctacattatctggaaatgttaacaagtctcgagcaaagactggatctccaatgggtttaaaatacaattttccatttcggaaatgaggtagagatcttttccaatctggaagagtcttcttgtaaatagaatcaaggggcaacacctgctgacgaccttgggtttcatcatagatacgacgtgcagcgtcagtggttagggtgactacacagtccatgtcacttgccagatgccaagaaataaccatcgcagctctatcatcttcaatttgtgctagatgtgcaatctttcccaaaacatctccactgcctttagtatagtttggaagagtacacgatcttctaggttttttcttcagttcttcttgttctgatagctttcttttcagaagtgcttcaatgtgtggcacctgttgtgttgtaggaatgtcaatattatgtatttttagttcatttcgcaattgggcctcttttaatcttgcttcttcaacttgacatttcatttcattaagaagctgttggctggcttcaaataaacttttatacataacaatagactgagataattggtccttttcttttgtaagtgctgccatttgttgctgcttcttaacatcattgtaaaacatgaacggtaggatatatggttctaaggttcttgataaaagtggtagccggggctcaaatacaataaaatattcagtactatcccttccaggactactttctgccagcaccagactcatgatttcagccgaaccattcacgaaggggaattcaagtgttctaactttcccaataaaaagtggggtatcagtatcttcctcattagaacctttaatggtggctattatagtgccaaccaaatcaattccagtatggttgtcgtagtcatccgtgatactaagatgtagatctctgaccaaggtcctactggcaactgagcgaacatttgaaacagctggtgtaggtggtttaattttaggtactaacttcacaggttgattaggcaggacttcaactataacctgttcactgttgagaatatttgttttatccatcataaaaccaaactggatacaatatgtccccactttattaggaattactttatccctgaaatagaagcagccatcttctttgtcattatcttttattttattacaactaaatgtttctgcatttgctgggggtcggttcccactggtagacagcttccacattttcatggaaatacgtgctggattaatgtttttaatgatactgtcatcttcagaaataacactaatcataaaatcagtgaaaagaccccctgctaagaaggatgcatctttgtcatatttaacattgagacgaacgggtttttctgggtctggaagaatcattaacttaattataggtccttctatgatacttttgttatagatggctttaacctgaagagtatgctctcccctaggggcaaaaacactgaatactcccaaattagccctgcctttctcatctgttttatgctgttggtttgaaggcatgagctttaaattgctagcttttgtaagacttattttaacatgttgtaccggtgctggattatcccactgatcacaaagttgaacaataatagggttctgtaaatctcttccattaatcactggaatggactcctttagttctggccagtctataaggagaagtttagcaggaggtccagaaattagttgcactcgaataaagtcagaaaactcacgccaagtaaaacaaagatccttatttccaggaggacctggaataaatttgatgcctcttacacttatactctgtgtgttttcctgaaaggttgttttcaaatttgagctatcaagtccaaccccagcaattgacaaagaagataaagaacttggtgaaaatgcttgaatctgatttccgtactgatctgtaattattataactacttctccttgaagctcttggcccatctgtactgtttttcctcctttcatttcacattttaaatgtttaggttcatcaggaagtggtctgaaattgtttaacaagttagaagtctttagtgacaccattaattgaagtagttccaacatgcttactgtaaacgcactttccaaagacacatgatcatcttggaatgaaacctggcaatagcgcatatcttttacagatgttggtacttgcacatcaggaagcagaccctgtagcaagtgttctttgttaatctcaggagtccaattaactttaattttttctgctaaagctgatgttatattgatttctctttctccttcatcatacatttgaaaaataagattatgcataatatcacccgctatccaattaacctcatcctgatgtttgatctgaattgccttttgtccttctacactgaatatttgtagtcttgcaacatggctactgggaagcaacttaatagtcttctccacaggtgccacatctttacaactaggtatttcaattcttgctttaagcgtctggtcttttttaatattctgaacttgaattgcagatcctgttaaaatactggttccagaactactgcaatctacaacatagactggaaggtttggagcacctgaaaacttacaatgaacaatcaattttggttgtgctgttatgttgtctgattcatctaaaacttccacctgaaatgggaaagctgttccattttctataactaaaatttcagaatcaggtttcactttcagtcgacgagggtgaccaggtagtaatctaattttcaaaatctgtgagtcttcttttaagccaggcagagtaaccttcagattataattcttgccttgacaagagtttacagggcccttggctgtaacacctcgaattacacaatttggtccattggttatttcttcataatgtaaagataaaccacttgcttcaagaactggctgaatatcagttactagttgactggtatgaccaaattcatcctgaaactccagagggatattaaatggaactccaacacgaaaaggaagatccagaagaccaaatgaaaatttctctggcttaccctctttaacagaaaacttaattgctttagatggtagtggtcttcctgcataagtgtctgcattactttcattcaacacaacttgtaatttcaaggtataattccccaacttctgaatattttcaagcactggatctgacttggagagcattggggacagtgggaagtgctccacccatactcccagacctgggtggtacaaatagaaggcagccattcccgatcctaagtcacagcgggctgcacagaaacgttttgcagcctgagacagattcacaatctgaggacagactgcctgtgacttggctggctgtttcagcttgctgccagcagcagatggtaggagggaatccaaccaggtcaaaactgtagagaaccgggtcccactatcacctgccaggttgtggagccctagcgaccccactttccccatgctggatctttggcatggcagtggttgctctgctcctccctggagcattccttcggggcctgagaactgccttgcaacccctgcaagggctggtgcttgtgcccttgccatttcatcttctacatattttttaacagctttctcagcaactgtcctatccagctttgcaattggcacagttcttacttcatcatatagtgcctgaggttccagctgtcctgctttgtatatctttccatcccattctattgctgcatatgttgcccagggaccttgctttttagaaggaagatcaggacgtgtaattactcccttaaaaagtgtaaattttatttgtttatcatacttctcatgacagtccttcagccacaaagcaaattctctgtcaattttcattcgctgttc

SEQ ID NO: 7723 - DNA, 3183 bp, Homo sapiens
  SIMILAR (1295)..(1333): 841254mologous to Mus musculus Pro-Pol-dUTPase polyprotein,accession number Y12713,Smith-Waterman Score=49.
atggcagaaggcaaggaagagcaagtcctgtcttatacggatggcagcaggcaaagagagaatgaggaagatgcaaaagcggaaacccctgataaaaccatcagatctcatgagacttattcactaccacgagaatggtatgagggaaaccgcccccatgattcaattacctctcaatgggtccctcccacaacacgtgggaattatgggagtacaattcaagatgagatatgggtgggtgatcattcaggatatgttcgtccagtaccagtgccacgcagtttaaatagtgatatttcctattttggtgttgggggcaagcaagctgtcttctttgttggacaatcagccagaatgataagcaaacctgcagattcccaagatgttcacgagcttgtgctttctaaagaagattttgagaagaaggagaaaaataaagaggcaatatatagtggatatattagaaacagaaaggatgactacgacaaccatactggaattgatttggttggcactataatagccaccattaaaggctctaatgaggaagatactgataccccactttttattgggaaagttagaacacttgaattccccttcgtgaatggttcggctgaaatcatgctcatgccttcaaaccaacagcataaaacagatgagaaaggcagggctaatttgggagtattcagtgtttttgcccctaggggagagcatactcttcaggttaaagccatctataacaaaagtatcatagaaggacctataattaagttaatgattcttccagacccagaaaaacccgttcgtctcaatgttaaatatgacaaagatgcatccttcttagcagggggtcttttcactgctccaccactgccagcccagctcatgtcctcgctatcttgtgcctggattattgaatcagttcttaacagctggaggaagggatgcaacaaactcaggaaccagagagccctgcataagaaacaagacagagggaagcttccggaggatagagagcttcagcacactaagaaacagactaattgggcaggacttctgatccctgccatgaacaataacgtggatatgactgccagaaagctgcaaagagacctccagccttttaccagtgtgactgtgcattgcagaaagggaaatgaccagacatttgggggaccactggacgctggctctgagctgacattgattccaggggacccaaaacatcattgtggtcccccagttaaagtaggagcttatggaggccaagtaattaatggagttttagctcagccctcttatttggcttgtgcagaagacagatggatcttgagaatgacagtggactattgtaagcttaaccaagtggtgattccaattgcagctgctgtatcagatgtggtttcattgcttgagcaaattaacacatctcctggtacctggtatgcagccattgacttggcaaatgcctttttctccattcctgtccataaggcccagcagaagcaatttgccttcagctggcaaggccagcaatatacctttactgtcctacctcagtggtatatcaactctccagctttgtgtcataatcttattcggagagaccttgattgcttttcgcttccactagatatcacactggtccattacattgatgacattatgctgattggatccagtgagcaagaagtagcaaacacactggacttattcgtgagacatttgcgtgccagaggatgggaaataaatccaactaaaattcagggaccttctacctcagtaaaatttctagggttccagtggtgtggggcctgtcaagctattccttctaagatgagggataagttgctgcatttagtccctcctacaaccaagaaagaggcacaatgtctaacagctcttggcctgttactggctttggtggaaactgaacatttgactataagtcatcaagtcaccatgcgacctgaactgcctatcatgaactgggtgctttttgacccatctagccataaagtgggttgtgcacagcagcattccatcatcaaatggaagtggtatgtacatgattgggctcgagcaggtcctgaaggcacaaccacccctgtcatttcccaatggccccatgaacaatgtggccatggtggcagggatggaggttatgcatgggctcagcaatgtagacttccactcactaaggctgacctgaatacagccaccgctaagcgcccaatttgccaacagcagagaccaacactgagccctcaatatggcaccattcctcagggtgatcaaccagctacctggtggtgggttgattatatgggatctcttccatcatggaaagggcagaggtttgtcctcactggaatagatacttactctggatatgggtttgcctatcctgcatgcaatgcttctgccaagactgccatttgtggactcacggaatgccttatccaccatcatgatatcccacacagcattgcctctgaccaaggcactcactttatggctaaagaagtgcggcagtgggctcatgatcatggaattcactggtcttaccatgtttcccatcatcctgaagcagctggattgatagaatggtggaatggccttttgaagtcacaattacagtgtcaactaggtgacaatacttggcagggctggggcaaagttctccagaaggtcgtgtatgctctgaatcagcatccaatatatggtactgtttctcccatagccaagattcacaggtccaggaatcaagggctagaagtggcaccactcaccatcacccctagggatccactagcaaaatttttgcttccttttcctgcaacattacagtctgctggcctagaggtcttagttccagaggaaggaacgctgccaccaggagacacaatgattccattaaactggaagttaagattgccacccagacactttgggctcctcctacctttaaatcaacaggctaagaagggagttacagtgttggctggggtgactgacctggactataaagatgaaatcactctcctactccataatggaggtaaggaagagtatgcatggaatacaggagatccattagggcttctcttaatattaccatgccctatgattaaggtcaatgggaaactacaacagctcaagccagatcatcctagatga

SEQ ID NO: 7724 - DNA, 1531 bp, Homo sapiens
  SIMILAR (445)..(1377): 761254mologous to Mus musculus Pro-Pol-dUTPase polyprotein,accession number Y12713,Smith-Waterman Score=1209.
atggagaacactgatactgcttggcatgaactgtttagagagttatgcaaaataaatgcatttgacactcctgatttatcgctcatgagaggcaaggaatttagtgactctgtacataatacctttgaccatatgtggagaagcaaggaacataatgaagttggttgtttgctcctaagttcagtggacaaagtgatggaagaaaatgatgaactcagggattttaactcccatcttcagaaacagatactgaccctcaaatctgctaatatcaccttgagtgagagtcttatctcctgtagagaaagagctgaaattgtggaaaaacacacacaagctcttatcatatccaacagtgggagctgcagtcactcaactacaaaatttaactgcaatgggagtaattggatcccatggtgccaggggccaagtagtggcactcaaccgtcaaaggcaaggagacctccaaccttttaccagggtaactgtgcactggggaaaagggaaatgcagatatttgggggactactggacactggctctgagctgacattgattccaggggacccaaaacatcattgtggtcctccagttaaagtaggggcttatggaggtcaggtaattaatggagttttagctcaggtccaaattacagtgggtccccagactcatcctgtggttatttccccagtgccagaatgcataattggcatagacatacttagcagctggcagaacccccacattggctccctaactggtagggtgagggctatcatggtgggaaaggccaaatggaagccattagagctgcctctacctagaaaaatagtaaatcaaaaacaatattgcatacctggaggaactgaggagattagtgccaccatcaaggaattgaaagatgcaggggaggtgattccgattcccaccacattcccattaaactctcccatttggcctgtgcggaagacagatggatgttggagaatgacagtggattattgtgagcttaaccaagtggtgactccaactgcagctacagtaccagatgtggtttcattgcttgagcaaattaacacatctcctggtacctggtatgcagacattgacttggcaaatgccgttttctccattcctgtccataaggcccaccagaagcaatttgccttcagctggcaaggccagcaatatacctttactgtcctacctcaggagtatatcaactctctaggtttgtgtcataatcttatttggagagaccttgatggctttttgcttctgcaaaatatcacactgctggtccattatgttgatgacattatgctgattggatccagtgagcaagaagtagcaaatgcactggacttattggtatcaatggcctcatcgagagttccctatgatcagttgacagaggaagagaaggctaggttcacagatggttctgcacgatatgcaggcaccacccgaaagtggacagctgcagcactgcagcccctttctaggatatccctgaaggacagcggtgaag

SEQ ID NO: 7725 - DNA, 2159 bp, Homo sapiens
  SIMILAR (376)..(720): 861254mologous to Mus musculus Pro-Pol-dUTPase polyprotein,accession number Y12713,Smith-Waterman Score=519.
atgaaactcatggaaacacttaaccagtgcataaacgctggtcatgaaatgacgaaggctatcgccattgcacagtttaatgatgacagcccggaagcgaggaaaataacccggcgctggagaataggtgaagcagcggatttagttggggtttcttctcaggctatcagagatgccgagaaagcagggcgactaccgcacccggatatggaaattcgaggacggcgacgtgctgaagacgtatttccaccggtgatcggggttgctgcccataaaggtggcgtttacaaaacctcagtttctgttcatcttgctcaggatctggctctgaaggggctacgtgttttgctcgtggaagaagacagatggatcttgagaatgacagtggactattgtaagcttaaccaagtggtgattccaattgcagctgctgtatcagatgtggtttcattgcttgagcaaattaacacatctcctggtacctggtatgcagccattgacttggcaaatgcctttttctccattcctgtccataaggcccagcagaagcaatttgccttcagctggcaaggccagcaatatacctttactgtcctacctcagtggtatatcaactctccagctttgtgtcataatcttattcggagagaccttgattgcttttcgcttccactagatatcacactggtccattacattgatgacattatgctgattggatccaagacagctcttggcctgttactgggctttggtggaaactgaatgtttgactctgggtcatcaagtcaccatatgacctgaactgcctatcatgaactgggtgctttctgacccatctagccataaagttggtcatgaacagcagcattccatcatcaaatggaagtggtatgtacatgattgggctcgagcaggtcctgaaggcacaaccacccctgtcatttcccaatggccccatgaacaatgtggccatggtggcagggatggaggttatgcatgggctcagcaatgtagacttccactcactaaggctgacctgaatacagccaccgctaagcgcccaatttgccaacagcagagaccaacactgagccctcaatatggcaccattcctcagggtgatcaaccagctacctggtggtgggttgattatatgggatctcttccatcatggaaagggcagaggtttgtcctcactggaatagatacttactctggatatgggtttgcctatcctgcatgcaatgcttctgccaagactgccatttgtggactcacggaatgccttatccaccatcatgatatcccacacagcattgcctctgaccaaggcactcactttatggctaaagaagtgcggcagtgggctcatgatcatggaattcactggtcttaccatgtttcccatcatcctgaagcagctggattgatagaatggtggaatggccttttgaagtcacaattacagtgtcaactaggtgacaatacttggcagggctggggcaaagttctccagaaggtcgtgtatgctctgaatcagcatccaatatatggtactgtttctcccatagccaagattcacaggtccaggaatcaagggctagaagtggcaccactcaccatcacccctagggatccactagcaaaatttttgcttccttttcctgcaacattacagtctgctggcctagaggtcttagttccagaggaaggaacgctgccaccaggagacacaatgattccattaaactggaagttaagattgccacccagacactttgggctcctcctacctttaaatcaacaggctaagaagggagttacagtgttggctggggtgactgacctggactataaagatgaaatcactctcctactccataatggaggtaaggaagagtatgcatggaatacaggagatccattagggcttctcttaatattaccatgccctatgattaaggtcaatgggaaactacaacagctcaagccagaagccttggttccaaagggggtagtgtttccaccaggagacacaacaatgctttcactgagctggaagttaagactgccatctggccacgttggactcctcatgcctctgagtcaacaggtccagaaaggagttacggtgctggctggggtgattgatccag

SEQ ID NO: 7726 - DNA, 251 bp, Homo sapiens
  SIMILAR (112)..(189): 261254mologous to Gallus gallus ATPase 8 (AA 1-54),accession number X15841,Smith-Waterman Score=36.
  misc_feature (1)...(251): n = a,t,c or g
ggaatatttagaggacagtaacccatttccctacgccctacctttcccatggcactctgacgtactggatgtttggtttctgaagttactggctgtttaccctgccgggatgtaagcccctccagggcaggggcttgtctcgtgttcagtgctgcatcccagctgctgggcacggtacctggtccatggcgttcaataaataactgttggatgagtgnnnnnnnnnnnnnnnnnnnnnnngggtttttttt

SEQ ID NO: 7727 - DNA, 1903 bp, Homo sapiens
  SIMILAR (227)..(183): 661254mologous to Homo sapiens Human secreted protein, SEQ ID NO: 8153,accession number G04072,Smith-Waterman Score=43.
agatgggggtctcacactgtggctcaggctggagtgcagtggtgtgatcatggctcactgcagcctcgaagccccggggtcaagtgatcctctcacctcagcctcctgggtagctggaaccacaggcacgcaaccaccactcctggctagttttgtttttttagtagaataaggtctcactgtgttgcacaggctggtctctaactccttacctcaaaccatcctcctgccttggcctcccaaacatgttgggattacaggtgtgagccactggacctggccaaatactgggttttcagtgctcactgccactaataaaaatctgaaattctttcattatgcaatttctaagtgcctggtgagggccaagctcagttctaggctcttgaagattgaagagagaaacaaggctctgtctgctcctgttgtctctgtgagcatctttgacagagtgctcagattgttgggatatagtgcatcggactggcagcctgaatttgtggagaccgcagtcagtaactttgtgatatatggaatatttagaggacagtaacccatttccctacagccctacctgatcacatcgtgccctgctgggccataccccaaacagcccaccttcctctaggcctggccatggccctgtgcctgccacattgaggattaagtcaggatatcttgagccctctcaaatccctgtttattcaggcctctgccacatatagagccagccttctgtccccaccacttccactaccatggagcccacttaagtaaaacgctctctggggcccagcttcgccagaaaagacaccaggggaagcaaggctcaaaaccaggggcagctaaatctgatcttgtgggaccagtctctaagtaagggctttcagcgtcggctgtctgttcattgctttccaaataggatgcagcaatgattggtacatgggtattaagatcggtagtaggggctagtccaagtttagcaatagccaaactggagagcctctgaagtatgagagtcccagagggatttgtcagctcctggcagacatcctgattttcaccttcctgagtctaccctaccccagaagggtgccagtctcactgtggtgaatggttagcccagtgttgtgctgcatccacacccagcaacggagtcccgtgcttgcaggctggtgggatgctgtcctctgggttaagactgtctcccttctcgggagcactgggagggttctccatcttgcgtgtttcagtgggaagttggcagatacggaaaacaggcccctataggggaaggcagttccatgtaaaatgaattaatttctttcccaaaagacttaaaattttttcctatttcaattttcctttcaaaaaaggaaatacattcatgtagttcaaaacttaagaaaacaaaagtctgttcagcaaaagactcccactccgtttccccaaacgctgagccccaccccccatccctggtagccaagaagtgtttccaaattttaaggtttaaagaaacaaagtcccctggatttgtgttagggatgtcttccctgagagtgggttgtgttcccgtttgaaccctggcggttgaacctcggccccactaggatcatgcccgccctctcccagggaggagggcctccccatcaccctgtaccagtggcacccccagccactggcactgcccgcccttgctcagcgtacctttcccaatgggactctgacgtactggatgtttggtttctgaagttactggctgtttaccctgccgggatgtaagcccctccagggcaggggcttgtctcgtgttcagtgctgcatcccagctgctgggcacggtgcctggtccatggcgttcaataaatcaccccttggatgagtgaaaaaaaaaaaaaaaaaa

SEQ ID NO: 7728 - DNA, 709 bp, Homo sapiens
  SIMILAR (372)..(515): 501254mologous to Homo sapiens Human secreted protein, SEQ ID NO: 7864,accession number G03783,Smith-Waterman Score=89.
atgcctgcgtgtcgcctaggcctgctagccaccgccctcatcatcagcctgctgctgttcggcttcaccatagtctcaggcacaggagcagagaagactggcgtgtgccccgagctccaggctgaccagaactgcacgcaagagtgcgtctcggacagcgaatgcgccgacaacctcaagtgctgcagcgcgggctgtgccaccttctgctctctgcccaatggccaactggctgagtgattcgaagaaagtgaggaatcctccctggacactgtatcgcccttcgtcgtctttcagtcaatctcttccactctaaggattgagtgagcgcgagctggggactcttctcaaagataaggagggttcctgccccccaggtgtaacaatttaacttttccccagctcaggcctctgtctgggaccaggtgccaggtggaacagcccagtgtcctggccaggatgcaaatgctgccgcaaatggctgtgggaaggtgtcctgtgtcactgcccaatttctgagctccagccaccaccaggctgagcaagtgaggagagacagttttctgcctggccctgcatctgggttccaagcccacctgccctccccgtttttcgggactctgtattccctctttgggctgaccacaagcttctccctttcccaaccaataaagtaaccactttcagcaaaaaaaaaaaaaaaaaaacc

SEQ ID NO: 7729 - DNA, 2477 bp, Homo sapiens
  SIMILAR (136)..(735): 871254mologous to Xenopus laevis putative N-terminal acetyltransferase,accession number AF247679,Smith-Waterman Score= 913.
atggctgtgaatggatgcctggaaggaccatcctctaattttctcagttgcctgttcattgtggcattggttggcagtgaatctactcatcctttatgtcttgagcaaccagccacccaggaaacgaggtatcagttacttcagcttcgacctgcgcagagagcatcatggattggttatgctattgcttaccatttattagaagattatgaaatggcagcaaagattttagaagaatttaggaaaacacaacagacatcccctgacaaggtggattatgaatatagtgaactactcttatatcagaatcaagttcttcgggaagcaggtctctatagagaagctttggaacatctttgtacctatgaaaagcagatttgtgataaacttgctgtagaagaaaccaaaggggaacttctgttgcaactatgtcgtttggaagatgctgcagatgtttatagaggattgcaagagagaaatcctgaaaactgggcctattacaaaggcttggaaaaagcactcaagccagctaatatgttagaacggctaaaaatttatgaggaagcctggactaaatatcccaggggactggtgccaagaaggctgccgttaaactttttatctggtgagaagtttaaagaatgtttggataagttcctaaggatgaatttcagcaagggttgcccaccagtcttcaatactttaagatcattactaccaagacaaagaaaagtgtggcaatcatagaaaagttagtagtaggttatgaaacctctctaaaaagctgccggctatttaaccccaatgatgatggaaaggaggaaccaccaaccacattactttgggtccagtactacttggcacaacattatgacaaaattggtcagccatctattgctttggagtacataaatactgctattgaaagtacacctacattaatagaactctttctcgtgaaagctaaaatctataagcatgctggaaatattaaagaagctgcaaggtggatggatgaggcccaggccttggacacagcagacagatttatcaactcccaatgtgcaaaatacatgctaaaagccaacctgattaaagaagctgaagacatgagctcaaagtttacaaggggaggcacatcagcggtagagaatttgaatgaaattcagtgcatgtggttccatacagaatgtgcccaggcttataaagcaatgaataaatttggtgaagcacttcagaaatgtcatgagattgagagacattttatagaaatcactgatgaccagtttgactttcatacatactgtatgaggaagattacccttagatcatatgtggacttattaaaactagaagatgtacttcgacagcatccattttacttcaagggcaggcaagaattgctatagagatctatttgaaggcttcatgacaacccccttacagatgaggaattaaaggaacacggaggctggatacagccaaacatgtctgacaaagagctaaagaagctacgtaataaacaaagaagagctcaaaagaaagcccagatagaagaagagaaaaaaaatgcagaaaaagaaaagcagcagagaaatcagaaaaagaagaaggatgatgatgatgaggagataggaggtccaaaagaagaacttattccagagaaactggccaaggttgaaactccattggaagaagctattaaatttttaacaccgttgaagaacttggtgaagaacaagatagagactcatctttttgcctttgagatttactttaggaaagctgccaaaatggtatattacttagatccttctagtcagaagcgagctatagagttggcaacaacacttgatgaatctctcactaacagaaacctccagacatgtatggaggtattggaagccttgtatgatggtagcctaggagactgtaaagaagctgctgaaatttatagagcaaattgtccataagctttaccccttatgcctttggcctttccatgcccccccggatatgaagaggatatgaagatccacagttaatggagatagttcctgcagaagctgaagaactggcccaatgaaatttgaacatcactaaacaagcaaatggaatgactttggaccatatctagtatataatatttttgtcacgcacctgctgcattgctctaacttacacagaatgagaggagtaaatgttcttgccttcaaatagtgttttacgttttttatcctgctgaaaaagtatatataaaatatctaacattacaggatagaggttcagtttcttaaaaaattaaagctgctaaaattgagtggttaaaaaagataccttatcctattcctccccacccacccatgtttttaaacctaatttatataaaatctggaggctgttacagctaacaaagcaggtgtgtggcagaaatattactttaaatttgtcttgtgagattttactatatctcagac

SEQ ID NO: 7730 - DNA, 429 bp, Homo sapiens; identical to SEQ ID NO: 3963
  SIMILAR (196)..(411): 551254mologous to Homo sapiens Human secreted protein HCHPF68, SEQ ID NO:163,accession number Y86248,Smith-Waterman Score =162.

SEQ ID NO: 7731 - DNA, 684 bp, Homo sapiens; identical to SEQ ID NO: 6958
  SIMILAR (187)..(681): 921254mologous to Homo sapiens diubiquitin,accession number Y12653,Smith-Waterman Score=769.

SEQ ID NO: 7732 - DNA, 1067 bp, Homo sapiens
  SIMILAR (5)..(274): 331254mologous to Schizosaccharomyces pombe putative glucoamylase,accession number AL031262,Smith-Waterman Score=90.
ttactcatcctcatctttagctgccatgtagatgaggtcaatatccacaagaaactcacctgagtggggaagaaactcgctttccagtacaatagatagcaggaatggagcttgcaggactggagggtgtatgcattcctgctccagttccaacttctcattagttaattcctcaggaaccacctctaggagctcctcagtgtcatcttcatccacacccgggttaaagttgtttgccgtctcaaccagagctttgtcgatttttgcaacctccccattcttggcaaatctggtaacattagctgtcgattttgtgcacttaggggccatgatggacagaacaagagcacaagagaaaatgatgcagccacaagtcttggtaaacacagatgtatgaggctgcttctgggctaacatggcatcctgctttacagcaaacttttctttcattattatagattcagggggcacatgtgcaaagttgtttgccatctcaaccacagctgtgttgatttttgcaacctcctcaaccttggcaaatcctttgacgtcatagataaatctctcgagtgtcttcttgcagatgccatttatatactccttggtgacatcaccccaagcagctgctgtgggcttcacctgaaacttctcatgtttaactgctacaatccagctgagcagttgatgatgtgaaaataggactgctttagttccccccttcacacttggaacctcacagaatcctggcttaaaaagtatatgatgcttgcaaggcacacagcccagagcttggcacacggcaaagcagctagcctcggcagccattatccttgtgattaattcagcaaactctagaatgagtttttctctccaggtgacaaagtctgtacttgagtttttcttaatccagaacctctctgctgcccgcttctcacttccaatcatccgccttctgaagagttcctccctctccaggcctgactgccctttgtggccttccccctgcatctctgcttcagatgtgcccctgcaggtctgcaacccattctcacccagcagccaagaag

SEQ ID NO: 7733 - DNA, 2507 bp, Homo sapiens
  SIMILAR (87)..(359): 311254mologous to Homo sapiens retinitis pigmentosa GTPase regulator,accession number AF286472,Smith-Waterman Score=115.
atggtgagaccctttctctacaaaaaaataaaagaagaagaagaagaagaagaagaagaagaagaagaagaagaagaagaaggagaagaagaagaagaagaagaagaagaggaagaggaagaggaagaggaagaggaagacaaagacgacgaagaagaaagaagaagaaagaagaagaagaagaagaagaagaagaagaagaagaagaggaagaagaagaagaagaagaggaagaagaagaagaagaagaagaaaaaaaacattctttataggatccagatctgggagagaaagaaaacaaaggacaaaggaaaagaaaacttgcccgtgggacttcccagccatccctttcacctggaggctccgatcccctgggcgcttgataattctctgaggtcatggagatcagatacatggacactcatccaccaacaaaggctttcagacacaaaccaagctgcctcccagagtacagaggtagcaactctgctcatcactacagaggcactgatgtcactcggtgtccctctggaggagcaaatggacccacaaccccactgctttgctccccaccagctcctcccacacgctggtcctaacgctttgctgagcacacagtggactctccacgaacacttgctgcttgatcccttcagccttgcaaatgccgccatccgcctggacagcccaaagaggttatgtgccccttttcccctcctggtcctggaagactgcactgttaacaccatctccacagggttaacgagaattacatgccagactttagataaagcatcaaaagactctcttcaagcatctcacaatgaaactctgagcatttgcagcttacctcttacatggccccattctgagaaagctgaaagaaaccctcagtgtggcaagaagcactgtttaaaaacccctgcccactccactgcctcttggggtacaaagcccttgcagagaatcaacaatagcaagaccctggaagaaggaggaggaggagaagggcggggggaggagggggaggaggaaggggaaagggaagcggaaggggaaggggaaggggaaggggaaggagaaggagaaggaaaaggggaaggagaagtaggagaaggagaaggaggggaaaactatcctaccgttttctgcagtggctacaccattcccaacagtaacgatatcaacttgtcttcatgctccacaagaggcactcaatcactaaaggctatgactaatgatagcacagtggcccagactgaagaaatggggcaaaagaaaaactgtggcaaagaggatgtagctaaaaggacaaattcaaggtggacatgcatcccagagtgtggagatcatcttggcaacactaagggacaagcacgaagcattccattgttcctgggaatgtatgtccctgggaccaattactgccaacgcatgtgtgtggaagtgatggtgtcacttcctgggtcaaagtgtggctcccccatctctctgctgctggctggatgacgctctccaaagttctaagggatggcagagccataagagagggggagcctgggatcctgaaatcccccccaagaaaagaaagaataccccatggaccagcttcttggctgctgggtgagaatgggttgcagacctgcaggggcacatctgaagcagagatgcagggggaaggccacaaagggcagtcaggcctggagagggaggaactcttcagaaggcggatgattggaagtgagaagcgggcagcagagaggtggcagcaaggatcatacaggggattctggcttggccattggggaggtggaggtgttgtttaccaagatgcagagccccagagcaggaagggttttgtgaaggaagatgctcagttagggacgcagtgggccagaggacaggcacttcaaaccttagaaccaaataacggtttgggagcaatgcgagaagaggaagcaaggaagaggggattggagaagaagaaagagggggaggaagacagaggagaagaagaggaagggaagagaaagaaaaggagaaagaagagaaggaggaggagaaggaagcaaaattggaagctatcagcattaaaaatgatgatccataaagaagctctatcaaaaatcaacacagaaaacatcactctgcagccagcggtaattcctgaaccggagaacctcacacaggagaaatccaaaaaatacaggctagccagagttccaagtgtgaaggggggaactaaagcagtcctattttcacatcatcaactgctcagctggattgtagcagttaaacatgagaagtttcaggtgaagcccacagcagctgtcctacaaagtcatagctctgtttcacatgagcagaggcatttgttcctggagtccaagttggaggccatcttggtctggactccctcaaaagcaaagcctgtgatatggactggggtacagatcgtttatttgggaggtgatcctcggtacagggatgaggcagtaggaaagtga

SEQ ID NO: 7734 - DNA, 618 bp, Homo sapiens
  SIMILAR (1)..(108): 771254mologous to Homo sapiens Similar to PDZ domain- containing guanine nucleotide exchange factor I,accession number BC001956,Smith-Waterman Score=149.
atgcctgtggatcaccctcccatcaaagccttctcagagaaacgtacctcccagtcagtgaacatgctggccaaaacacatccgtataatcctctttgggcacagctggaatggtttaagcttttagaaatttcccccaagtcacccattaacacagacaaatttctacttaagagactttcagtgcctggttctgattcttgtcgtgtaagaatggaaaatgtgttggcatctcaagtcttacatccaggtcatgctgatgatgtaggagggaagtggctgggcagaagcaaggatcaccgagctcctgagcagcaaacccgtgaaagtggcatccggcttccctccctcttccctggtagtgctgagcagccatggagggggaacgcacagtggcacctgtcctggaaagctctcagaggagtctttggaatgattccagatagtcttctctatgaattccaccagtccgcaaagaagtcctcccacttcaaaccccctcaaccactcctctattggactttggttaacttcttaatacctttttcattgcactcttcaacctggttcatgtggagttcaaaccagggtataatgtgtaaagaagaagtcctgtaa

SEQ ID NO: 7735 - DNA, 5336 bp, Homo sapiens
  SIMILAR (3828)..(4379): 991254mologous to Cloning vector pZC320 SopA,accession number U26464,Smith-Waterman Score=949.
atggtccagtggcgaattccaccacattggaattccaccacagtgcttgttggcaaatctgcaagcagagtctggctctgccaccccaggcggaaggccagttggatgttggactcagggcagctccgatctccaaaacagaagggatcctcccacctcagggaacactacggaaccactgcaagttcctgtggactgtcattgttggtagatgggttcggggtcaagagcctgcaaatcccaagaggaactatctggaacttatattctgttccaaggatagctgaacctgtatggcttactatgatgtccggcactttggaaaaaaaccagctctgccagcgctttctcaaggagtttacacttctgatagaacagataaataaaaaccagttttttgctgccttactgactgcggtgttaacctaccacctggcctgggtcccaactgtcatgcctgtggatcaccctcccatcaaagccttctcagagaaacgtacctcccagtcagtgaacatgctggccaaaacacatccgtataatcctctttgggcacagctgggaaaaagcccttcttctaacttcctgtccaaaatcctcggtaaaaattaccttgttcaacggccactgagaaatgaggatttgggttttggggaatttaagccctggtcctcaagaatggcaacccaggttcagctttactggggcccagcccacaggtgtgtccagcgggcccctggcctcgtgctttttacgaatatcccttgtggggatgacaacaagagggccaacttcaggactgaaggagacattccccgaaatgaaagctcagatagcgccctgggagacagtgacgacgaagcctgcgcttcagccatgctagatctgggtcacggtggtaaatcacctgaggttcctaggaagagaagctgcctctgccaagagaaggtccgtggctggcagcagatgctacataaatataattttgacattgacacgccgtgtggcctctctcctgccgatcagagcagcatttgtcttaaggaacacttacggaacactgcaagttcctgtggactgtcattgttggtagatggggttcggggtcaagaggctgcaaatcccaagcatccagtcctggatgagccaatagctgaagctgtctgtattatcgcagacacggataaatggagtgtgcaggtagctacaagtcagaggaaagtgacggacaacatgaaactaggccaggatgtcctggtctctagtcaggtgtccagtttgctccagtccattttacagctctataagcttcacctccctgctgattttccaccccgtatgggaagtgaggagcgtctccgcccggcagctgccccatctgggagagaggtgaggggcagcccccgtaccgccagccgacccgtccgggagggagctcagttcctaacgggttacacgtctacagcccaggggatggggacacctgtcttagttcatctggactgcagtaacaaaataccatacactgagtggcttataagtaacagaaatttggaggatgggaagttcaggatcaaggcaccagcagatttagtgtctagattttgccgatttcgcaaccaccatcaaacagcattttcgcctgctggggcaaaccagcgtgtaccgcttgctgcaactctctcagggccaggcggtgaagggcaatcagctgttgcccgtctcactggtgaaaagaaaaaccaccctggcgcccaatacgcaaaccgcctctccccgcgcgttggccgattcattaatgcagctggcacgacaggtttcccgactggaaagcgggcagtgagcgcaacgcaattaatggattttgccgatttcggaaccaccatcaaacaggattttcgcctgctggggcaataccagcgtggaccgcttgctgcaactctctcagggccaggcggtgaagggcaatcagctgttgcccgtctcactggtgaaaagaaaaaccaccctggcgcccaatacgcaaaccgcctctccccgcgcgttggccgattcattaatgcagctggcacgacaggtttcccgactggaaagcgggcacgtttgagctctgctaagggtcagactgcctcctcaagtggatccctgacccctgtgtatcctgactgggagacacctcccagtaggggccgacagaacctcatacaggagagctctggctggaatctggtgggtgcccctctgggacgaagcttccagaggaaggaacaggcagcaatctttgctgttctacagcctccgctggtgatacccaggcaaacagggtctgtagtggacctccaacaaaccacagcagacctgcagcagacaggcctgttagaaggaaaattaacaagcagaaaacagccacatcaacatcaacaaaaaggacgtccactcagagaccccatccgaaggtcaccaacgatcacagctcctcaccagcaagggaacaaaactggatggagaattgagtttgatgaattgacagaagtaggcttcagaaggtgggtaataacaaactcctctgagctaaagaagcatgttctaacccaatgcaaggaagctaagaaccttgaaaaaagacacagcctgggcacaaaggaacccgctgccttgaagggaaggacccagtactggcaggattcatcacctgctgacttaaggccctggctttgtgctacactcttaaagcagtataagccaactgtgttctcccattccacagtggctgttcaccctagagcaggatttcttaacctcagcactgttgaccagcatccagtcctggatgagccaatagctgaagctgtctgtattatcgcagacacgaataaatggagtgtgcaggtagctacaagtcagaggaaagtgccgcacaacctgaaactaggccaggatgtcctggtctctagtcaggtgtccagtttgcttcagtccattttacagctctataagcttcacctccctgctgattttgttggggacattctcctggataataacctgaagtgtgttttccaacttggttccattctccctgtcactttcaggagccatgacccttatgatggggagggcacggatgaactcagaaccgcagggcttgcagcccagacaccgagcaactggcccggcagtcaggcacatacccagtaagcctggggcaggccacggtgttagaagactctaaagcggcactgccaggtcttggacccacactaatggctgtgactgtggtgacaacagaagctgcagtagccattggttgtgaagctgcccattctagcagagaagactttactaatcatcagttgtggaggagaactgtggaggggaaaaaaggagaggggaaaaataaatttatgagtggaggagtcaataccaccgttccacttctcaaaactagtagaaaaggaagcccagactcaccacatctccgggagaaaccttccttagaaaaggtcactttccagattggaagctttgcatctccagagtctgactttgaaagccgcatgaaaaaaatggaggaacgggtgaaggcctgtggcccctccttggaggccagtgaggctgctgatgtggctcaggacccgcaggtttctaggagcccttttaaacctggctttcaggagaatgtttgctgtcctcagaatcggctttcagagggggatgaaggcgagtctgacaagggttttgcagaggacagaggcagcagaaacgacatggcagcagatattgctgggcagctcagccacgctgctgacttgggcacagcctcccacgacgatgtcacttatgcaataaagcccacttgctggccggggcttgacattattccttcctgtctggctctgcaccgtattgaaactgagttaatgggcaaatttgatgaaggtaaactgcccaccgatccacacctgatgctccgactggccattgaaactgttgctgatgactatgatgtcatagttattgacagcgcgcctaacctgggtatcggcacgattaatgtcgtatgtgctgctgatgtgctgattgttcccacgcctgctgagttgtttgactacacctccgcactgcagtttttcgatatgcttcgtgatctgctcaagaacgttgatcttaaagggttcgagcctgatgtacgtattttgcttaccaaatacagcaatagtaatggctctcagtccccgtggatggaggagcaaattcgggatgcctggggaagcatggttctaaaaaatgttgtacgtgaaacggatgaagttggtaaaggtcagatccggatgagaactgtttttgaacaggccattgatcaacgctcttcaactggtgatctttacggagccataggctctccagtgagactgactcgcaccgtagtggtagggaagcagaaggacttagtccagcgaatactttatgtcctgacctactttctccgttgctctgagctacaagagaaccagctgacctggagtggcatcatggtgagtgtgtttgtatggcccaagctatgccagctggatgctccttccctgggaattccttgtgatctttacggagcggtaggctctccagtgagactgactcgcaccgtagtggtagggaagcagaaggacttagtccagcgaatactttatgtcctgacctactttctccgttgctctgagctacaagagaaccagctgaccgggagtggcaatcatggtgaaggtgaccaagttttaaatgggagcaagatcataacagccttggagaaaggagaggtggaggagtctgagtatgtggtcattacgatatgtgagagggctaaagccaggcttttggcaagagcccttcctgaaacattttctttggtcagtattttgacacagactgcctggtggatgtccaatatgaggtctcagagcatcagcacccagaatgtaaggaactttggccgctcacttctggcgggctactgccccacatacatgcctgatcttgtgcttcatgggaccggcagtgatgagaagctgaaccagtgcctggtggccgaccttgtccacacagtccatgtaagtgatcccagtgtggagcctctggctgctgacagtgtgtcagtcaaagtcttggctgacaccagggaaaagatgatgcttatggcggtggtcttcctcctaaccatagctggattagagctacaggtttcttcagccaagctgaatgtctcatcagttgacctggagggaaatataagtttgaaaagttgccatgcatcagtgagtcacactgaaggtcaactgtaa

SEQ ID NO: 7736 - DNA, 2827 bp, Homo sapiens
  SIMILAR (130)..(738): 661254mologous to Homo sapiens Similar to PDZ domain- containing guanine nucleotide exchange factor I,accession number BC001956,Smith-Waterman Score=703.
atggcagaaaaggaagcaggcatgtcttacatggtggcagaagttttgggcttcgtggctgtcatcatagaagccgagtctctcaaaagaatcaggttttttgaaaattttactgtagcagaagagaggtcaactgatgagacattcagcttggctgaagaaacctgtagctctaatccagctatggttaggaggaagaaaattgccataagcatcatcttttccctatgtgagaaagaagaagcacaaaggaatttccaggacttcttcttttctcattttcccctgtttgaatctcacatgaacaggctgaagagtgcaattgaaaaggctatgatctcctgtaggaaaatagcagaatcaagtctccgagtccagttttatgtcagccgtttgatggaagctctgggagaattcagaggaactatctggaacttatattctgttccaaggatagctgaacctgtatggcttactatgatgtccggcactttggaaaaaaaccagctctgccagcgctttctcaaggagtttacacttctgatagaacagataaataaaaaccagttttttgctgccttactgactgcggtgttaacctaccacctggcctgggtcccaactgtcatgcctgtggatcaccctcccatcaaagccttctcagagaaacgtacctcccagtcagtgaacatgctggccaaaacacatccgtataatcctctttgggcacagctgggtgatctttacggagccataggctctccagtgagactgactcgcaccgtagtggtagggaagcagaaggacttagtccagcgaatactttatgtcctgacctactttctccgttgctctgagctacaagagaaccagctgacctggagtggcaatcatggtgaaggtgaccaagttttaaatgggagcaagatcataacagccttggagaaaggagaggtggaggagtctgagtatgtggtcattacggtgaggaacgagcccgctcttgtacccccccatcctaccaccaacagcagcagagagacacaacccctggccgacagggtttcctgagtgcccagagggcactgacagtagagacctgggtcttaaacctgacaaagaagctaacaggaggccagagcagggttctgaggcttgcagcgcagggtgcctggggccagcatcagacgcttcctggaaacctcagaatgcattttgtggggatgagaaaaataaagaggcaccgcaagatggctcttcaagacttcccagctgtgaagttttgggggcaggaatgaagatggaccagcaagctgtctgtgagctgttgaaagtggagatgcctacaagactgccagaccggtcagtggcctggccttgccctgacagacatctccgggagaaaccttccttagaaaaggtcactttccagattggaagctttgcatctccagagtctgactttgaaagccgcatgaaaaaaatggaggaacgggtgaaggcctgtggcccctccttggaggccagtgaggctgctgatgtggctcaggacccgcaggtttctaggagcccttttaaacctggctttcaggagaatgtttgctgtcctcagaatcggctttcagagggggatgaaggcgagtctgacaagggttttgcagaggacagaggcagcagaaacgacatggcagcagatattgctgggcagctcagccacgctgctgacttgggcacagcctcccacggtgcaggaggaacgggagggaggaggctggaggccactagaggtttgtatgtgaaggctgcggaaggacctgtgctggagcctgttgcccccaggtgtgtccagcggggccctggcctcgtggctggtgcgaatatcccctgtggggatgacaacaagaaggccaacttcaggactgaaggagacattccccgaaatgaaagctcagatagcgccctgggagacagtgacgacgaagcctgcgcttcagccatgctagatctgggtcacggtggtgacaggactggagggtccttggaagtggagctgcctctgccaaggtctcagagcatcagcacccagaatgtaaggaactttggccgctcacttctggcgggctactgccccacatacatgcctgatcttgtgcttcatgggaccggcagtgatgagaagctgaagcagtgcctggtggccgaccttgtccacacagtccatcatccagtcctggatgagccaatagctgaagctgtctgtattatcgcagacacggataaatggagtgtgcaggtagctaccagtcagaggaaagtgacggacaacatgaaactaggccaggatgtcctggtctctattcaggtgtccagtttgcttcaatacattctacagctctataagcttcacctccctgctgattttttgcatcatgcatctttgagatatactacaggagatgtaccttgagaagtaaaatgctatctgaatatctccggggacacacacgagtccatgtgaaagaattaggtgtcgtactggggattgaatccaacgacctgcctctgttgactgctattgccagtactcattctccttatgtggctcaaatactcttataagctaaagctcaggacagttcttccttgggaggaaaaaaatcaaattctcaacttgaaggagaaagggaataaggctctctgtggatgttcaaaaggctgaggaagaggcaaacaggaaacagtcctttccacctttttgttttgtgtttttgctgtcaagctgatgcttcattgaagacttaggtttacttgacataatagcatttgt

SEQ ID NO: 7737 - DNA, 403 bp, Homo sapiens
  SIMILAR (402)..(1): 1001254mologous to Homo sapiens t-complex polypeptide 1 (AA 1 -556),accession number X52882,Smith-Waterman Score=673.
catagcaccagcctccacaaaatacttcagacacatatcatcaattccaccagtggttagaataacattggcaccagttgccaggatcttctgaattctctccttggtgatatctgattctctctgtctaatttggtccagtttttcagggtctgtaatgaccacctgtacaccaagcttcatttttgttttttgcaggctgaagtcaaggcaagcaatttttgcatttacgattctcttgggcatgccctgggatcccaccacacagttgagtgcatagccactgatgagcatactctccatttgacttctcccatgggctttcaaaatattaacagagttgactggatagcgtggctggcctcttatgtctgtgtatttaatagcaagtacagcatctact

SEQ ID NO: 7738 - DNA, 553 bp, Homo sapiens
  SIMILAR (1)..(141): 701254mologous to Mus musculus Pro-Pol-dUTPase polyprotein,accession number Y12713,Smith-Waterman Score=185.
atgcaacctgaactgcctatcatgaactgggtgctttctgagccatctagccataaagtgggtcatggacagcagcattccatcatcaaatggaggtggtatatatgtgattgggctgtagtaggtcgtgagagcacaaccaatggtttggcctggatggtccagggacttggaagaagcatgattggaaaattgaatgacaatgaaatttggggaaagaggtatgtggatagacctctctgagtggtcaaaaactgtgaagatatttgtatcacatgagagtgctcaccatatcacataaaagagctcagcagaggaggatttcaataatcaatgggatggaatgacctgttctgtggacaccactcatcctctttccctaaccacctctgtcatcgccaagtgggcccatgaacaaagtgaccatggtggcaggtatggaggttatgcaggggctcagcaacatggacttccacttaccaaggctgacctggctatgaccactgctgagtgcccaatttgccagcagcagagaccatcactgagcccttaa

SEQ ID NO: 7739 - DNA, 784 bp, Homo sapiens
  SIMILAR (4)..(156): 791254mologous to Mus musculus Pro-Pol-dUTPase polyprotein,accession number Y12713,Smith-Waterman Score=201.
atgactaaaattcaggaaccttctacctcagtaaaatttctaggggtccagtggagtggggcctatcaagatattccttctaaggtgaaggataagttgctgcatttggcccctcctacaaccacgaaagaggcttatttgggactattggattttggaggcaacacattcctcatttggtacagaacaggagaagactctacaacacgtccaggctgctgtgcaagttgctctgtttctcgagccatatgacccagcagatccaatggtgcttgaggtgtcagtggcagatagggatgctatttggagcctttggcaggcccccataagtgaatcacagtggagacctcaaggattttggagcaaggcccttccatcttctgcagctaactactctccttttgagagacagctcttggcctattactgggctttggtggaaactgaacatttgactatgggtcatcaagtcaccaagcaacctgaactgcctatcatgaactgggtgctttctgatccatctagccataaagtggggtgcgcacagcagcattccatcatcaaatggaagtggtatatatgtgatcgggctcgagcaggtcctgaaggcacaaccacccctgtcatcacccaatgggcccatgaacaaagtggccatggtggcagggatggaggttacacatgggctcagcaacagggacttccactcaccaaggctgacctggctacagccactgctgagtgcccaatttgccagcagcagagaccaacactgagcccttga

SEQ ID NO: 7740 - DNA, 643 bp, Homo sapiens
  SIMILAR (643)..(197): 1001254mologous to Homo sapiens succinyl CoA:3-oxoacid CoA transferase precursor,accession number U62961,Smith-Waterman Score= 768.
gctccttttgctttttattaaaatgtcacagcatgcctagagaacagtttatatggctgcataaagtctgaaacacaagaaaactaataaaaaaccacctgttaaatacacaattatgattattgatgtcctttcaattaaatcttgtgtgtttaaaatgaaaaacacgcagcctggtacaaatatccatatttcaatttgcgatctgctgcattggcatgagttttggtgaaactgcaaaatcacacccagtactcttctgtacgtcatccactgtcaggccttcccagagctcaatcagagtcaaccctttcttcttgtccacatcaaacacagccttttcagtaataatgcggttgacacattgctttccagtcaatggtaatgtacatttctccatgattttatgtgcatttccctttgcagaatgctccatggtgaccaccactttggttttcgcactggacactaaatccatagcacctcccattcctttcaccatcttcccaggtatcatccagttagccaggtcaccatatttggaaacctgcatcgctcctagcattgtcagatcgacgtgtccacctctaatcattgcaaatgattcatcgctggagaaaaaagaggctcctggaagaatagt

SEQ ID NO: 7741 - DNA, 2115 bp, Homo sapiens
  SIMILAR (1469)..(1507): 691254mologous to Mus musculus Pro-Pol-dUTPase polyprotein,accession number Y12713,Smith-Waterman Score=49.
atggacaccttactggacagtgaagatatagagcaattccatcatcgcagaaagttctgtttggacagcactgctctaggatacaacaggtggggtctatctgctgaggtcaagccataccaattggcactaccaacacctgatgttacagaccagaatgatggaatgtttcaggctgtgtttgatgtggacaagaagaaagggttgactctgattgagctctgggaaggcctgacagtggatgacgtacagaagagtactgggtgtgattttgcaaagaaagataggtcatggagaatgaaagtggtttatcatatgcttaaccaagtggtgactccagttgcagctgctgtatcagatgaggtttcattgcttgagcaaattaatacatctggtacctggtatgtagccactgacttggaaaatgccttttcctctattcctgtcataacggccaccagaagcaatttgccttcagctggcaaggccagcaatatacttttactgtcctacctcagggatatatcaactctccagcctacaccgatgacttcatggggagttccctgtgatcagttgacaaggaaaataagactagggcttagtccacagatggttctgcatgatatgcaggcaccacctgaaaccacccctgtcatcgcccaatgggcccatgaacaaagtggccacagtggcagggatggaggttatgcatgggctcagcaacatggacttccacttaccaaggctgacctggctatagctactgctgagtgcccaatttgccagcagcagagaccaacactgggccctcgatatggcataattcctcgggtagatcagccagattcctggtggcaggttgattatatttgggctcttccatcatggaaagggcagaggtttgtcctcagtggaatggacacttattctggatataggtttgcctatcctgcatgcaatgcttctgccaagactaccatctgtgaactcatggaatgcctcatccactgtcatggtattccacacagcattgcctctgaccaaggtactcactttacagctaaagaagtgtggcagtgggctcatactcatggaattcaccagtcttaccaagactcccatcatcctgaagcagctggactgatagaatggtggaatggccttttgaaatcacaattacaacaccaactaggtgacaatactttgcagggctggggcaaagttctccagaaggccatgtatgctctgaattggcatccaatatacgccaggattcacgggtccagaaatcaacgggtggaagtggaagtggcaccactcaccatcaaccctagtgatccactagcaaaatttttgcttcctgttcccgcaacattacattctgctggcctagaggtcttagttccagagggaagaacgatgccaccaggagcaggagacatgagaatgattcaattaaactggaagattgccacttggacacttttgggtcctcctacctcttcaattgccaatactgtgaaaagttctcttggtccagttggcttggataaaatgttggtggatgatgttggtgatgtaaccattactaatgatggtgcagccattctgaggttaccggaggtggtcattacagaccctgaaaaactggaccaaattagacagaaagaatcagatattatcaaggagagaattccgaagatcctggcaactgatgccaatattattctaatagctggtggaattgatgatatgtgtcaaaaggttggggctatggcaattagaagagctttaaaaagggaccttaaatgcattgctgaaacttctggagggactgttctgtcaaccctggccaatttgaagggtgaagaaacttttgaaactgcagtgtcgggacaggtggaagaagtggtacaggagagaatttgtgatgatgagctgatcttaatcaaaaccatgaagaaagttttggagtcaaaatccatgatgctagttggggatgctgtagaagcagccttttccatataccccgaaaactgtgaaaccagcatggagtctcaggaacagcttgctattgcagagtctgcaagacctcttcctgttattcactga

SEQ ID NO: 7742 - DNA, 246 bp, Homo sapiens
  SIMILAR (193)..(53): 391254mologous to Homo sapiens Human apolipoprotein E mutant protein fragment 11,accession number Y20298,Smith-Waterman Score= 66.
tcttttcgtctgcagatgactatagagaacatgaaccatttgaaattcattccccacaaagactacacagccaatcgcttggcagactgccagattcacttacagccccagctaattccaccaaacatggaggagtacatgaacagccttctctcagcggtgctgccttccgtgctgaacaaattccgcatttatctaactcttttgagattcttggaatatagcatatctgatgaaataaccaag

SEQ ID NO: 7743 - DNA, 3157 bp, Homo sapiens
  SIMILAR (752)..(612): 571254mologous to Homo sapiens Human secreted protein clone yk84_1 protein sequence SEQ ID NO:200,accession number Y73489,Smith -Waterman Score=122.
atggcagccgcagcctgtctggatgcatccggggaggcgcggccagggctgcgccctccatggagccagcagggcagaaaacaagcgggagcgctgccccctaccaagttggcggggctcctggcacagctgcagccagcagaggctccagacctgggcattcctgtactctcagctacccgggaagaccctctttccccacaggctcggaagtgcctgctcccactccctggcctctctccctgctcccagcacctgctctggtgcagagcaagttgtggccgagcctggggaccgtcacgaccgagtcgggtgtgcacaggcttggacactgctgtcacaccagctccctgccgcctcagccccctctggacttcgggtgccgataagcgtgggagagaggccagcaggggtgagggcagctccaagtgggcctgcaggcacccctcagcccaaacagcctgggcagtggagggagacagacacaggttcctgtccagaaaggggcagatcacaggtaaaaccccaccttcaagccagggacaacctgaagcctggggtctgagctgcagttgtccacataccttgcatacctcattcttcctggacacgggacccctgaatggtgggactgaaaaagctgtaacacaaacaggaccaaaacacgccccctgctcaccaggttgtgggcaacaaggaggaaagggctgcggcccttcgggaacaccagacctaggggctctccgagccagggctgtgacagtggggctctgcagttcctggcatctccaagcttccgggcatcactgcattccccagtacctgcagcagaaactgcttgtggtacacctggtccagccacagccttgcacaaagccagtgcctgtaccgtcttttcgtctgcagatgactatagagaacatgaaccatttgaaattcattccccacaaagactacacagccaatcgcttggtcagtgggctcctccagctgcccagcaatacttcccttgtaatcgatgagactctcctgggaacaggggcagctggataccccaggtgttcataatgtgacagcccttagcaacctcataacgtggcagaaggtggattatgacttcagctaccatcagatggaattcccctgcaatattaacggttttcattacttcggaggggaggtcactcctcccggcagacgtgccagattcacttacagccccagctaattccaccaaacatggagggagtacatgaacagccttctctcagcggtgctgccttccgtgctgaacaaattccgcatttatctaactttttttgagattcttgggattttaggcatattctgatggaaattaaccaaggcagttgaagatgactttggtgaaaatgcggaaagaacgaccctccagagcatccactgctgatgatcttcacccagctgctcgtggtggctcggtgtctgtctctcagtgcttggtcaagacaacgctgtcaagaagaacgattggctgagagcaaagcagctagagtccttttaagaaagaacgaggcttcaagcagccaaaaatgtgttgaatggaaatgaactttaaagaattaattacctattgaagagtaatgggccaactgtagccccaatatttgtaaaattcagatattcatttatacccccattgttttataggtaatttctatcccaaaccagtgacatttcctgaaatcaagcctggtaacccctgatgtttatatgatattcagtaaggacttttcccttactgatttcatggagcttttgaagtttgttttataataattaattatataaattagtaatgatgtaaaaaaagtatttgatattaaaagtttaatattgataatgttgctgattgtaccatttccttagcttcagctgagtcataggccagactgttgaaatgctgaaatgaagaagtgttgttgcagtttcaaagtcagaggaatcgtgcttcggatgttcttatgttttctagttctctggttttccagttcacagtgggttggggtgcattccagtagtccatctttggggaacggaggcgtacttgcccattgattcacatgactacatgaaattctggtattgtcatttcccagatgtttggccacagaaactttttcccacttaacatttgttaacagcctgcaaaactaaacttgtacatggcagtggttcccagacttttgtattttatggaccggtagtaatatttccaaaaatctggggtactataaggttgccaatttaccttgccaagtaatccgaataaatcactgtattatcaccatttttttcataaaaggaaaggacaatctatctctgaataagaggagtcctttaaacggaatgaatgtggcttttgggggcaaaagaaaccaagacactacattgtctttattttctcctatcccagtgcatttgagaaccatgcataaggggatgctggtgctacaaagctgtgcccaaatatgaaaacaaaataggaaacttagaaagcaataccccctttagaaagtttttattttcttagatgtcattgagttgctttgattctattggatttttggcatttttttatgggatcatcagttggttccaagtatgttagatcagctaacatctgctactccagtaacagcctcatacaactgcaggtaggttttctccagaccaattagttttaatagagcaaactaacaacagactgtagtagcatggttatggcaaccagaatcttcagaaaggttaggacattactttttaagctgtcagtgggtatcaagtaacttacctagtttggaggcagataaaggatcccttacgttttttcctataaggcctaaattgaaattgttaaccaaggaaacagggtcagccttgaaaaatcaaggaattcattgtacctaataactgaagtaaaaataactagttgttcaacttttcctaaactcaaatctatttttataaacaaatgtaaataatgtttatattagagttgaactggttttcatttttataactggtagactagaccttccttaaacttttagaaataaaatgaaggcttcactggatttgtgaggataaaatacattttctttaattgtcctagagc

SEQ ID NO: 7744 - DNA, 2825 bp, Homo sapiens
  SIMILAR (7)..(2430): 561254mologous to Homo sapiens ZNF91L,accession number AC003973,Smith-Waterman Score=2460.
atgccttcacacctaaatcaacatcagataattcatactaaggagaagtcctacaaatgtgaagaatgcggcaaatcctttaaacgctcctcaaactgtactacacataaaagaattcatactggagagaaaccctacagatgtgaggaatgtggcaaagcctttaggtggccctcaaaccttactagacataagagaattcatactggagagaaaccctacacatgtgaagaatgtggccaagcttttaggcgctcctcaacacttactaaccacaagagaattcatactggagagagaccctacaaatgtgaagaatgtggcaaagcctttagcgtatcctcaaccctcaatgaccacaagagaattcatactggagagaaaccctacacatgtgaagaatgtggcagagcctttaactgctcctcaacccttaagacacataagagaattcatactggagagaaaccctacaaatgtgaagaatgtgacaaagcttttaagaggcattcaagtcttgctaaacataagataattcatactggagagaaaccctacaaaactggctctttgcattttactgcagagatattgctggagcacgacataaacgattcatttcaaaaagtgatcctgagaaaatctggaagctgtgaccttaatactttacgtttaaagaaagactaccaacgtgtgggtaattgcaaggggcagaaaagcagttataatggcattcatcaatgtttgtcagctacccgtagcaaaacctgtcaatataataaatgtggcaaagcttttgggttgtgctcaatcttcactgaacataagaaaatttttagcagagagaaatgctacaaatgtgaagaatgtggcaaagactgtaggttgtcagattttaccatacagaagagaattcatactgcagatagaagttacaaatgtgaagaatgtggcaaagcctgtaaaaagttctcaaaccttactgaacataatagagttcatactggaaagaaaccctacaaatgtgaagaatgtggcaaaacatttacctgttcctcagcccttactaaacacaagagaaatcatactggagacagaccctacaaatgcgaagaatgtcacaaagcctttaggtgttgctcagaccttactaaacataagagaattcatactggagagaaaccctacaaatgtaaagaatgtcacaaagcctttaggtgttgctcagaccttactaaacataagagaattcatactggagagaaaccctacaaatgtaatgaatgtggaaaagcttttatgtggatctcggcccttagtcaacataacagaattcatactggagagaaaccctacatttgtgaagaatgtggcaaagcctttacctactcctcaacccttattagccacaagagaattcatatggaattgagaccttacaaatgtgaagaatgtggcaaaacctttaagtggttctcagacctgactaatcataagagaattcacactggagagaaaccctacaaatgtgaagaatgtggcaaaagctttacctgctcctcaaaccttattaaacacaagagaattcatatggaagtgagaccttacaaatgtgaagaatgtggcaaaacctttaagtggttcccagacctgactaatcataagagaattcacactggagagaagccctacaaatgtgaagaatgtggcaaaacctttacctgctcctcaagccttattaaacacaagagaagtcatactggagacagacctacaagtgcaaagaatgtggcaaagcctttaggtggttctcagaccttactaaacataagtaaacacaagagaattcatactggagagaaaccctacatttgtgaagaatgtggcaaagcctttatccgctcctcaacccttacaagccacaagagaattcatatggaagagagaccttacaaatgtgaagaatgcggcaaaacctgtataattcatattggagagaaaccctacaaatgtaatgaatgtggaaaaggttttatgtggatctcggcccttagaaaacataagagaattcatactggagagacaccctacatccatgaagaatgtggcaaggcctttacctactcctcaatccttattaaccacaagagaattcatatggaagagggaccttacaaatgcgaagaatgtggcaaaacctttatgtggctctcagactttactaatcataagagaattcaccctggtgagaaaccctacaaatgtgaagaatgtggcaaagtattgagctcgttctcacacgccattagacataagacaattcatagtagagagaagctccacaagtgttaaaaatgtggaaaagcctttaacaattcgtcatattgtgttcaacatcagagacttactactgaacaaatgtagtataaaggttattatgatgtttgtaatgaagatgagtataatggagctatatgtttctgaattctgaacaactatttacaaaattttatcctacttttttctgttgaaaatatgacttctctcgtctgctaaacacgtacagacctttagttttgatttacatcaatttaaatatacaaatgtatcactgtaaaataaactttaagtgtaacagatttatagagaaaatattcgtatttgtttatggttgtatacctattttgagaagaaaagaaaaatattagagtgaaacagataattttacatgtgttgatatcttgccagcaaaccagtaatttcaaagattttgaaagaaaatctgttttctctgctttgtattaaattcatttatctgaaatgtt

SEQ ID NO: 7745 - DNA, 536 bp, Homo sapiens
  SIMILAR (221)..(346): 341254mologous to Homo sapiens Human HUPF-I mutant protein fragment 34,accession number Y21386,Smith-Waterman Score=68.
tttttttttaaattacataagacattcaatactttattaaaacaggcttcgtgttagacgagtttccccaactacaggctaaggcgttctgaacaagcttaagatggaccatgctaagctgtgatgtttgggagattaggtgtattaaacacatttcaacttgcaatactttcaacctatgatgtactcaccggaatgtaacccattgtaaactgaggaacacctgtactcaccccactggaagggatgtgggaggaaggtcaagcgcctcttccaggtcagaaggggcagaggttggatacaaaccaggcagcctgggtccatggtaaaagaacctccactaagtgaggctggggctgaatcccacgtttcctgcctcaaggagattgcagcaggcccccctcttttcccctctctccagagcgagtcaccccctggctcccagacagccacacctggtgaaggagaatgcggtgacaatggagagaacccccaggttcagtaagctgcctcgtctggctcactacacctagctg

SEQ ID NO: 7746 - DNA, 2338 bp, Homo sapiens
  SIMILAR (140)..(1096): 591254mologous to Mus musculus NG28,accession number AF110520,Smith-Waterman Score=857.
gcggccgccgagcgcgagctagagctgctgcgcgccagtctggagcaccagcgcggggtgagtgagcttctgcggggccggttgcgggagctggaggaagcccgcgaggctgcggaggaggcagcggcgggggcccgggcccagctacgcgaaggccaccacccagaccccgtggagctgtgccgaaaaggccgcgcagaccgagtccccggcagaggcgccctccttgactcaggagagctcgcccggatccatggacggagacaagggccgtggcgcccgcgggcaatcctcaaatccatcatgaagaagagagacggcacacctggtgcccaacccagctccggacccaagagcctgcagtttgttggggtcctcaacggagagtacgagagctcctccagcgaggacaccaagcgacagcgatggcgacagcgagaacggtggcgccgagcccccgggtagctcctcgggctccggggatgacagcggcgggggatccgactcgggcacccctggccctcccagcggcggggacatccgggaccctgagcccgaggcggaggcagagcctcagcaggtggcacaggggaggtgcgagctgagcccgcgtctgagggaggcgtgcgtagcgctgcagcggcagctgagccggccccgcggagtagccagcgacggcggcgcagtgcgcctcgtggcccaggagtggtttcgagtgtccagccagcggcgctctcaggcggagcccgtggccaggatgctggaaggggtgaggcgcctgggacccgaactgctggcgcacgtggtgaacctggcggatggcaacgggaacacggccctgcactacagtgtgtcccacgggaacctggccatcgcaagcctgctcctggatacgggggcctgcgaggtcaaccgccagaaccgagccggctactcggccctcatgctggctgcactcacctctgtgaggcaggaagaggaggacatggctgtggtccagagactcttctgcatgggtgatgtcaatgccaaggccagtcagacggggcagacagccctcatgctggccatcagccatggccgacaggacatggtgggcaaccctactggcgtgtggggctgatgtgaatgcgcaggatgcggatggggccacagcgctgatgtgtgccagtgagtatgggcgcctggacaccggtgcggctgctgctcacccagccagggctgtgacccctgccatcctggacaatgagggcaccagtgccctggccaatcgccctggaaggctgaaacaggaatgaaggtggccgctctgctaacatgcccacctgagctcgggccatcccgacacccagagcggagtcacccccttggctccccagacagccaacacctggtgaaggagaatgcggtgacaaatggagagaacccccaggttcagtaagctgccatcgtcatggctcactacacctagctgtggggagatctcctcgtcagtcacctcagcctttggcgcacagaagggtcccagggtcccctggctcagaggctaacactggccgacagagaaaggcaatttcaggttggggtgactgtggcaggaacggggctcactctggccccaccaaggtgaggtggggacccaacgtgatagagccctgatccacccactctctgaaaacttctttgctaataaaacattcctactacgcttgtgttttgtttggggtagaaggtgcaatcgaacaaacacgaaccccccgcctcaaaaaaggaaaagcttcgtttggcaagaccgcacggcccaggatttccagagtgcggaggatcggtgaaccgccctgggagcccactcaagaaacctggagaaaccctagtcgtataacccagaacaagaacctgagttaacttgaaaacacaaacgctttaattttaaagggagccatctagagttcacgtgtggggggacaaaaaaaaagggaccaaactgtgacaagaccaattccccatggggccaaagtggtcgatccccgacatccaaagaccccagcgagcgagccaagctcaacgtgcacaccctccggggcttctcgctctgactccaacaagggtgagcacgtcgccctcgcgcacggggccattttacattgcgcatgatggatcaggctcgtgtcgtcccatgaatttccacggcgcacctgcgatgcagctgtccctgagaaaacggtcctgcccaggaccttgggttgaccctggctcagcttgataggctgcacacgggctggtgtmccatgatggcggcgcggcggcggtctggcggagagcgggggggggggggggg

SEQ ID NO: 7747 - DNA, 408 bp, Homo sapiens
  SIMILAR (6)..(407): 871254mologous to Mus musculus unconventional myosin 9bc,accession number AF143683,Smith-Waterman Score=576.
cgcgccctgctctcctgcgctgccctgacaactcggacccgctgaccagcatgaaggacgtcctcaagatcaccacgtgcgtggagatgctgatcaaggagcagatgaggaaatacaaagtgaagatggaggagatcagccaactggaggctgcagagagtatcgccttccgcaggctttcgctcctgcgacaaaatgctaacaagagccccaagacccgggacatccaggaggaggagctggaggtgctgctggaggaggaggcagccggcggcgatgaggaccgggaaaaggagattctcattgaacggatccagtccatcaaggatgagaaggaggacatcacctaccggctgccggagctggacccaaggggctcggacgaggagaacctggactcggagacgt

SEQ ID NO: 7748 - DNA, 464 bp, Homo sapiens
  SIMILAR (81)..(365): 601254mologous to Homo sapiens uncharacterized hematopoietic stem/progenitor cells protein MDS032,accession number AF220052,Smith-Waterman Score=255.
  misc_feature (1)...(464): n = a,t,c or g
ctaaacctggtgcggctgctatcccgctgcgaggcgattggcagcggagaaacgggacccggacgagtggcgcctggagaagcaaaccggcctctgaggtgatcaatgaatattcctggaaggtggattttctgagggggatgctgcaaggcgagaagctgacctcctcctcagagaaagcactggccaaccagttcctggcccctggcgtgntgccaaccacagccagagagcgagtaccctgccagtgagtnagaagcagtcggcagctgagctagacctcgtcctgcagcgacatcagaacctccagggaaaagctggcggaagagatgcttaggactggcccggagccttcaagaccaataccctgggccgcccagagttttcatcaagaaggacaaccagaccctgttcacattcattgaaaatgggcngaccagaacttggagaaaatttaagacgga

SEQ ID NO: 7749 - DNA, 1176 bp, Homo sapiens
  SIMILAR (836)..(991): 331254mologous to Escherichia coli Transposase,accession number AB024946,Smith-Waterman Score=64.
atgaacaagagccccaagacccgggacatccaggaggaggagctggaggtgctgctggaggaggaggcagccggcggcgatgaggaccgggaaaaggagattctcattgaacggatccagtccatcaaggaggagaagcaaaaagggcttggcctggcggccggctggactgcagatgtctcttccaggcgccctggagcctcgcagctgccgccacctccaactcaccccatcccccagtaccggggctggggcccgcccgaccagcatttattaagcaccctttggacaaatgttggttcctacaagtctggaagttttctacagttgggtggatggtgtatgaacttggacatggatttgaactctgaggagtctcgctggctttttcgaaggcactgggatactggcggcataaaaccccatgagcgtaagcgggctgtagctcacctgacactgtctgagcgcgaggagatacgagctggtttgtcagccaaaatgagcattcgtgcgatagctactgcgctgaatcgcagtccttcgacgatctcacgtgaagttcagcgtaatcggggcagacgctattacaaagctgttgatgctaataaccgagccaacagaatggcgaaaaggccaaaaccgtgcttactggatcaaaatttaccattgcgaaagcttgttctggaaaagctggagatgaaatggtctccagagcaaatatcaggatggttaaggcgaacaaaaccacgtcaaaaaacgctgcgaatatcacctgagacaatttataaaacgctgtactttcgtagccgtgaagcgctaaaccacctgaatatacaggcatcttgcgaggtcgcattggctttggcctggcgagcgttatataccggaatggcgagagaggtcccgttaccctttggaccgggcacccatttcggatggttcccgaacttctgtaaagagggctctggggcagtggggggagcatctctcgcggcgaaacgcctttttccccttgtgtgcgaccgtcgtttaatcctgctacgcggggacgctctgtctcctacacgtgttgacacgagctattgtgctgtcaacacaacatgtgggagaggcagcggcgcactatatgacggcgagtctgtgaatggacttttcctcttcttgtttcttgagtag

SEQ ID NO: 7750 - DNA, 853 bp, Homo sapiens
  SIMILAR (816)..(4): 871254mologous to Homo sapiens uncharacterized hematopoietic stem/progenitor cells protein MDS032,accession number AF220052,Smith-Waterman Score=1107.
ttatttgagtttaggcatgattcgaatgaagaggatcatgctaatgaagatgaagcagacgataatgagcatggcccagagcagccagttgactgacttctgcgtgtgctgctccagacgctctgactccgtcttcagtttctccaggttctggtccgccattttcagtgagtgtgacagggtctggttgtccttcttgatgacactctgggcggccagggtattggtcttgaggctccgggccagtcctagcatctcttccgccagcttttcctggaggttctgatgtcgctgcaggacgaggtctagctcagctgccgactgcttctcactcactggctgggaccctgccactccagttctcttccttacgtccaatctcaagcttctgcaagagtccgtgcctaagtagctcaattccgcatcttcgctggtgtaccgcgcccgtgactgcagatgcaccgtctttgtggcgggcactcgctctctggctgtggttggcacacggccaggggccaggaactggttggccagtgctttctctgaggaggaggtcagcttctcggcttgcagcatccccttcagaaaatcccaccttccaggaatattcattgatcacctcagaggccggtttgctggaaggcaggaagaagaaaaacaaaacctcgcgtggaccttcagggcctgcaacatgtcctctagggctcccacgtacttctccaggcgccactcgtccgggtcccgtttctccgctgccatcgcctcgcagcgggatagcagccgcaccaggtttagctccagcctcgacgccgccattatcgcccggccctacaccaccccttccgccacgaaa

SEQ ID NO: 7751 - DNA, 4084 bp, Homo sapiens
  SIMILAR (259)..(864): 901254mologous to Mus musculus unconventional myosin 9bc,accession number AF143683,Smith-Waterman Score=907.
atggcggcgtcgaggctggagctaaacctggtgcggctgctatcccgctgcgaggcgatggcagcggagaaacgggacccggacgagtggcgcctggagaaggtgggcgtcacctactccgtggcctcgggacgagtgctgtttcaggatttcaccgagcagttccaggtgctcctgcccaaggatgcccagccctgcagggaggtcatctccaccctcctggagaaaatgaagatagacaagaggaactaccagatcgggaagaccaaggtcgagccaggcgttgagcctggccacttcggcgtgtgcgtagacagcctgaccagcgacaaggcctcggtgcccatcgtgctggagaagctcctggaacacgtggagatgcacggcctgtacaccgagggcctctaccgcaagtcgggtgctgccaaccgcactcgggagctccggcaggcgctgcagacagaccccgcagcagtcaagctggagaacttccccatccacgccatcacaggggtgctgaagcagtggctgcgggagctgcccgagcccctcatgaccttcgcacagtacggcgacttcctccgagccgtcgagctgccggagaagcaggagcagctggctgccatctatgccgtcctggagcaccttccagaagccaaccacaactccctggagagactcatcttccaccttgtcaagcaaccatcctctaactgccagtggctgtgcagggtggccctgctcgaggatgtcaaccgcatgtcacctggggcgctggccattatcttcgcaccctgcctcctgcgctgccctgacaactcggacccgctgaccagcatgaaggacgtactcaagatcaccacgccctggcgcggcgacgcacacggtacctgcccccctctagccccctccggacagcagcatcgccacgctgcaggtgagaagcgcaccaaggaaccaggaggcaaagggaagaagaaccgaaatgtcaagattgggaagatcacagtgtcagagaagtggcgggaatcggtgttccgccagatcaccaacgccaatgagctcaagtacctggacgagttcctgctcaacaagataaatgacctccgttcccagaagacgcccattgagagcttgtttatcgaagccaccgagaagttcaggagcaacatcaaaacgatgtactctgtcccgaacgggaagatccacgtgggctacaaggatctgatggagaactaccagatcgtcgtcagcaacctggccactgagcgtggccagaaggacaccaacctggtcctcaacctcttccagtcactgctagatgagttcacccgtggctacaccaagaacgacttcgagccagtgaagcagagcaaagctcagaagaagaagcggaagcaggagcgtgctaatgacatccccttagtgccacaggccagatggtatatcacgggcagcaatttggtgagtgacctttttggcttctggaatattccgaggagcgtggcccggctctgctcacctcttgcgctgcaggtgcccccgacacaggctctgcaggcggatgatgctctgtttctggtgccggaccgccagcaggcctggatggtgacggcggcccgcttcatctgcaggaagtgccgacgctccagcaccatccggaaccagctctgcagcagcaggattttccgcaccacctcccggtgcagcgtctcctgcagggcttgccgctccgtctccttcaggaagacctggcctggctcagggccgctggctatctctcagtacgagggaccatacccagaacttcctacgtcagctgaggtttcatcaaccaggacctcacgtcttccgctatcatctctacagtgttccttcctcatttctgatgagctctgtggacaggggcacctcctcctcccaccctcaagtgaaagcctctttaaaactacagctcaggggccggttaaaacgagccgagagaccgagggggacgttgtgccgctcatcttcgggtgggcgtttccacgctcggatgtcctccctgggccggtccacggtctgtgccccagggcctggcgcactcgaggtccggtcgcatcggtggccccggacgacatcggtgatccttgcatgacttccgctgagtccttgggtgtgacatgccaagctgaagccctctggtgtgaccatgccaagtgggtccctgctgatactgaccactccaggtgcgtggagatgctgatcaaggagcagatgaggaaatacaaagtgaagatggaggagatcagccaactggaggctgcagagagtatcgccttccgcaggctttcgctcctgcgacaaaatgctaacaagagccccaagacccgggacatccaggaggaggagctggaggtgctgctggaggaggaggcagccggcggcgatgaggaccgggaaaaggagattctcattgaacggatccagtccatcaaggaggagaagcaagtggctcaggaggacatcacctaccggctgccggagctggacccaaggggctcggacgaggagaacctggactcggagacgtcggccagcaccgagagcctgctggaggagcgggccgggcggggggcctcggaagggccccctgcgcctgctctcccttgccccggcgcgcccaccccgagccccctccccaccgtggccgcccctccaccgacgaaggctgtcgtccttcgtaacggtcagagtgaagaccccccggcggacccccatcatgtccacggccaacatcaagctcccaccaggcctgccctcccacctgcctcgctgggcaccgggtgcccgggaggcggctgccccagtgcggcgccgggagccacctgcccgccgcccggaccagatacattccgtgtacatcacgcccggggcagacctgccagtgcagggcgcccctggagcccctagaagaggatggccagcccacctggggccaaagcggaggtacttcggatccccccaacgtactgcctgccccccgcctcgggccagaccaatggctgagagccacagctgacaaagtctgcatgtccgaggacggcccctgcactggagctgggcgccagagctgcagagctagtgttcggccctcagagaaggatccagaatcaaaagctcaagagtgacgtgaggtgggcaccggccccaagtgcagagtcaaggcagggatgaggccggctggagccaggccccctcgcacgcagcccccaaatcatggacgcacctgtggggagcaccacatctgccacctgcggcctcacatctccccactcccctttcttgtacgtgtaactgtttctttgtacgtggtttacgtaactttaaactgtaacagccttaatgggaagaccaaatggttttttatatgtgtatgtacaaagttttctatttaacggctgcccgtctcccttattaacctgggacgtgagctgttcagaggcaggaggccattagggccattgcggcgttcttgaggcttcagaccctgctgtggttgggcttggggtggccaatgggctggggaccctccatggaggagttttgggacacttggggtcaactggacccgtggcctatttggacacatgttttccgggggggcagccactgggccaaatgtggcatttttgcacgtgctggaaccttcccatgggggtctgggctaattgggctggaaccaggaacatgagtcaggggcaccattggacctcacgtgcccagggagactttgaatgtggctgtcactcttccggaacgccaagggcatgcaggaggctgctttttggcactacccccacccctgtacagaataggagcccagcgactcaggactgctcacgggtcaggagggcaacgcctgaagtcagacctccctataggtcaacagggacaacctggggatctctggagcagggccctcctctactcaggcttggcccactcccccagacacctggacacgtggcccacaaatctgggacaaggggcccccgcacagcatgaaataaaaagtgcctgagaaaaaaagtcgacgcggccg

SEQ ID NO: 7752 - DNA, 415 bp, Homo sapiens
  SIMILAR (31)..(123): 871254mologous to Homo sapiens ubiquitin conjugating enzyme,accession number L22005,Smith-Waterman Score=144.
gcggggcccgaagcgtttactttgaaaaaattagagcgctcggggtccccgggcggcggcggcggcgcagaggaggaggcaggcggcggccccggtggctcccccccggcccacctgtcccctcgggaggggagctgagcccgacttctaccggggtcccccagcttccggactggccgcaccccggaggagccacgggggcgctgctgggaacgtgggcggggggccgtttcctgacactaccagcctgggaggcccaggtgtagcggtccgaggggcccggtcctgcctgtcagctccaggtcctggagccacgtccagcacagagtggacggattcaccgtggccgactcttttccctgctttggtttgtttgaaatctaaataaaactactttatgagaggccagagaaaa

SEQ ID NO: 7753 - DNA, 307 bp, Homo sapiens
  SIMILAR (189)..(1): 361254mologous to Nicotiana tabacum extensin (AA 1- 620),accession number X13885,Smith-Waterman Score=84.
gcttcggggacgatgaggatgactctggcacggaggagtcctgacaccaccagaataaacttgccgagtttacctcactaggggcgctgctgggaacgtgggcggggggccgtttcctgacactaccagcctgggaggcccaggtgtagcggtccgaggggcccggtcctgcctgtcagctccaggtcctggagccacgtccagcacagagtggacggattccccgtggccgactcttttccctgctttggtttgtttgaaatctaaataaaactactttatgagaggccaaaaaaaaaaaaaaaaa

SEQ ID NO: 7754 - DNA, 972 bp, Homo sapiens
  SIMILAR (546)..(626): 601254mologous to Oryctolagus cuniculus ubiquitin-conjugating enzyme E2-32k,accession number U58652,Smith-Waterman Score=75.
atggctcggccgctagtgcccagctgcagaaggcgctgctgctggagctcaaggggctgcaggaagagccggtcagggattccgcgtgacactggtggacgagggcgatctatacaactgggagtggccatcttcgggccccccaacacctactacgagggcggctacttcagcctttcggttcctgaccaagatgtggcccctaacatctacgaggtgagcgcggcccccacgggcctcaagtcctcacctccgggacccagggtgctgggagcctcacgtcctcatccttccgggaccggggcgctgggagcctcacgtcctcgtcctccgggacccggggcgctggagcctcacgtcctcgtccttccgggacccgaggcgctgggagcctcagtcctcgtccttccgggacccggggcgctgggagcctcacgtcctcgtctccacgtcctcatcctccgggacctggggcactgggagcccgtgctgactctgacctgttctgacctgtcttcttcttgtgcagacgggggacgtgtgatctccatcctccacccgccggtggacgacccccagagcggggagctgcctcagagaggtggaaccccacgcagaacgtcaggctgtggcgccaaggctgattcgggacctgccagctggcggtcctgggcctcgctgtacctgcacgtgctttcacggggcctgcggcaccgtgtgtcggtgcagactcccccaggaccccaggccggccccaccgtctggaaccacctagaggtgtcccccatcctcagtcctggggccttctccttacccagccgtctctgggttggcacctcgtgccacgtgtgccgcctgggcctcgtccccagcccaacacttctcgcccgcaaacgtggacgcctccgtgatgtacaggaagtggaaaagagcaaggggaaggatcgggagtacacagacatcatccggtga

SEQ ID NO: 7755 - DNA, 1803 bp, Homo sapiens
  SIMILAR (1)..(366): 771254mologous to Homo sapiens ubiquitin conjugating enzyme,accession number L22005,Smith-Waterman Score=483.
atggctcggccgctagtgcccagctcgcagaaggcgctgctgctggagctcaaggggctgcaggaagagccggtcgagggattccgcgtgacactggtggacgagggcgatctatacaactgggaggtggccatcttcgggccccccaacacctactacgagggcggctacttcaaggcgcgcctcaagttccccatcgactacccatactctccaccagcctttcggttcctgaccaagatgtggcaccctaacatctacgaggtgagcgcggcccccacgggcctcaagtcctcatcctccgggacccagggtgctgggagcctcacgtcctcatccttccgggacccggggcgctgggagcctcacgtcctcgtcctccgggacccggggcgctgggagcctcacacgggggacgtgtgtatctccatcctccacccgccggtggacgacccccagagcggggagctgccctcagagaggtggaaccccacgcagaacgtcaggctgtggcgccaaggcctgattcgggacctgccagctggcggtcctgggcctcgctgtacctgcacggtgctttcacggggcctgcggcaccgtgtgtcggtgcagactcccaccaggaccccaggccggccccaccgtctggaaccacctagaggtgtcccgccatcctcagtcctggggccttctccttacccagccgtctctgggttggtcacctcgtgccacgtgtgccgcctgggcctcgtccccaggaccattctcctgagtgtgatctccctcctgaacgagcccaacaccttctcgcccgcaaacgtggacgcctccgtgatgtacaggaagtggaaagagagcaaggggaaggatcgggagtacacagacatcatccggacccaggagcatccagggcaccttccatcctgcactcgctggtacctggtgtcgtggggtcatctcggggcagcatcctggtgctgggcggtctcggctctgagcagccatgcccaagtcccgctgagctgtgtcgggcaggctgccgtggagcccggcttggtcagggatgttggtcttgctgaacaggacctccagaccgtcctccagctcatgctggcggtgtgccggcggcacctccacggtgcagtgccgtccccggggcactgtcagtcacccccccagcccatcggagagcttggaaagcaaagcttggcgtccgctgggtcccgccacccagggacgtccctgaggccagacgcctgccctccacgcgtcatgcatccccataaaaagcactgggcttgtgggctgggcttggggctgtctgtctgctccctggtgccctcccatgcgggcactgtgggacccgcacaccctggtagcagccagccccagagcccagagccgtgcctggtcggtgataggggctcgagcccattgcctgcggctgcagcctcgttcctgttttctgtcaaatggggtcagcgtgccgcctggccctgctgtgccacccccggaagcccctttgcttccagtcctggggggacattcttgacgcgtgtcctggaggtggagccgggggcaggttcctcgaagcaggtcctggggaccaaggtggacgcggagcgtgacggcgtgaaggtgcccaccacgctggccgagtactgcgtgaagaccaaggcgccggcgcccgacgagggctcagacctcttctacgacgactactacgaggacggcgaggtggaggaggaggccgacagctgcttcggggacgatgaggatgactctggcacggaggagtcctga

SEQ ID NO: 7756 - DNA, 1515 bp, Homo sapiens
  SIMILAR (1)..(861): 681254mologous to Homo sapiens ubiquitin conjugating enzyme,accession number L22005,Smith-Waterman Score=900.
attgcggcggcgccagagctgctggagcgctcggggtccccgggcggcggcggcggcgcagaggaggaggcaggcggcggccccggtggctcccccccggacggtgcgcggcccggcccgtctcgcgaactcgcggtggtcgcgcggccccgcgctgctccgaccccgggcccctccgccgccgccatggctcggccgctagtgcccagctcgcacaaggcgctgctgctggagctcaaggggctgcaggaagagccggtcgagggattccgcgtgacactggtggacgagggcgatctatacaactgggaggtggccatcttcgggccccccaacacctactacgagggcggctacttcaaggcgcgcctcaagttccccatcgactacccatactctccaccagcctttcggtttcttaaccaagatgtggcaccctaacatctacgagacggggtacgtgtgtatctccatcctccacccgccggtggaacggacccccagagcggggagctgccctcagagaggtgggaaccccacggcagaacgtcagggaccattcttcctgagtgtgatcttccctcctggaacggaggcccaacacctttcttcggcccgcaaacgtgggacggcttccgtggatgttacagggaagttgggaaagagagcaagggggaaggattcgggagttacacagaacatcattccggaagcaggtcctggggaccaaggtggacgcggagcgtgacggcgtgaaggtgcccaccacgctgccccgagtactgcgtgaaagaccaaggccgccgggcgcccgacgagggctcagacctcttctacgacgactactacgagggacgcgagggtggaaggaggaggccgacagctgcttcggggacgatgaggatgactctggcacggaggagtcctgacaccaccagaataaacttgccgagtttacctcactagggccggacccgtggctccttagacgacagactacctcaacggaggttttgtgctggtccccgtctcctctggttgtttcgttttggcttttttctccctccccaatgtctgttctgggttttcaacgttgctttcaagaagaaagaaggggcttgccccccacccgcccaactcacgttcacttcggggctcggttggacggggccccagggtgggagcggccggcccaccttgtcccctcgggaggggagcttgagcccgacttctaccggggtcccccagcttccggactggccgcaccccggaggagccacgggggcagctgctgggaacgtgggcggggggcccgtttttctgacactacccagcctgggaagccccaggtgtaagcggtccgaggggcccggtcctgcctgtcagctccaggtcctggagccacgtccagcacagagtggacggattcaccgtggccgactcttttccctgctttggtttgatatgaaatctaaataaaactactttatgagaggccaaaaaaaaaaaaaaaaa

SEQ ID NO: 7757 - DNA, 296 bp, Homo sapiens
  SIMILAR (169)..(110): 541254mologous to Gallus gallus variant retinoblastoma transcription factor,accession number AF043145,Smith-Waterman Score =58.
tctctctctctcttttttttttgttaaagcacatttctatgtaaagtccatgctccattctaaagatgcctctgggatttcagggatggatttttatgtagttcaatagttttcttggcagacagcttatgcaggagaggtgggccgttggctcagtccagccttgactgagcgcgggtcaggccagactctctgaacttggtgttggcgtgtgttttgtgtgtgtctggaggtgacatatgtgggtgacagaagcatatgttacagtgaaacattaaaactacagcaaagtgaaa

SEQ ID NO: 7758 - DNA, 415 bp, Homo sapiens
  SIMILAR (189)..(263): 361254mologous to Homo sapiens membrane-bound IgE, epsilon m/1 isoform,accession number S71439,Smith-Waterman Score=38.
tgtttcgaccttggattccctcagtaacggcgagtgaacagggaagagcccatcgccgaatccccgccccgcggcggagcgcgggacatgtggcgtacggaagacccgctccccggcgccgctcgtggggggcccaagtacttctgatcgaggcccagcccgtgtacggagtgatgccggtaccgttcccaggcgcgccgcacccggatattcccgcacctggtttggttgttaaagcagcccgaagcgactggtaaactccatctaaggctaagtaccgcctctactcgggtgaggggttctgctgtatcagccgcctttatttaaaatttgggaagcccctcttctaccggatttacttcaacaatagaaattatattctctctggctcaataaagccctggggaaataaacg

SEQ ID NO: 7759 - DNA, 1392 bp, Homo sapiens
  SIMILAR (2)..(115): 1001254mologous to Homo sapiens 65 kDa hydrophobic protein,accession number U17566,Smith-Waterman Score=188.
agagctctgtgccctggtcttcggggtcaacacgttctttgccaccatcgtcaagaccatcatcactttcattgtctcggacgtgcggggcctgggcctcccggtccgcaagcaggactcggtggtggtttttctagactgcccttccatctggtgacttcggtacattgacttactcatcctgagagttcacctgcagatccacttgtggggcttacgtgggagacgtgctgaatttaagcatattagtcagcggaggaaaagaaactaaccaggattccctcagtaaacggcgagtgaacagggaagagcccagcgcccgcaaactcccgccccgcgcggggcgcgggacatgtggcgtacgggaagacccgctccccggcgcccgctcgtggggggcccaagtccttctgatcgaggcccagcctctaccaccagtccagaacttgcagtgggtgcggtaaacggtggcccctcctcagcaaacatttccaggggattctggcagcagagtttccatgggaacatgtgctggttctgcgctgaacccggtgtggctggggttcccttcacagccaatattgcaggaactgagcctggtggcctcggccagggtaggcagtgctctttggccacccagtgtcacaaacctgaactcaagttacaggcaaaacctgcttttcctttttctttctctctctctctctttttttttttgttaaagcacattctaatgtaaagtccatgctccattctaaagatgcctctgggatttcagggatggatttttatgtagttcaatagttttcttggcagacagcttatgcaggagaggtgggccgttggctcagtccagccaggctgagtggcgtcactccattccttgcaatgccaggggatgtcatttgtccacctgagggggcttccccagtctcccttccctgacctgtggtcagaatgatggcctcagccttgactgagcgcgggtcaggccagactctctgaacttggtgttggcgtgtgttttgtgtgtgtctgccacctcccagcctccatacccgtcccctccccagtagtaaccaatcgggtcatttgggagtgttttcttcgtcgctgcttttatggcatctaggtgtctacctgtgaacatgtaaaatgtggagcgccgtgcgggcttccgaacagccgcgatgcattcattttgtaggtgttgtttgcacttgctttgttgatgcagccccacgtggtgggatctgccggagacagcacacaggagctgccagactccaattacagcaaaggatccctgaccttgggcctcttctacggctcccagcactgacttcaccaggctggagtcatcttccagttgttcaggggcaggcaccagct

SEQ ID NO: 7760 - DNA, 2871 bp, Homo sapiens
  SIMILAR (2293)..(2868): 991254mologous to Cloning vector pBACe3.6 levansucrase,accession number U80929,Smith-Waterman Score=986.
atgacgcccggcgagcgcagcctcattcaacgggccctgaaaaccctggaccgccatcttcatgaacccggcgtggccttcacctccacccgtgcagcacgggaatggctgattctgaacatggcgggactggagcgtgaagaattccgggtgctgtatctgaacaaccagaatcagctgattgccggtgaaaccctcttcaccggcaccatcaaccgcacggaagtccatccccgggaagtgattaaacgcgccctgtaccacaatgccgctgccgtggtactggcacacaatcacccgtccggtgaagtcacacccagtaaggcagaccggcttatcaccgaacgtctggtacaggcactgggcctggtggatatccgggagccggaccatctgatagtcggtggcaaccaggttttcacctttaacgaacatgggcaagacaagaggagtacatttctacagaacatcaagttcaagatagcaaaagtcacgagcaataccttcatcatggagccacaaatcgtcactcatggtgatttctcacttgataaccttatttttgacgaggggaaattaataggttgtattgatgttggacgagtcggaatcgcagaccgataccaggatcttgccatcctatggaactgcctcgaccgttccgtggcaaagcaaaagttcaaaatcaccaactggtccacctacaacaaagctctcatcaaccgtggctccctcactttctggctggatgatggggcgattcaggcctggcactgccccgttaaaacttattaccagtacactcctgtatcatcaaaagccatgtatgcgctttctggaacggtaattcagagactgcgcttccattcttggcttaatgaggatccattcgtttgtgaatatcaaggccaatcgtctgacctgcctcaacctcctgtcaatgctggcggcggctctggtggtggttctggtggcggctctgagggtggcggctctgagggtggcggctctgagggtggcggttctgagggtggcggctctgagggtggcggttccggtggcggctccggttccggtgattttgattatgaaaaaatggcaaacgctaataagggggctatgaccgaaaatgccgatgaaaacgcgctacagtctgacgctaaaggcaaacttgattctgtcgctactgattacggtgctgctatcgatggtttcattggtgacgtttccggccttgctaatggtaatggtgctactggtgattttgctggctctaattcccaaatggctcaagtcggtgacggtgataattcacctttaatgaataatttccgtcaatatttaccttctttgcctcagtcggttgaatgtcgcccttatgtcttaagcgcagggtccgagatcggggcggcgtgtgcaagccgatctgggtacgacaataaaggcgttcgtgatatagggtatacagactgcaagcgttcagaagatcttgatcccttgcgccatcagatccttggcggcaagaaagccatccagtttactttgcagggcttcccaaccttaccagagggcgccccagctggcaattccggttcgcttgctgtccataaaaccgcccagtctagctatcgccatcacgcactgctcatcctaacgcccatgtccggtacccgcttcccccccatccctggccccgtagtcaacatccgagtgtttcccttcgcccccagttctgaatgccggatctgctattcttggtcttgggtccctggatcccccgttcactgtcaatccgatggctccgttccgatcccatcttacgcgcctttggcgtctcagtattcttcctccttcctgttcttcaggaatagacagccctatgcgccttatgactaccttagcgtcatgaccccatctcgtacattgagggaacaaattcgcatcagatatgctcccagtgcccctcgtctcccgcccccggaggtgtactgctctaactccactatcgtctacgtgcgcaacaacccctcgggccccacaccgggtttcgcgggtggcacactgttggaaggccgatcgggcgggccctttcggttttacgccaagcgggcaaagggggatgttctcaagccatttagtttgaacctacccctccagaccctgatccggttcatggtggacattgcctgcggcatggagtacctgagctctcggaacttcatccaccgagacctggctgctcgaaaatgcatgtacgaattctggaggactcgagggtgggagacagcagcagcgtactacggcggcggcacgactttcttccgtaaagaaagccagaagcttcagcagagcgctaaaaaacgcgatgctgagttagcgaacggcgccctcggtatcatagagttaaataatgattacacattgaaaaaagtaatgaagccgctgatcacttcaaacacggtaactgatgaaatcgagcgcgcgaatgttttcaaaatgaacggcaaatggtacttgttcactgattcacgcggttcaaaaatgacgatcgatggtattaactcaaacgatatttacatgcttggttatgtatcaaactctttaaccggcccttacaagccgctgaacaaaacagggcttgtgctgcaaatgggtcttgatccaaacgatgtgacattcacttactctcacttcgcagtgccgcaagccaaaggcaacaatgtggttatcacaagctacatgacaaacagaggcttcttcgaggataaaaaggcaacatttgcgccaagcttcttaatgaacatcaaaggcaataaaacatccgttgtcaaaaacagcatcctggagcaaggacagctgacagtcaactaa

SEQ ID NO: 7761 - DNA, 478 bp, Homo sapiens
  SIMILAR (53)..(478): 621254mologous to Escherichia coli ATH1 protein,accession number D90769,Smith-Waterman Score=432.
gcgtcgctttgtttcggcagacaactgccgctcattgcgctggaaatcactatatacgccactggacgccgacgcgtcagtgctgatttcaacaggcattgacgccacgcaaaccaatcacggtcgccaacatctcgacgaaacccaggtgcgggtgtttggtcagcatctgatgcaggggagctacaccacccaggatggacgcagtgatgtggccatcagctgtagctgtaagctagaaatgtgcgcgcagcagagctacgaccaacttcttgcagcatcaacagaaaactggcgtcaatggtggcagaaacgtcgtatcacggtaaatggcggcgaagcgcacgatcagcaagcgttagattatgcgctttatcatctgcgcatcatgacgcctgcccacgacgagcgcagcagcattgcggcaaaaggcttaaccggcgaaggctacaaaggccacgatcactgggatacagaa

SEQ ID NO: 7762 - DNA, 409 bp, Homo sapiens
  SIMILAR (383)..(3): 891254mologous to Homo sapiens signal recognition particle subunit 14,accession number X73459,Smith-Waterman Score=570.
  misc_feature (1)...(409): n = a,t,c or g
nctgctgttgttgctgctgttgctgctgcgnnnnnnnnnnnnnnnnnnnnnnnnnnnnnngctttggtcttcttagttctgttcttcaggtctctcttcttcagcccatccatgttagctctaaggaggtctgaataagccatctgaaacttattcacttccttggagctcaccacagtgctgatcttcttcttcccatcggtagctcttaacagacacttgttgtctgcgggctcaaagccctccacagtacctttctttggaatgggtttggttcgaccgtcatacttcttcaaggtgatatagacgctgcccgacgtccggcacttctggaaaagtctggtcagctccgtcaggaactgctcgctctccaacaacaccatcgcggcgacgctggctcgctcgtgcc

SEQ ID NO: 7763 - DNA, 539 bp, Homo sapiens
  SIMILAR (50)..(457): 921254mologous to Homo sapiens signal recognition particle subunit 14,accession number X73459,Smith-Waterman Score=625.
  misc_feature (1)...(539): n = a,t,c or g
ngcgcggtttttgcngtactgccggctgtatgaattcggcacgagcgcgatggtgttgttggagagcgagcagttcctgacggagctgaccagacttttccagaagtgccggacgtcgggcagcgtctatatcaccttgaagaagtatgacggtcgaaccaaacccattccaaagaaaggtactgtggagggctttgagcccgcagacaacaagtgtctgttaagagctaccgatgggaagaagaagatcagcactgtggtgagctccaaggaagtgaataagtttcagatggcttattcaaacctccttagagctaacatggatgggttgaagaagagagacaaaaagaacaaaactaagaagaccaaagcnnnnnnnnnnnnnnnnnnnnnnnnnnnnnncgcagcagcaacagcagcaacaacagcagcaacaacagcagcaacagcagcacagtaaagggcatacatttcctgctttcaccaattaaccactgaattgctattttttcttttgccagataactaagtttgttccc

SEQ ID NO: 7764 - DNA, 2187 bp, Homo sapiens; identical to SEQ ID NO: 1148
  SIMILAR (1501)..(2184): 991254mologous to Escherichia coli ATH1 protein,accession number D90769,Smith-Waterman Score=1180.

SEQ ID NO: 7765 - DNA, 445 bp, Homo sapiens
  SIMILAR (20)..(193): 601254mologous to Homo sapiens signal recognition particle subunit 14,accession number X73459,Smith-Waterman Score=154.
ttcccgggtcgacgatttcgtgttgttggagagcgagcagttcctgacggagctgaccagacttttccagaagtgccggacgtcgggcagcgtctatatcaccttgaagaagtgtaagcagcgggaggggagccgggcgatgctccctgggttcccggtgtctgggagccaccggagtctgtctgccgcggaccgccgccttcctctacctttccccaccctgtactgagcacattcggggcttcgggcccggaaaatagtagggattgtagctggctcagtccccagcactgagccgcctaggttgcttctggtaacaatgggccccaagcagcccagggctctttgtcagggatcccagacgccgccactttgagtggaatttaacgtgcttcgatattacatgtttccgtcgtggaaataataagttctccagggtttcgcc

SEQ ID NO: 7766 - DNA, 2655 bp, Homo sapiens
  SIMILAR (511)..(1323): 901254mologous to Escherichia coli ATH1 protein,accession number D90769,Smith-Waterman Score=1283.
atgcgtgtactgggtattgaaacttcctgcgatgaaaccggcatcgccatttacgacgatgaaaaaggtttgttagccaaccaattgtatagtcaggtgaaattgcacgctgactacggcggcgtcgtgcctgaactggcctcccgcgatcatgtgcgtaaaaccgtaccgttgatccaggcggcgctaaaggagtctggtttaacggcaaaagacattgatgctgtggcctataccgcaggccctggattagtcggcgcgctactggttggcgcgaccgtggggcgttctctggcgtttgccctgggacgtttcggcgatccctgtacaccatattggagggcatctgttagcgcccgatgctggaagatacccgccccgaatttccgttgtgcgctgcttggttcggcggcatacgccgttaatcacgggactggcttgtcaaaaaaaccaaccaccctgggtagcgatcactcaaaaacgccggcacaacttgccaagcgcgcaggagaagcgcgacgcaacggctggcagggcgcgctatttccgtgggaaagcgcgcgcagcggcgaagaagagacgccggaatttgccgccattaacattcgcaccgggctgcggcaaaaagtggcctcggcgcaggcggaacatcatctggtggccgatatcgcctgggcggttattcaatactggcagaccacgggggatgaaagtttcattgcgcatgaaggcatggcgctacttctggagacggcaaagttctggattagccgcgcggtgagagttaacgatcgtctggaaattcatgatgttattgggccagacgaatataccgaacatgtcaataataatgcatacaccagctatatggcccgctacaacgttcaacaggcgctgaatattgcccgccagttcggctgtagcgacgatgcgtttatccatcgcgccgaaatgttcctcaaagagctatggatgccagaaattcagcccgacggcgttttgccgcaggatgattcgtttatggctaagccggcgattaatctggcgaaatacaaagcggcggcggggaagcaaaccatactgctggattattcacgcgcagaagtgaacgagatgcagatcctcaaacaagctgatgtggtgatgctcaattacatgctgccggagcagttctcagcggcatcgtgtcttgccaatctgcaattttatgaaccgcgcactattcacgactcgtcattacttagaacaacacacaacaagatcatcgccctgtgctctaacgagccagtggattgcgttctgtgggttaaaaacagccaacttatgcctaatgattacaacccaaacaacgtggcaccacccgaaaaaaaactgctgcaaaaatccattgaaatagatggttttacccaacccattgtggtcacacatacggataaaaatgccatggaaatcgtggatggttttcaccgccatgaaattggtaaaggctcatcatcattaaaattacgcttaaaaggttatttgccggtgacctgtctggaaggtacgcgtaatcaacgcatcgccgcgactattcgtcataatcgcgctcgtggacgccatcaaatcaccgccatgtcggaaatcgtccgtgaacttagccagttgggatgggacgataataaaattggcaaagagctgggaatggacagcgacgaagtgctgcgcctgaagcaaattaacggcctgcaagagttgtttgccgaccgtcaatattcccgcgcctggacgctaaagctggcgcaggcgttcagctgctgccagcaacgtcgattccttcttggcaaaacagagacgaatcagtttatgtgggaaaggatcggcgcaaaccccttggcgacggactcctatatgtgctcgacagatctcatcgcccgtatgcataatatcgtttacgcgcagcagaagtttacgacccagtgcgccgcctggcgcgacagcgagggcatcgcccataaccagcgtggcggtggtgctgctgtcggttcccgcttcccactgcttggcgagctgcaaagcatactcaaacaagccgtggaagaggcaaccgtcaaagcgccactacgtcacaatgcggtagaaatttttgacgaagtaaacaccggcaaaaataccggtagcggcgtaccgtgggtcacctgggacatcatccccgacaatgacgatgcggaaatcgaagtttacatggcaggcggcggctgcacgctacctggccgctcgaaagtgttaatgccgtcagaaggctacgaaggcgtggtgaaattcgtcttcgaaaatatctccaccctcgccgtaaacgcctgtccaccggtactggtgggcgtgggcatcgccacctcggtggaaaccgccgccgtactctcgcgtaaagccattttgcgcccgattggcagccgccatcccaatccaaaagcggcagaactggagctacgcctggaagaaggactcaaccgtctggggattggtcccacaagggctgaccggcaacagttcagtgatgggcgtacatatcgaatctgccgcccgccattcgtcaaccatcggcgttgctgtctctaccggctgctgggcgcattgacgcgggacgcttgctggtcatgccgatctcacctttga

SEQ ID NO: 7767 - DNA, 837 bp, Homo sapiens
  SIMILAR (223)..(618): 1001254mologous to Filamentous phage cloning vector fd-tet adsorption protein pIII precursor,accession number AF217317,Smith- Waterman Score=695.
atgttggacgagtcgaaatcgcagaccaataccaggatcttgccatcctatggaactgcctcggatcagatcacgcatcttcccgacaacgcagaccgttccgtggcaaagcaaaagttcaaaatcaccaactggtccacctacaacaaagctctcatcaaccgtggctccctcactttctggctggatgatggggcgattcaggcctgggtggcggctcctgagggtggcggctctgagggtggcggttctgagggtggcggctctgagggtggcggttccggtggcggctccggttccggtgattttgattatgaaaaaatggcaaacgctaataagggggctatgaccgaaaatgccgatgaaaacgcgctacagtctgacgctaaaggcaaacttgattctgtcgctactgattacggtgctgctatcgatggtttcattggtgacgtttccggccttgctaatggtaatggtgctactggtgattttgctggctctaattcccaaatggctcaagtcggtgacggtgataattcacctttaatgaataatttccgtcaatatttaccttctttgcctcagtcggttgaatgtcgcccttatgtctttggcgctgtacggcacgacgtacggcgaattcgggtcacaggagtgacccgcgtgacgccgccagaggaggtagatacaagtgtgcactcgcgcggtgcccatcgtatacgttctggattcgctccaaaacgaagtgtaagggtaacgacggacacgtgtataaaaagaaattccacctgcggggtcaagtccctctccctttgggatggcggtgggtttcgttga

SEQ ID NO: 7768 - DNA, 1047 bp, Homo sapiens
  SIMILAR (265)..(918): 881254mologous to Filamentous phage cloning vector fd-tet adsorption protein pIII precursor,accession number AF217317,Smith- Waterman Score=1002.
atggttcctgcgccgggttgcattcgattccctgttggtaattgtccttttaacagcgttcgcgtatttgttctcgttcaggcgcaatcaggaatgaatacgggtttggttaatcgaagtgattttgatgacgagcgtaatggctggcctgttgaacaagtctggaaagaaatgcataagcttttgccattctcaccggattcagtcgtcactcatggtgatttctcacttgataaccttatttttgacgaggggaaattaataggttgtattgatgttggacgagtcggaatcgcagaccgataccaggatcttgccatcctatggaactgcctcgccatgtatgacgcttactggaacggtaaattcagagattgcgctttccattctggctttaatgaggatccattcgtttgtgaatatcaaggccaatcgtctgacctgcctcaacctcctgtcaatgctggcggcggctctggtggtggttctggtggcggctctgagggtggcggctctgagggtggcggctctgagggtggcggttctgagggtggcggctctgagggtggcggttccggtggcggctccggttccggtgattttgattatgaaaaaatggcaaacgctaataagggggctatgaccgaaaatgccgatgaaaacgcgctacagtctgacgctaaaggcaaacttgattctgtcgctactgattacggtgctgctatcgatggtttcattggtgacgtttccggccttgctaatggtaatggtgctactggtgattttgctggctctaattcccaaatggctcaagtcggtgacggtgataattcacctttaatgaataatttccgtcaatatttaccttctttgcctcagtcggttgaatgtcgcccttatgtctttggcgctggacagttttgtgtttctggattcttggttgacataaaagaaaaagagaaggggggagaggaggaaaagggccagggagagattgagagagagagagaaagaaaagggaaaaaaggaagaaaagatatctcttag

SEQ ID NO: 7769 - DNA, 2285 bp, Homo sapiens
  SIMILAR (253)..(993): 891254mologous to Filamentous phage cloning vector fd-tet adsorption protein pIII precursor,accession number AF217317,Smith- Waterman Score=1174.
  misc_feature (1)...(2285): n = a,t,c or g
atggtgttgttggagagcgagcaggtatggctaggcctggccggccgagggaagggggcggctcaggcgttactcgagacctgtgcctcctgcaggaggaccagggccttgacgcggcaggacgaggatttggggctggctaacggggctgggcctgttgttttccagttcctgacggagctgaccagacttttccagaagtgccggacgtcgggcagcgtctatatcaccttgaaaaagtgtaagcagcgggaggggagccgggcgatgctccctgggttcccgtacactcctgtatcatcaaaagccatgtatgacgcttactggaacggtaaattcagagactgcgctttccattctggctttaatgaggatccattcgtttgtgaatatcaaggccaatcgtctgacctgcctcaacctcctgtcaatgctggcggcggctctggtggtggttctggtggcggctctgagggtggcggctctgagggtggcggctctgagggtggcggttctgagggtgacggctctgagggtgacggttccggtggcggctccggttccggtgattttgattatgaaaaaatggcaaacgctaataagggggctatgaccgaaaatgccgatgaaaacgcgctacagtctgacgctaaaggcaaacttgattctgtcgctactgattacggtgctgctatcgatggtttcattggtgacgtttccggccttgctaatggtaatggtgctactggtgattttgctggctctaattcccaaatggctcaagtcggtgacggtgataattcacctttaatgaataatttccgtcaatatttaccttctttgcctcagtcggttgaatgtcgcccttatgtctttggcgctggtaaaccatatgaattttctattgattgtgacaaaataaaaatattacgtggtgtctttgcgtttcttttatatgttgccacctttatgttaccggttattgccaacattgctatcccgcaaaagaggccgtttatgcaacaaaccaggtgcgaagttcaatgcagggaagacattgaggtgcaaaaactgaagagttacgacaaacttcttgcaagcatcaacaagaaacctggcgtcaatggttggcaaaaacgtcgtatcacggtaaatgccggcgaagcgcacgatcagcaagcgttagattatgcgctttatcatctgcgcatcatgacgcctgcccacgacgagcgcagcagcattgcggcaaaaggcttaaccggcgaaggctacaaaggccacgttttctgggatacagaagtatttttgttaccgtttcatctgtttagcgatccgacggttgcccgaagtttactgcgttatcgctggcacaacttgccagggcgcgccaggagaaagcgcgacggcaacggctgggcagggggcgcgcctatttccgttgggaaagcgcgcgcagcggcgaagaagnaaggacgccgggaattttgccgccccattaaccattctgcaccggggctggcggcaaaaagtggccctcgggcgcaggcgggaaccatcatctggngggcccgatatcgcctggggcggtttatttcaatactgggccagaccacggggggatgaaagtttcattggcgcatgaagggcatggcggctacttctgggagacggcaaagttctggattagccgcgcggtgagagttaacgatcgtctggaaattcatgatgttattgggccagacgaatataccgaacatgtcaataataatgcatacaccagctatatggcccgctacaacgttcaacaggcgctgaatattgcccgccagttcggctgtagcgacgatgcgtttatccatcgcgccgaaatgttggggatcgtcgctcacaaaaaggggatctgtcaccagcattcgaatgctcattcgagcgccaaccctgctcctaagaagtcagacacacaaacacacattcagagccagctgggctggggacacagtcccagaagtacagaatgtgttcgcttccaggtggcatgcctgtgcttcagctgtggctgtaccagcacggatgcagcctcaggctcctctcccagccttggcagccatccagaaagccagcccgaagaggaagggttaagtgcctggggacccagcccagacagcggctgctggaacagggaaggcagcctccaggccatggcacagagggctcctccagcacgagcctgccagccgccgcctttgttgatggactctgccacatgctcggctgacacgtga

SEQ ID NO: 7770 - DNA, 853 bp, Homo sapiens
  SIMILAR (789)..(328): 361254mologous to Homo sapiens 18 kDa Alu RNA binding protein,accession number U07857,Smith-Waterman Score=150.
ttttttttttttttttgataaacagacatgtttaatgatagcttgctcttcacagagatgtctacagagacttttaatctataatccaggagtatataaccatgcagcacagaccaattagccaaatgcaaaataaactagattcttaccacaactatcctataaacactgcaactattctttccaaaaggaccctaatcttatgtgaaaaacacctactgtgggggaaccagaaacctagctatctggccaaaaaggaaaaaatagcaattcagtggttaaattggtgaaagcaggaaatgtatgccctttaactgtgctgcttgtttgctggctggttggttggctggctggttggttggctggcttgtttggcttgcttgcgggcaaggtgcttgcttgcttgctgctgcctgttgttgactgctgttgctgcctgcctttgggtccttccttaattttgttctttttgtctctccttccttcaaaccccatcccatgttagcttcttaaggaggtttgaaataagccattctgaaaacttattcacattccttggaagctcaccacagtgctgatcttcttcttcccatcgggtagctcttaacagacacttgttgtcctggcgggctcaaagccatccaaaagtaccttttctttggaatgggtttggttcggaccgtcatacttcttcaaggtgatataggacgctggcccgacgtccgggcacttctggaaaaagtctggtcagctcccgtcaggaactgctcggctctccaacaacaccaactcgcggcgacgctggctcgactccctcggcttaagcccctagcagtgagagccggagtcgacc

SEQ ID NO: 7771 - DNA, 1024 bp, Homo sapiens
  SIMILAR (2)..(151): 701254mologous to Homo sapiens HSPC023,accession number AF078852,Smith-Waterman Score=169.
  misc_feature (1)...(1024): n = a,t,c or g
catggcgcaggggcagccaagtttcaggcgcacaaacccgcaaagagtaagacggccgcggagctctgaaaagaatcggggcccaagaaaaggcggtcgtgttatcgctcccaagaaggcgcgcgtcgtgcagcagcaaaagctcaagaaggtttcactatgctgctcgggctggtcttgaactcctggcctcaaggcatcctcccgcctctgcctcccaaaatgctgggattacaggcgtgacaccctatggttgtttttaagtgcaacatttatatgtagatggaacctaaggaagtcggaatccgggaaaaagatcgaacatgacgtggtgatgaaagcccagcagcagcctgccccaanaagctggcactgctgaaggcccccagcccaagaagaaatggggcagctgccgcccacctcctccaagacaccttccttgaggaccgctggcccccagttgcagggccaacatcccacccccttaccttccatatggggacctttgcaagttaattcccacaggctgtcactgttcaggatgaggaccctgtcccccagcgactgggcttcacctcgacactccagtgggggccccaagggtgctgagaacccaggcaatgaccagggaagatacagtcactaactttcatcttgtccccgttgcccctttcccagggtcctgccttccacaggttttaacccagaacaataaaactggccctgtcatccctcttgcagtcctgtgttcgggtgagcaggccaggtgagcccacaagtctccatgagtgacgtggcctggcgtgctccaccccaccccaccgcctttagcaaccatgtgcccgggggacagctgggcttctacacctctggccctggagcctgnagagccgggaaagagtcttttctgccatttaaccccgggtgaacttcactnccctgggnccagttcctgcacccctggggaacacaaccagagttcaagctgggacatcagttaggttcagatggccacctcacaggg

SEQ ID NO: 7772 - DNA, 2619 bp, Homo sapiens
  SIMILAR (130)..(1626): 921254mologous to Homo sapiens RNA helicase,accession number X98743,Smith-Waterman Score=2371.
atgaaggacctctacaaggagaactacaaaccactgctcaatgaaataaaagaggatacaaacaaatggaagaacattccatgctcacgggtaggaagaatcagtatcatgaaaatggccatactgcccaaggaaaaattttttcggattttgtcttttaaaaccaaagatacgaaaaaagcaaaaactgaaaacaaagggaaatctgaagaagaaagtgccgagactactaaagaaacagaaaataatgtggagaagccagataatgatgaagatgagagtgaggtgcccagtctgcccctgggactgacaggagcttttgaggatacttcgtttgcttctctatgtaatcttgtcaatgaaaacactctgaaggcaataaaagaaatgggttttacaaacatgactgaaattcagcataaaagtatcagaccacttctggaaggcagggatcttctagcagctgcaaaaacaggcagtggtaaaaccctggcttttctcatccctgcagttgaactcattgttaagttaaggttcatgcccaggaatggaacaggagtccttattctctcacctactagagaactagccatgcaaacctttggtgttcttaaggagctgatgactcaccacgtgcatacctatggcttgataatgggtggcagtaacagatctgctgaagcacagaaacttggtaatgggatcaacatcattgtggccacaccaggccgtctgctggaccatatgcagaataccccaggatttatgtataaaaacctgcagtgtctggttattgatgaagctgatcgtatcttggatgtggggtttgaagaggaattaaagcaaattattaaacttttgccaacacgtagacagactatgctcttttctgccacccaaactcgaaaagttgaagacctggcaaggatttctctgaaaaaggagccattgtatgttggcgttgatgatgataaagcgaatgcaacagtggatggtcttgaacagggatatgttgtttgtccttctgaaaagagattccttctgctctttacattccttaagaagaaccgaaagaagaagcttatggtcttcttttcatcttgtatgtctgtgaaataccactatgagttgctgaactacattgatttgcccgtcttggccattcatgtaagtgatgatgatgagctcattgaaaacaggggaaagcaaaagcaaaataagcgtacaaccacattcttccagttctgcaatgcagattcgggaacactattgtgtacggatgtggcagcgagaggactagacattcctgaagtcgactggattgttcagtatgaccctccggatgaccctaaggaatatattcatcgtgtgggtagaacagccagaggcctaaatgggagagggcatgccttgctcattttgcgcccagaagaattgggttttcttcgctacttgaaacaatccaagcttgagaaattgattgaaaagaattactttcttcataagtcagcccaggaagcatataagtcatacatacgagcctatgattcccattctctgaaacagatctttaatgttaataacctaaatttgcctcaggttgctctgtcatttggtttcaaggtaatgtataggaaagaacagagagagggttcagtgttgtccacagtttcagacatccactggggatccaggaatgtatccctggaggataagggggaactaccgtattcgctgggtgctgtttgtgattgtagtggcaggatggtccaggctagggacaagagacaaccagacttgaccagcctggccagattcagatatgaaggagccagttactggtatcacgtacaaaggcagtgctcaggacagtgccctggtgctgagtgctctgtccatggtaccggcctccgtgcatcctacgtgaaaaacttgctgccatacagcagcaggtacagaggctcatcccaaaccgtgagccagtctgggctttggcatacaggatttctaacagtctggatctcttggaattctggagagcagacttgggctttggaaagcggtccagtcctgcagcaccttcctaagcagagggctctcggctgtgccgactcaggacagctgctgcgacggggccggctacgcttgtcagagcagcagctggtgattttggacttgcctttgctggcaggggagcgctatcgagggttcattttatccagcttgaggaaagaaaggtcggagtgtaggggaagagtgggacaaacacgcgacccagtcatgccgagagcatgcgctgagggggacgtggagcgaggagtggggctccaggctgctgaggctccggaccaaccctgggaaggacagtcttacccggacgccacggtggtctcccggcagccctgggaaggacagtcttacccggacgccacggccgagctgcccttccctccctgctgcccccagggaaggctgctggtgtcctcagatgcgggcaggaggaacccgccagcgcctgagagcctggcccgaaccaggcctggaggtgctggggcgaagacacagaggatgtggcctccatccctggtaacagacggttaccagggcggctttgggtga

SEQ ID NO: 7773 - DNA, 507 bp, Homo sapiens
  SIMILAR (282)..(341): 601254mologous to Homo sapiens RNA helicase,accession number X98743,Smith-Waterman Score=57.
atgggtgggagtaacagatctgctgaagcatggaaacttgctaatgggatcaacatcattgtggccacatcaggccgtctgctggaccatatgcagaataccccagggtttatgtataaaaacctgcagtgtctggttattgatgaagctgatcgtatcttggatgttgggtttgaagaggagttaaagcaaattattaaacttttgctaactcatagacagactatgctcttttctgccacccaaactcaaaaagttgaagacctggcaaggatttctttgaaaaaggagccgtttatgttggtgatgatgatgataatgctaatgaaacagtatttgggaacactattgtgcacagatgtggcagcaagaggactggacattactgaagtggactgcattgttcagtatgaccctccggatgaccctaaggaatatattcatagtgtgggtagaacagccagaggcctaaatgggagagaaaattgggttttctttgctacttga

SEQ ID NO: 7774 - DNA, 1071 bp, Homo sapiens
  SIMILAR (1)..(402): 681254mologous to Drosophila melanogaster helicase pitchoune,accession number U84552,Smith-Waterman Score=504.
atggctgaaattcagcataaaactatcagaccacttctggaaggcagggatcttctagcagctgtaaaaacaggcagtggtaaaaccttggctgttctcatccctgctattgaactcgttgttaagttaaagttcatgcccaggaatggaacaggggtccttattctctcacctactagacaactagccatgcaaacttttggtgttcttaaagagctaatgactcaccatgtgcacacctatgggttgataataggtggcagtaacagatctgctgaagcacagaaacttgctaatgggatcaacatcattgtggtcacaccaggccgtctgctggaccatacgcagaataccccagggtttatgtataaaaacctgcaggttgaggacctggcaaggatttctccgaaaaaggagccattgtatgttggtgttgatgaagataaagctaatgcaactgtggatggtcttgagcagggacactttgtttgtccctctgaaaagagataccttctgctctttacattccttaagaagaaccaaaagaagaagctcatggtcttcttttcagcttgtatgtctgtgaaatacccctacgggttgctgaagtacattgatttgctgtcttggccattcatggaaagcaaaagcaaaataagcatacaaccacattcttctagtactgcaacgcagattcaggaacactattgttctcagcttgagaaactgattgaaaagaactattttcttcataagtcagcacaggaaacatataagtcatacatacgagcttatgattcctattctctgaaacagatctttaacattaataacttaaatttgcctcacattgctctgtcatttggcttcaagttgcctccctttgttgatctgaacatgaacagcaatgaaggcaagcagaaaaagcaaggaggatttggctaccagaaaaccaagaaagttgagaagtccataatctttaaacacattagcaaaaagtcatctgcagcaggcagttccctcactcaagagatgcctgtctttatcttgaataactttgtcctgacatga

SEQ ID NO: 7775 - DNA, 3130 bp, Homo sapiens
  SIMILAR (3)..(1847): 1001254mologous to Homo sapiens Human RNA-associated protein- 10 (RNAAP-10),accession number Y70229,Smith-Waterman Score=3156.
aatcaaaacaaaagcccatgaatgtgggcttatcagaaactcaaaatggaggcatgtctcaagaagcagtgggaaatataaaagttacaaagtctccccagaaatccactgtattaaccaatggagaagcagcaatgcagtcttccaattcagaatcaaaaaagaaaaagaagaaaaagagaaaaatggtgaatgatgctgagcctgatacgaaaaaagcaaaaactgaaaacaaagggaaatctgaagaagaaagtgccgagactactaaagaaacagaaaataatgtggagaagccagataatgatgaagatgagagtgaggtgcccagtctgcccctgggactgacaggagcttttgaggatacttcgtttgcttctctatgtaatcttgtcaatgaaaacactctgaaggcaataaaagaaatgggttttacaaacatgactgaaattcagcataaaagtatcagaccacttctggaaggcagggatcttctagcagctgcaaaaacaggcagtggtaaaaccctggcttttctcatccctgcagttgaactcattgttaagttaaggttcatgcccaggaatggaacaggagtccttattctctcacctactagagaactagccatgcaaacctttggtgttcttaaggagctgatgactcaccacgtgcatacctatggcttgataatgggtggcagtaacagatctgctgaagcacagaaacttggtaatgggatcaacatcattgtggccacaccaggccgtctgctggaccatatgcagaataccccaggatttatgtataaaaacctgcagtgtctggttattgatgaagctgatcgtatcttggatgtggggtttgaagaggaattaaagcaaattattaaacttttgccaacacgtagacagactatgctcttttctgccacccaaactcgaaaagttgaagacctggcaaggatttctctgaaaaaggagccattgtatgttggcgttgatgatgataaagcgaatgcaacagtggatggtcttgaacagggatatgttgtttgtccttctgaaaagagattccttctgctctttacattccttaagaagaaccgaaagaagaagcttatggtcttcttttcatcttgtatgtctgtgaaataccactatgagttgctgaactacattgatttgcccgtcttggccattcatggaaagcaaaagcaaaataagcgtacaaccacattcttccagttctgcaatgcagattcgggaacactattgtgtacggatgtggcagcgagaggactagacattcctgaagtcgactggattgttcagtatgaccctccggatgaccctaaggaatatattcatcgtgtgggtagaacagccagaggcctaaatgggagagggcatgccttgctcattttgcgcccagaagaattgggttttcttcgttacttaaaacaatccaaggttccattaagtgaatttgacttttcctggtctaaaatttctgacattcagtctcagcttgagaaattgattgaaaagaattactttcttcataagtcagcccaggaagcatataagtcatacatacgagcctatgattcccattctctgaaacagatctttaatgttaataacctaaatttgcctcaggttgctctgtcatttggtttcaaggtgcctcccttcgttgatctgaacgtcaacagtaatgaaggcaagcagaaaaagcgaggaggtggtggtggatttggctaccagaaaaccaagaaagttgagaaatccaaaatctttaaacacattagcaagaaatcatctgacagcaggcagttctctcactgaacacatgccttcctttcatcttgaataactttgtcctaaaatgaattttttttccccttgatttaacaggatttttgtagactttagaatttggacttacctaacaagagtataaattgacttgggttgcaagcactgagcactgttacttctatcacgtctctcttttatttctgggatataaaacaggctttaagtttcttggttgcccaagggcagagcaaggaatatctggtgtttcttgtgatgataatattttaattttaaatatccctccctcatacaagtgtatgttaccattttaatataattctttttgtacctttccttcttgttttgtgaagatttttgtggcatggattgctgtgctcactgctgtaaaaggtgacctagtgtactgggcagctggtggcggtgcagaaaagagtctcaggttattttagatttgtttaattcaaggtggtttggatttggtaagcctttgcactctgtagagtacttagaagacaagggcaacttacttggagttagagccaagctgtcagacggtgcccagcacacattaatgttagcttctttctgagaaaaaaatacctcttccaggccctgaaacaaaaaatacatttgctgtgaagattgaaaatgaacaaagttagaaaaaaaaacagcaaaatcagtgatttagtcasatgagtttttcgttgtaggagcacttgatttctagtgtgttttgtacagtatataactacaagatagtacattttgtagcagttcaaagccaaagttgctagcatcattttgctgttgtgccagttaatcataggatcccattaaataagtgtgctaacatcgaatatagagaaaactggtaaagaacattccagtaggaaaagaaaagaacaatcttccatttctgggcttggccaccatcaccctggtcggacctgtcctggacttccaaccttgactgctgagctcctggcttagcttcttgggttcctaattcctggtgtttaataattctctccacgatcatgtttttctgattttttttttcagaaataatgttttttaaaagacaaaaacaaagggaagaatatttaattactgagcagaagtaaatactgttggtattttgtacataaacctaatttttatatgcatgtttatgctttttaatttttttatcaaaaattaagtcatctacctactacttgtaaccagcttgtttcataacatgttattttcctgtgtcattaaataattacttcaaaaaaaaa

SEQ ID NO: 7776 - DNA, 921 bp, Homo sapiens
  SIMILAR (4)..(558): 501254mologous to Manduca sexta heat shock cognate 70 protein,accession number AF194819,Smith-Waterman Score=400.
atggtttttgatgccaaatatctgactggatggagatttgaggatactgttgtccagtctaatatgaagcatcagcccttcatagtggtgaataagcacaacgtccaagtagaatacaagggagagacaaaaagcttctatccagaggaagtgttttttatggttctgataaagatgaaggaaattgcagaaacctaccttggaaagactgttaccaatgctgtggtcacagtgccagcttactttaatgactctcagcatcaggctaccaaagatgctggaacaattgttagtctcaatgtacttagaattatcagtaagccaactgctgctgctactgcttatagacaaaaaggaattgacttcaatacctccattttccatgccttatttgaagaattgaatgcttacctgttccatggcactctagactccgtagagaaggcccttggaaatgccaaactagacaagtcacagatccatgatattgtcctgggccatttgagcaaggaagacattgaatgtatggtccaggaagctgagaaatacagagctgaagatgagaagcagaaggacaagatgtcatccaagaattcagttgaaagctatgcattcgatatgaaagcagctgttgaagatgagaaacttcaaggcaagattaacgttgaggacaaacagaagattcttgataagggtattaaaattatcaactggctggataagaatcagattcagaagaaggaagaatttcaacatcaaaatctggagaaagtctgcaaccacataattaccaacctgtaccagagtacaggaggcacaccagaaggaatgcctgggggattccctgatggtggagctccctctgctggagcttccccagggcccccattgaagaggctgactaagtcagctcaagtatag

SEQ ID NO: 7777 - DNA, 886 bp, Homo sapiens
  SIMILAR (464)..(880): 891254mologous to Homo sapiens 71 Kd heat shock cognate protein,accession number Y00371,Smith-Waterman Score=621.
ggcacgaggcgcctgcagctcttgggttttttgtggcttccttcgttattggagccaggcctacaccccagcaaccatgtccaagggacctgcagttggtattgatcttggcaccacctactcttgtgtgggtgttttccagcacggaaaagtcgagataattgccaatgtatcagggaaaccgaaccactccaagctatgtcgcctttacggacactgtaacggttgatcggtgatgccgcaaagaatcaagttgcaatgaaccccaccaacacagtttttggatgccaaacgtctgattggacggcagatttgatgatgctgttgtccagtctgatatgaaacattggccctttatggtggtgaatgatgctggcaggcccaaggtccaagtagaatacaagggagagaccaaaagcttctatccagacgaggtgctcttctatggttctgacaaagatgaaggaaatttgcagaagcctaccttggggaagactgttaccaatgcttgtggtcacagtgcccagtttactttaatgactctcagcgtcaggctaccaaagatgctggaactattgctggtctcaatgtacttagaattattaatgagccaactgctgctgctattgcttacggcttagacaaaaaggttggagcagaaagaaacgtgctcatctttgacctgggaggtggcacttttgatgtgtcaatcctcactattgaggatggaatctttgaggtcaagtctacagctggagacacccacttgggtggagaagattttgacaaccgaatggtcaaccattttattgctgagtttaagcgcaagcataagaaggacatcagtgagaacaagagagctgtaagacgcctccgtactacgaaa

SEQ ID NO: 7778 - DNA, 375 bp, Homo sapiens
  SIMILAR (2)..(328): 821254mologous to Homo sapiens heat shock cognate protein 54,accession number AB034951,Smith-Waterman Score=445.
  misc_feature (1)...(375): n = a,t,c or g
ggccagtattgagatcgattctctctatgaaggaatcgacttctatacctccattacccgtgcccgatttgaagaactgaatgctgacctgttccgtggcaccctggacccagtagagaaagcccttcgagatgccaaactagacaagtcacagattcatgatattgtcctggttggtggttctactcgtatccccaagattcagaagcttctccaagacttctatgaagctgttgcttatggtgcagctgtccaggcagccatcttgtctggagacaagtctggagaatgtttcaagatttgctgcnncttggatgtcactccnctttncccttggtattgaaactgctggtgggagtcatgactgttcctcat

SEQ ID NO: 7779 - DNA, 341 bp, Homo sapiens
  SIMILAR (1)..(216): 1001254mologous to Homo sapiens uncharacterized bone marrow protein BM034,accession number AF217511,Smith-Waterman Score=391.
aatgaaattatcaactggcttgataagaatcagactgccgagaaggaagaatttgaacatcaacagaaagagctggagaaagtttgcaaccccatcatcaccaagctgtaccagagtgcaggaggcatgccaggaggaatgcctgggggatttcctggtggtggagctcctccctctggtggtgcttcctcagggcccaccattgaagaggttgattaagccaaccaagtgtagatgtagcattgttccacacatttaaaacatttgaaggacctaaattcgtagcaaatttgtaagtggaaaatgcaatgtcttaaataaaactatttaaaattggcacc

SEQ ID NO: 7780 - DNA, 883 bp, Homo sapiens
  SIMILAR (846)..(881): 751254mologous to Homo sapiens 71 Kd heat shock cognate protein,accession number Y00371,Smith-Waterman Score=42.
ccagagacacccacttggtggagaagattttgacaaccgaatggtcaaccattttattgctgagtacaagcgcaagcataagaaggacatcagtgagaacaagagagctgtaagacgcctccgtactgcttgtgaacgtgctaagagtactgtctcttccagcacccatgccagtactgagatcgattctctctctgaaggaatcgacatctatacctccagtacctgtgcctcatttgaagaattgaatgctgacctgttccttagcaccctggacccggtagagaaagcccttcgagatgccaaactagacaagtcacagattcatgatattgccctgagcatcaaccctgatgaagctgttgcttatggtgcagctgtccaagcagccatcctgtctggagacaagtctgaaaatgttcaagatttgctgctcttggatgtcactcctctttcccttggtattgaaactgctggtagagtcataactgacctcatcaaacataatactaccattcctaccaagcagacacagaccttcactacctattctgacaaccagcctggtgtgcttattcagctttatgaaggtgagcataccatgaccaaggacgacaacctgcttgacaagtttgaactcacaggcatacctcctgcaccccgaggtgttcctcagattgaagtcacttttgacactaattccaatggcatcctcaatgtttctgctgtggacaagagtacaagaaaaaagaacaagattactatcactaatgacaagggccatttgagcaaggaagacattgaatatatggtccaggaagctgagaagtacaaagctgaagatcagaagcagagggaaagtgtcatccaagaactcacttga

SEQ ID NO: 7781 - DNA, 323 bp, Homo sapiens
  SIMILAR (7)..(192): 981254mologous to Homo sapiens heat shock cognate protein 54,accession number AB034951,Smith-Waterman Score=329.
gcacgagctgacaaccagcctggggtgcttattcaggtttatgaaggcgagcgtgccatgacaaaggataacaacctgcttggcaagtttgaactcacaggcatgccaggaggaatgcctgggggatttcctggtgggggagctcctccctctggtggggcttcctcagggcccaccattgaagaggttgattaagccaaccaagtgtagatgtagcattgttccacacatttaaaacatttgaaggacctaaattcgtagcaaattctgtggcagttttaaaaagttaagctgctatagtaagttactgggcattctcaata

SEQ ID NO: 7782 - DNA, 1485 bp, Homo sapiens
  SIMILAR (436)..(1482): 881254mologous to Mus musculus heat shock protein 70 cognate,accession number M19141,Smith-Waterman Score=1607.
atggtttttgatgccaaacgtctgattgcacacagatttgatgatgctgttgtccagtctgagatgaagcattggcccttcatggtggtgaatgatgctggcaggcccaaggtccaagtggaatacaagggagagagcaaaagcttctatccagagaaggtatcctctatggttctgacaaatatgaaggaaattgcagaagcctaccttgggaagactgttacccatgctgtggtcgcagtgccagcttactttaatgactctcagcgtcaggctaccaaagatgctggaactattgttggtctcaatgtacttagaattattaatgagccaactgctgctgcttatggcttagacaaaagacacagatcctcactacctattctgacagccagcctggtgtgctggttcaggtttatgaagcacccaggccatattgagatcgattgtctctatgaaggaatcaacttctgtacctccattacccatgcccgatttgaagaactgaatgctgacctgttccgtggcaccctggaccccgtagagaaagcccttcgagatgccaaatttgacaagtcacagattcatgatattgtcctggctggtggttctactcgtatccccaagattcagaagcttctccaagacttcttcaatgggaaagaactgaataagggcatcaacgctgatgaagctgttgcatatggtatagctgtccaggcagccattctgtctggagacaagtctgaaaatgttcaagatttgctgctctttgatgttactcctctttcccttggtattgaaactgctggtggaacacagatcctcactacctattctgacagccagcctggtgtgcttattcaggcttatgaaggtaagcatgccatgaccaaggataacaacctgcttggcaagtttgaactcatgggcatacctcctgcaccccgaggtgttcctcagactgaagtcacttttgacagtgatgccaatggcatcctcaatgtctctgctgtggacaagagtacaggaaaagagaacaagattactatcactaatgacaagggctgtttgagcaaggaagacattgaacgtatggtccaggaagctgagaagtacaaagctgaagatgaaaagcagagggacaaagtgtcatccaagaattcacttgagtcctatgcattcaacatgaaagcaactgtcgaagatgagaaacttcaaggcaagattaacgatgaggacaaagagaagattctggacaagtgtaatgaaattatcatctggctcaatgagaatgagactgccaagaaggaagaatttgaacatcagcagaaagagctggagaaagtctgcaaccccatcatcaccaagctgtaccagagtgcaggaggcatgccgggacgaatgcctgggggattccctggtggtggagctcctccctctggtggtgcttcctcagggcccaccattgaagaggttgattaa

SEQ ID NO: 7783 - DNA, 2458 bp, Homo sapiens
  SIMILAR (1150)..(2097): 411254mologous to Homo sapiens 71 Kd heat shock cognate protein,accession number Y00371,Smith-Waterman Score=368.
  misc_feature (1)...(2458): n = a,t,c or g
cccacgcgtccgcccacgcgtccgctcgcctgcagctcttgggttttttgtggcttccttcgttattggagccaggcctacaccccagcaaccatggtccaagggacctgcagttggtattgatcttggcaccacctactcttgtgtgggtgttttccagcacggaaaagtcgagataattgccaatgtatcagggaaaccgaaccactccaagctatgtcgcctttacggacactgtaacggttgatcggtgatgccgcaaaggantcaagttgcaatgaaccccaccaacacagtttttgattgccaaaccgtctgattggacggcagatttgatgatgctgttgtccagtctgatatgaaacattggccctttatggtggtgaatgatgctggcaggcccaaggtccaagtagaatacaagggagagaccaagagccttgtatccagaagaaggtgtcttcttatggttctgacaaagatgaaaggaaatttgcagaagccttaccttggggaagactgttaccaatgcttgtggtcacagtgcccagtttactttaatgacttctcagcgtcaggctaccaaagatgctggaactattgctggtctcaatgtacttagaatttattaatgaggccaactgctgctgctattgctttacaaaagttcagacaaaaaaggtttggagcagaaagaaacgtgctcatctttgacctgggaggtggcacttttgatgtgtcaatcctcactattgaggatggaatctttgaggtcaagtctacagctggagacacccacttgggtggagaagattttgacaaccgaatggtcaaccattttattgctgagtttaagcgcaagcataagaaggacatcagtgaagaacaagagagctgtaagacgcctccgtactgcttgtgaacgtgctaagcgtaccctctcttccagcacccagggcaggtatcaagatcgattctctctaggaagggatcgacttctatacctccattacccgtgcccgatttgaagaactgaatgctgacctgttccgtggcgaccctggacccaggagagaaagcccttccgagatgccaaactagacaagtcacagatttcatgatatttgtcctgggttggtggttctacttcgtattccccaagattgcagaagtcttgctgccaagacttctttcaatgggaaaaagaacttgaattaaggagcatcaaccctggatggaaggctgttggtttattggtgcagctgttccagggcagccattcttgtctgggagacaagttctggagaatgtttcaagatttgctgctcttgggatgtcactcctctttccccttgggtattgaaaactgctggtggagtccatgactgtcctccatccaagcgtaataccaccattcctaccaagcagacacagaccttcactacctatttctggacaacccagcctgggtgtggcttattcaggttttatgaagggcgagcgttgccatggacaaaggataaccaaccggctttggcaagttttgaactcacaggcatacctcctggcaccccgaggtgtttcctcagatttgaagtcacttttgacattgatgccaatgggtatactccatggtctctggctgtggacaagaagtacgggaaaaagagaacaaagattactatcactaattgacaagggccgttttgagcaagggaagacattggaacgtatggttccagggaagctgaggaagttacaaagctggaaggtggaggaaggcaggaggggacaagggtgtcatccaacgatttcacttgaggtcctatgcctttcaacatgaaaagcaccttgttgaaagatgagaaactttcaaggccaggattaacgatgagggacaaaacagaagatttctggaccaagtgtaattgaaattatccaactggctttgataagaatcaagactgcttgagaaggaagaatttgaacatcaacaggaaagagctggagtatagtttgcaaccccaatcatcacccaagctggtacccagagtgccaggaggcattgccagggagggaatccctggggggntttcctgggtggtggagctcctcccctttggtgggtgcttcctacagggcccaccatttgaagaggttgatttaagcccaacccaagtgttagatgtagcattgtttccacacattttaaaaccattttgaagggacctaaatttcgtaggcaaaatttcttttgggcaagttttaaaaaagtttaaggctngcttattagttaaggtttacttgggcattcttcaattactttgaattttgggaacatatggcacagggggaaggaaataacattgcccttttataaacactgttttgttagttggaaaatgccatgtcttaaataaacctatttaaaattggccccataaaaaaaaaaaaaaag

SEQ ID NO: 7784 - DNA, 758 bp, Homo sapiens
  SIMILAR (3)..(755): 861254mologous to Homo sapiens translation initiation factor 3 47 kDa subunit,accession number U94855,Smith-Waterman Score=1082.
ggcccttccctggtggccgtgtggtcaggctgcacccagtcattttggcctccactgtggacagctacgagagacgcaacaagggtgctgcccgagttatcgggaccctgttgggaactgtcaacaaacactcagtggaggtcaccagttgcttttcagtgtcacacaatgagtcagatgaagtggctgttgacatggaatttgctaagaacatgtatgaactgcctaaaaagtttctccaaatgagctcatcttggggtggccatgacatcacagagcactctgtgctgatccatgagtactacagccgagaggcccccaaccccatccacctcactgtggacacaagtctccagaacggccatatgagcatcaaagcctatgtcagcactttaatgggtgtccctgggaggatcgtgggagtgttcacacctctgacagtgaaatacgcattctatgacactgaatgcatcagagttgacctgatcatgaagacctgctttagccccaacagagtggttggactctcaagtgacttgcagcaagtaggaggggcatcagctcgcatccaggataccctgagcatagtgttgcaatatgcagaggatatactatctggaaaggtgtcagctgacaataccatcaggaaggtgggccacttcctgatgagcctggttaaccaagtaccaaaaatagttcccgatgacttcgagaccatgctccacagcaacatcaatgacctgttgatggtgacctaa

SEQ ID NO: 7785 - DNA, 1824 bp, Homo sapiens
  SIMILAR (388)..(705): 771254mologous to Homo sapiens translation initiation factor 3 47 kDa subunit,accession number U94855,Smith-Waterman Score=391.
atgagaaaaggaggacctccaaagcccttgttactgagcaccttaacaacccatgccaccttggcactgccacaagcttctacggccacaacacttaagcacccacagaggatcccctcttacattcgagttctgtttgccatcctgaagatgccatcaactactgggagacaaaaggccttttccacctgtgcctctcacctcacatctgtgaccctgttctatggcacagccaatatgacttatttacaacccaaatctggctactcacccgaaaccaagaaactgatctcattggcttacacgttgcttacccctctgctcaatccgctcatctatagcttacgaaacattgacctgatcatgaagacctgctttagccccaacagagtgattggactctcaagtgacttgcagcaagtaggaggggcatcagctcgcatccaggatgccctgagtacagtgttgcaatatgcagaggatgtactggtggctgttgacatggaatttgctaagaatatgtatgaactgcataaaaaagtttctccaaatgagctcatcctgggctggtacgctacgggccatgacatcacagagcactctgtgctgatccacgagtactacagccgagaggcccccaaccccatccacctcactgtggacacaagtctccagaacggccgcatgagcatcaaagcctacgtcaggtgcagcagctttggggttttcctagttatttatgtggtgaccctgatgggaaatgccatcattacagtcatcatctccttaaaccagagcctccacgttcccatgtacctgttcctcctgaacctatctgtggtggagaacgttgatcttaaagggttcgagcctgatgtacgtattttgcttaccaaatgggggggtagtaatggctctcagtccccgtggatggaggagcaaattggggatgcctggggaagcatggttctaaaaaatgttgtacgtgaaacggatgaagttggtaaagcagcctttgcacttctctgcgggactccttccccagccggctttggtcctctttcaccagctgctagggagcacagactcctcaggaccctgtgccgggaaagctcggagcagcccccatcatcatcgggccggcagaaaggtggaagacgtcgagccaatgaagatgattacagagaagtataccgagagcatgtgcgctgcctagaggaatggcaggaggcaggagtcaatggcagatacaaccaggtgctcctggtggccaagcccagctcagagagcgcagaatcacttgcctgccccttcccggagcaggagctggagtctgtcacggtggaggctctatttgattcaggggaaaagccctcactggccccatccttagttgtgctacaggggtcggctggcactggaaagacaactctcgccagaaaaatggtgttggactgggccaccggtactctgtacccaggccggtttgattatgtcttttatgtaagctgcaaagaagtggtcctgctgctggagagcaaactggagcagctccttttctggtgctgcggggacaatcaagcccctgtcacagagattctgaggcagccagagcggctcctgttcatcctggatggctttgatgagctgcagaggccctttgaaaaaaagttgaagaagaggggtttgagtcccaaggagagcctgctgcaccttctattaagagacatacactcccacgtgctcccttctataaccacccgacccttgcttttgaggatctggaagccttgcttgaaccagcaacagatgttcatatcctaa

SEQ ID NO: 7786 - DNA, 1318 bp, Homo sapiens
  SIMILAR (44)..(919): 481254mologous to Homo sapiens translation initiation factor 3 47 kDa subunit,accession number U94855,Smith-Waterman Score=420.
ggcacgagggacaagatggccacaccggcggtaccagtaatgtgctcctccggccacgccaaccccagtcccggcggcggccccagcctcagttccagcgccaacgccagcaccggctgcggctccggttcccgctgcggctccagcctcatcctcagaccctgcggcagcagcggctgcaactgcggctcctggccagacccccggcctcagcgcaagctccagcgcagaccccagcgcccgctctgcctggtcctgctcttccagggcccttccccggcggccgcgtggtcaggctgcacccaagtcattttgggcctccattgtggacaagctacgaagagacgcaacgaggcgtgctgccccgagttatcgggaccctgttgggaactgttcgacaaacactcaagtggaggtcaccaattgcttttcagtgccgcacaatgagtcagaagatgaagttggctgttgacatcggaatttcgctaagaatatgtatgaacttgcataaaaaagtttctccaaatgaagctcatccttgggcttggtaccgctacggggccattgacatcacagaggcactctgtcttggattccatgagtacttacagcccgagaggccccccaaccccatccaactcactgtggggacacaagtcttccaggaacgggccggcatggaggcattcaaaggcctaacgttcaggcacttttaatggggggagttccctgggggagggaccatgggggagttgattgtttcacggcttttgacagttgaaataccgcgtactacggacactgaacgcatcggagttgacctgatcatgaagacctgctttagccccaaccagagtgattggactctcaagtgacttgcagcaagtagggaggggcatcagctcgcatccaggatgcccctgagtacaagtgttgcaatatgcagaggatgtactgtctggaaaggtgtcagcttgacaataactgtgggccgcttcctgatgagcctggttaacccaagtacccgaaaaatagttcccgatgactttgagaccatgctcaacagcaacatcaatgaaccttttgatggtgacctacctgggcaacctcaaaaagtcacatgattgcactcaatgaaaaacttgtaaacctgtgaatggaccccaagcagtacacttgctggtctaggtattaaccccaggactcagaagtgaaggagaaatgggtttttttgtggtcttgagtcacactgagatagtcagttgtgtgtgactctgataaacggagcctaccttttgtaattaaaaagaagccccga

SEQ ID NO: 7787 - DNA, 524 bp, Homo sapiens
  SIMILAR (1)..(291): 931254mologous to Homo sapiens small glutamine-rich tetratricopeptide (SGT),accession number AJ223828,Smith-Waterman Score=459.
ggcaggctgggcctggcgctctccagcctcaacaagcacgtggaggccgtggcttactacaagaaggctctggagctggaccccgacaacgagacatacaagtccaacctcaagatagcggagctgaagctgcgggaggcccccagccccacgggaggggtgggcagcttggacatcgccggcctgctgaacaaccctggcttcatgagcatggcttcgaacctaatgaacaatccccagattcagcagctcatgtccggcatgatttcgggtggcagacgagcccacggcgccgtggtcccagcagcagggttgtcagtcggagcatcctggggctccctggctcctggccgtctgtgaggtaggcgcagtaccgtgtatcgtaggtagcagtaggaacgggggccgccgcggccctgcagccgctcatggcggtgaggtgtgtgccaagcccacccggggtgcagggcgtgacgtgtggggaataaataggcgttgtgacctctgaaaaaaaaaaaaaaaaa

SEQ ID NO: 7788 - DNA, 2361 bp, Homo sapiens
  SIMILAR (741)..(1082): 581254mologous to Homo sapiens small glutamine-rich tetratricopeptide (SGT),accession number AJ223828,Smith-Waterman Score=289.
  misc_feature (1)...(2361): n = a,t,c or g
gggcgtcgcgccctggggccggggccgggcggcaccgcggtgcgcaagcgcaaccgtcggtgggtcggggatcggtcgcctgagatggtatcacctcttctgggctcatagatggacaacaagaagcgcctggcctacgccatcatccagttcctgcatgaccagctccggcacgggggcctctcgtccgatggctcaggagagcttkggaagtcgccatccagtgcctggagactgcgtttggggtgacggtagaagacagtgaccttgcgctccctcagactctgccggagatatttgaagcggctgccacgggcaaaggagatgccgcaggacctgaggagccccgcgcgaaccccgccttccgaggaaggactcagcagaggcagagcgcctcaaaaccgaaggaaaaccgaagcagatgaaaagtggaaaacttttgaagctgccgtgcattttcttacggaaaagccattcgagctcaaccccagccaacggccgtcttatttctgcaacagagccgcagcctacagcaaactcggcaactacgcaggcgcggtgcaggactgtgagcgggccatctgcattgacccggcctacagcaaggcctacggcaggatgggcctggcgctctccagccttcaacaacaccttggaggccgtggcttactacaagaaggctctggagctggaccccgacaacgagacatacaagtccaacctcaagatagcggagctgaaggctgcgggaggcccccagccccacgggaggcgtgggcagcttcgacatcgccggcctgctgaacaaccctgggcttcatgagcatggcttcgaacctaatgaacaatccccagattcagcagctcattgtccgggcatgatttcgggtggcaacaaccccttggaaactcccggcaccaagcccctcggcagaacgacctggccagcctcatccaaggcgggccagcagtttgcccagcagatgcagtcagtcagnatacccagagttgtatagtagtcagctcaggagtccagtatccggagtcggacgcccagcgccagcaacgacgaccagcaggagtgacgctgcctgctcccggtgtgaccgcgtccttccctgggccgacccgaaggaaggccttctggttgtctgccacttcctcctgttgggactgcctgagagaggggaagagagagacctcgggacctgcatgtcaagatggattttccccttttatctctgccctcctccactccctttttgtaactcccttacagcccccagacccttcttgaaacgagagccaagcaagctgagcacaagaccagcagcgacctcccttccaagcccccagaaagctcggtcacttgagtgttttctagaatcctggggtgctcccggggccgctctcagagaagtggcaggttttcacgttcagccgtgtggcggatcgtgtggcttccaaagccttttacagccccttttcccccattttgtggtctggctgcaggaactgtgccgtctgtgagaagcctctttccgagtcgacctcccggccaccccggccctgtgcctgctcggaagagctcactgccagctgcggcctggggcaccgcggggccatgtgtgtttgcatgagggaactctttagtgggcagacacctaagaagacggcttgcggtcaccccacgccctccgtggcgtcaggagccgtccgtgggtgcataggaccagtttctgtgacttttctccagttgggcatgttgacagacatgtttcccctcctcccaccctcattttctggtcctcgcgactgagagccaggggcgacatcatgaccttctgtcccggccgccttagccccgggcacagggaaggcagctgggccgtttctgtctgtgtcccatcctgctgtcctttctgtcctgggatgtttccaatggcccggggcccccccagggaaaacttaccccctcctgtgctgggtggaggcccacgggacacctccaggtgcccancccaccttggcccttaaaacagcccacccaggaaagcaagccggagagcccggacagcaggcagcctgtctgggtttcctgaggcctgggggtggcagacagagcccacggcgccgtggtcccagcagcagggttgtcagtcggagcatcctgggggctccctggctcctggcccntctgtgaggtaggcgcagtaccgtgtatcgtaggtagcagtaggaacgggggccgcccgcggccctgcagccgctcatggcggtgaggtgtgtgccaagcccacccggggtgcagggcgtgacgtgtaagagaacacctaggcgttgtgacctctgaaaaaaaaa

SEQ ID NO: 7789 - DNA, 405 bp, Homo sapiens
  SIMILAR (216)..(329): 311254mologous to Trypanosoma brucei protein kinase,accession number L10993,Smith-Waterman Score=60.
ctatacaacgtttttaatgaataagatatcattaagaatttatattctaaacaaacaatttaaataaattttggtatttactaacttaagtattcaagaacctggtttgaagagtccaacagactgaaagtctgcttttcaagagaactatgatcgtctatcaatggagagattttcgtatttctatattctaatagttcacgatccttgcttgatgtcagtaattcattatcgactataccaatagttgcatcttccaccagaatatttgcttgatatgctccaatcggaatttcaggcaatccaatgtagtcatgatctgccactactgaaccttgcaagagataaagactttctgttgaatgaattcatctctttggtccattattattttctgaggaggtc

SEQ ID NO: 7790 - DNA, 269 bp, Homo sapiens
  SIMILAR (256)..(65): 261254mologous to Canis familiaris A3 adenosine receptor,accession number U54792,Smith-Waterman Score=76.
ctctccaaacactgtgctgaccaccccaaacaattgggatgatcacccatcagctgtttcatttgccttcaatgtaactcacttggaacctactaaaaatacaccatattttcaaatgtttagtcgaaatccttatatgcctgagacttcagatagtcttcatgaagtggatggtgataatacaaatggagaacaacaatttggatgaactaaataaaagcaagatcattgttaaaaagaaacccaaacaattaaatccatttcattta

SEQ ID NO: 7791 - DNA, 501 bp, Homo sapiens
  SIMILAR (495)..(118): 281254mologous to Arabidopsis thaliana retroelement pol polyprotein-like,accession number AP000411,Smith-Waterman Score=98.
tcaacttgattggattgaaggatgcaaagtattgatcatgggtgtatctgtgagggtgctgccaaaggagataaacatttgagtcagtgttccgggaaaggcagacccacccttaatctgggtgggcaccatcttatcagctgccagtgcagcttgttcactggattctcttatgtagggcttaaggtgggacattttgataggtcttttcagtctaaccccagtgttgtctctcaggacagcacatccactttctgtaatatagtctatgacacaaggaccaacccattcagactgaaaacgaccatccttccaccaatttttcctttgtcttaaaacttcatgacccacttttaaatgaaatggatttaattgtttgggtttctttttaacaatgatcttgcttttatttagttcatccaaattgttgttctccattggtttagcatccctaatctgaaaacccaaaattctccaatgagtatttccttcgagtgtcat

SEQ ID NO: 7792 - DNA, 870 bp, Homo sapiens
  SIMILAR (527)..(622): 711254mologous to Homo sapiens Human secreted protein, SEQ ID NO: 6812,accession number G02731,Smith-Waterman Score=129.
atggcagtggagcattctgcttcctgcccctttctgatggatatagctgatgctaacacattaaagggaccacagataaagcagacaagttctcaagaatctcattgtcatctcgcagtgaaaactgaatgtggtagaacagaaaaaaagctgttttatgttggaaaagacagaaaacaaaatcgtttggtaattgtttcagaagaggaaaaaaagaaagtcttaagagaatgccatgaaaatgacagtggagctcatcatggtatatccaggaccctcactctggtagaatccaattattattggacatctgtgaccaatgatgtcaaacagtggcctagggacttggtacactgtgttctagctgctccagccatggaagaaaggggccagggtacagctcaggctgttgcttcagagggtggaagccccaattcttatcagcttctacacagtattgaatctgtaagtgcacagatgtcaagaattgaggtttgggaacctctgcctagatttcagaagatttatgaaaatgcctggatgcccaggaagaagtttgctgcaggggtggggccctcatggagaacctctgctacggcagtgcagaagggaaatgtggggtcagagatgccgtgcagagtccttactgggggagcacctagtggagcagtgagaagagggccaccatcctccagaccccagactggtagatccatggagagcttgcaccgtgtgcctgaaaaagccaaagacattcaatgccagcctgtgaaagcaactgggagagaggctataccctgcaagccacaggggtgcaggtgccaaagaatatgggaacctacctattgcatcagtgtgacttggatgtga

SEQ ID NO: 7793 - DNA, 1790 bp, Homo sapiens
  SIMILAR (565)..(1272): 261254mologous to Oryza sativa Similar to Arabidopsis thaliana chromosome II BAC F26H6; putative retroelement pol polyprotein (AC006920),accession number AP002521,Smith-Waterman Score=163.
cccacgcgtccgcgagataaatcacgacaggaagcttaaatctgtcgtttgaatttaggaccacctcgggtcacaatgggccgtattggaaaaaatggtgaccttcatcttaaacagattgcatattacaaacgaactggtgaatatcattcaactacactgtcaagtgagagaagtggcataagaagagcagcaaacaaatttggcttcaaagaagaaaagctgtattatgttggaaaagacagaaaacaaaatccgtttggtaattgtttcagaagaggaaaaaaagaaagtcttaaagagaatgccatgaaaaatgacagtgagagctcatcatggtatatccaggacccctcactcctgggtagaatccaatttattattgggacatctgtgaccaatggatgtcaaaccagtggggtatatgccttgtcagcattgccaagtggcaaaaaatacagttattgtagcaccgaaacagcaccttcttcaaggtgggaaaattccatggagtttagttactgttgatctgatgggggccttttcatacaagccacagaagtccatgtatatgctataatcatgacagatttgttcaccaaatggattgtgattttgcctctatgtgatgtttcagcatcagaagtttctaaagctattatcaatatatttttcttatatggacctcctcagaaaataataatggaccaaagagatgaattcattcaacagatcaatattgaactgtacagattgtttggcataaagcaaattgtaatttctcacacctctggaactgttaacccaacggaaagtacacctaacacaatcaaagcatttctctccaaacactgtgctgaccacccaaacaattgggatgatcacctatcagctgtttcatttgccttcaatgtaactcacttggaacctactaaaaatacaccatattttcaaatgtttaaagtcgaaaaaaatcccctttactacttgcctgagacttcagatagtcttcatgaagtggatggtgataatacaagtatgtttgccaaaattctagatgcaattaaagaagctgataaaataatggagaataagacaacttcactgggccagatggagaacaacaatttggatgaactaaataaaagcaagatcattgttaaaaagaaacccaaacaattaaatccatttcatttaaaagtgggtcatggaagttttaagacaaaggaaaaattggtgggaaggatggtcgttttccagtcctggaatggggttggtcccttgtgtcatagactatattacagaaagtggatgtgctgcccctgagagacaacactggggttagactgaaaagccctatccaaaatgcccccccccttaagccccctacataagagaatcccagtgaacaagaaagtcctttatccccttgccaaggttccagtagtggccagatccatgacctacattggattgccctgaaattcccgattggagcatatcaagcaaatattctggtggaagatgcaactattggtatagtcgataaagaatttactgacatcaagccaaggatcgtgaactattagaatatagaaatacgaaaatctctccattgatagacgatcatagttctcttgaaaaggcagactttcagtctgttggactcttcaaaccaggttcttgaatacttaagttagtaaataccaaaatttatttaaattgtttgtttagaatataaattcttaatgatatcttattcattaaaaaccgttgtatagaaaaaaaaa

SEQ ID NO: 7794 - DNA, 1865 bp, Homo sapiens
  SIMILAR (27)..(284): 601254mologous to Homo sapiens SRB7,accession number U46837,Smith-Waterman Score=218.
catggcggatcggctcacgcagctttcaggacgctgtgaattcgcttgcagatcagttttgtaatgccattgggagtattgcagcaatgtgtccctcctgcctctttcaataatattcagacagcaattaacaaagaccagccagctaaccctacagaagagtatgcccagctttttgcagcacctgattgcaccgaacagcaaaagacattgatgttttgatagattccttacccagtgaagaatctacagctgctttacaggctgctagcttgtataagctaggaagaagaaaaccatggaagctgctacatgtctgggagggatgttgtttatcgagggagacatgcttctgggaggaaggtacaaaggcgcacttgctggatattggcacagtcacagctggaaggccaaggaagtgggtacccataggccagtctttttccagactcataggcttcagtgggataccatgtgggcttgagaaaaggaactgttttgagtgccattaagaattctgcatcagacttagatacaagccttaccaacaattacagaaacattacaacactatgacacattacctttttagctatttttaatagtcttctattttcactcttgataagcttataaaatcatgattgaatcagctttaaagcatcataccatcattttttaactgagtgaaattattaaggcatgtaatacattaatgaacataatataaggaaacatatgtaaaattctgttatgacataatttatgtctccattttgttgtattggccagtacttttacaaatcaaaacatctctcaagccaaaggagaagacagtaagaacagacataagggacattttagtttaggctagtgtcctgcctcttagaggtggcattgtgtaaatctgagctttgagcaagaaagttttggaaattgtgttgcttttaagaaatagagttagtgtggctggataagaaagtcacatttatgcaaatgtttcttctgctagaacctcatacctgttctagttcatctccacgtttattttaccaagagatcctctgtcaagagaatttcctggctgttgtgaaagaatttttctacatcctgaactatttttcctatttcttttcaccttgctttttttcatccttaatttgcttgtcatcacaatgaagtatgttttttgaatcatcaattctttctcattctccatttatctgaaggttcttttgcccttattaacctctcaacttttattgctgtattctagtcagaccagaacatacttccactacatcagttacttggcatcatttcacctcagtttattattgcccaaataataatttgtgtcagcattttcaactaatggttattccatcccaacccttggatctctttgagtctactgataatcctccactggaaaggtggaattgaaatgtggtccacattttaactagctatttcctggggctgtatttttaagaatatgctgagctacatttgctgcaatctgttgctattcagagtttaagtttcaggagaaaacaggaacaatagaacactctgcctgttatttttgtcgtaatcaagcttttccacagttcttgaaaagtactatgtttcaaatttcaggaacaccagcgttagctgttaaaagttgcagcaatttattggctagtcatagaaaatttttgaacttttaactgtattttaattgatgtttattaaaaacaacaggcagagtgttctattgttcctgttttctcctgaaacttaaactctgaatagcaacagattgcagcaaatgtagctcagcatattctgaaaaatacagccccaggaaatagctagtt

SEQ ID NO: 7795 - DNA, 560 bp, Homo sapiens
  SIMILAR (277)..(558): 1001254mologous to Homo sapiens Human breast tumour- associated protein 70,accession number Y48609,Smith-Waterman Score= 498.
attagaccagcgtggtggaattcggtaaaaacagcaaaaggagaaagcaaaagccaggcagggactctccataggctcttttttaaatcttggggaaatcatacccactgaggaatagaggccagggcagatcaggcctgcgtggattgtgggtcagctagggaagcagaaggaggaagacgctggaatcattgtcaggactgagaatatggtgtgagttgcttttgagggtggccatgtgagcaccttggccagattaatctctttcccccctccatgatggtggcaggggcaggagctgacttcgtgatgctgggtggcatgctggctgggcacagtgagtcaggtggtgagctcatcgagagggatggcaagaagtacaagctcttctatggaatgagttctgaaatggccatgaagaagtatgctgggggcgtggctgagtacaggtatgtgtggaggcccaggagcttagtaatagtatggaggcagaactcatggctgctgagagggggatggtacagttctcagagaagcatggtgaaccggggctcaatgct

SEQ ID NO: 7796 - DNA, 1080 bp, Homo sapiens
  SIMILAR (1)..(552): 971254mologous to Homo sapiens guanosine monophosphate reductase isolog,accession number AB032903,Smith-Waterman Score= 930.
atgcctcatattgacaacgatgtgaaactggacttcaaggatgtccttttgaggcccaaacgcagtacccttaagtctcgaagtgaggtggatctcacaagatccttttcatttcggaactcaaagcagacatactctggggttcccatcattgctgccaatatggatactgtgggcacctttgagatggccaaggttctctgtaagttctctctcttcactgctgtccataagcactatagcctcgttcagtggcaagagtttgctggccagaatcctgactgtcttgagcatctggctgccagctcaggcacaggctcttctgactttgagcagctaaaacagatcctggaagctatcgcccagatgaagtatatatgcctggatgtggcaaatggctactctgaacactttgttgaatttgtaaaagatgtacggaagcgcttcccccagcacaccatcatggcagggaatgtggtaacaggagagatggtagaagagctcatcctttctggggctgacatcatcaaagtgggaattgggccaggggcaggagctgacttcgtgatgctgggtggcatgctggctgggcacagtgagtcaggtggtgagctcatcgagagggatggcaagaagtacaagctcttctatggaatgagttctgaaatggccatgaagaagtatgctgggggcgtggctgagtacaggtatgtgtggaggcccaggagcttagtaatagtatggaggcagaactcatggctgctgagagggggatggtacagttctcagagaagcatggtgaaccggggctcaatgctagggtctgtggaaaagtccctgggcttaaggaatccagaaggagaagataataaagtttttcctactttaagagcctcagagggaaagacagtggaagttccttttaaaggagatgtggaacataccatccgagacatcctaggagggatccgctctacgtgtacctatgtgggagcagctaagctcaaagagttgagcaggagaactaccttcatccgagtcacccagcaggtgaatccaatcttcagtgaggcgtgctag

SEQ ID NO: 7797 - DNA, 1242 bp, Homo sapiens
  SIMILAR (218)..(688): 601254mologous to Homo sapiens Human guanosine monophosphate reductase 2 protein,accession number Y93154,Smith-Waterman Score= 399.
actggagatcactagacagtttgatggccctcggatgaggcggagggctactctgaacactttgttgaatttgtaaaagatgtacggaagcgcttcccccagcacaccatcatggcagggaatgtggtaacaggagagatggtagaagagctcatcctttctggggctgacatcatcaaagtgggaattgggccaggctctgtgtgtactactcggaagaaaactggagtggggtatccacaagctcagcgcagtgatggagtgtgcaaatgctgctcatggcctcaaaggccacatcatttcagatggaggttgcagctgtcctggggatgtggccaaggcttttggggcaggagctgacttcgtgatgctgggtggcatgctggctgggcacagtgagtcaggtggtgagctcatcgagagggatggcaagaagtacaagctcttctatgggaatgagttctgaaatggccatggaagaagtattgcttgggggcgtggctgagtacagaacctccagagggaaagaccagtggaagttcctttttaaagggagatgttggaacataccatcccgagacatccctagggagggatccgctcctacgtgtacctatgtgggagcacgctaagctcaaacgacgttgagcacggacgaactaccttcatcccgaagtccacccagcaaggtgaaatccaatcttcaagttgatggccgtgctagaccttgaagcagttctacccctcccaaggcaccaagtactctacccatggggccatcccaatgtgggggtcctcaccccatccccggctactgcagctctggtatttacttttgtcaatttcctgttgtctcacttcctgagggctcctgcagtaactctgtacttctctatctgcacacacaataatgccccaaggccactcacgtggggaggaagccaaggaagcaaacagtctgagaaaatgatgcaagaaaatccaaatgggaatctggggacccaacacaacatccctgaagattattaaaaggaaaagatgctgattggtacgataaatctgtgtacatggccttggtctagaggaggcaggcttttagaatccatgttttgttaattccgcttcactaaattggaccttgcacatatctaaaaagctctgaagtgtttgtatatttgaaatacctcaataaagaggagagctcattgactgtaaaaaaaaaaaccacacagggcggccgct

SEQ ID NO: 7798 - DNA, 1860 bp, Homo sapiens; identical to SEQ ID NO: 657
  SIMILAR (1)..(516): 901254mologous to Escherichia coli Arginine binding protein artI,accession number D90724,Smith-Waterman Score=778.

SEQ ID NO: 7799 - DNA, 2028 bp, Homo sapiens
  SIMILAR (1)..(1056): 901254mologous to Homo sapiens putative p150,accession number U93563,Smith-Waterman Score=1638.
atgttctttgaaaccaatgagaacaaagacacaacataccaaaatctctgggacacattcaaagcagtgtgtagagggaaattcatagcactaaatgcccacaagagaaagcaggaaagatctaaaattgacaccctaacatcacaattaaaagaactagagaagcaagggcaaccacattcaaaagctagcagaaggcaagaaataactaagatcattgcagaactgaaggaaatagagacacaaaaaacccttcaaaaaatcaatgaatccaggagctggtttttcgaaaagatcagcaaaattgatagaccgctagcaagactaatgaagaaaagagagaagaatcaaatagacgcaataaaaaaagataaaggggatatcaccacctatcccacagaaatacaaactaccatcagagaatactataaacatctctatgcaaataaactagaaaatctagaagaaatggataaattcatcgacacatacatcctcccaagactaaaccaggaagaagctgaatctctgaatagactaataacaggctctgaaattgaggcaataattaatagcttaccaaccaaagaaagtccaggactagatggattcacagccgaattctaccagaggtacaaagaggagctgctaccattccttctgaaactactgcaatcaatagaaaaagagggaatcctccctaactcattttatgaggccagtatcaacctgataccaaagcctggcagagacacaaccaaaaaagagaattttagaccaatattcttgatgaacattgatgcaaaaatcctcaataaaatactggcaaaccgaatccagcagcacatcaaaaagcttatccaccacgatcaagtgggattcatccctgggatgcaaggctggttcaacatacgcaaatcaataaacataatccagcatataaacagaaccaaagacaaaaaccacatgattatctcaatagatgcagaaaaggcctttgacaaaattcaacaacccttcctgctaaaaactttcaataatgttggaaattctggccagggcaatcaggcaggagaaggaaatggtattcaattaggaaaagaggaagtcaagttgtccctgtttgcagatgacatgattgtatatttagaaaaccccatcgtctcagcccaaaatctccttaagctgataagcaacttcagcaaagtctcaggatacaaaataaatgtgcaaaaatcacaagcatttttatacaccaataacagacaaacagagagccaaatcatgagtgaactcccattcacaattgcttcaaagagaataaaatacctaggaatccaacttacaagggatgtgaaggacctcttcaaggagaactacaaaccactgctcagtgaaataaaggaggatacagacaaatggaagaacattccatgctcatgggggtccttccagagggctgccagaggaactgggaaaagaccacagggagaaggaaacctccagcagaactttgtaacaattccaaccaaacgcgaagtctcctggccagaacttgagggagagcatgaatccagtgtgcagactcaacaggcaaggaggcttcagcgattagccaaagatcttctaaaacaagtacaagttcaagacagtggctcatgggcaaacaataaagtgtctgctttggatcggaccctaggagagatcactagaatactggaaaaagagaggtcaagaagaggaaaaggacctagcaaagaagacttagaaggagcagccaatgagttagaaggacaatgtgatgtcaggaaacctagtgaaggagtctcagcctcaccctactcacaggccaaatatacttacctaatatccgagcatctttccttgaagaagtacattattgacattgtggttgaaagtacagctccagcagaagctttgaaagatggagaagagcggcaaaaaaataaaaaaaaagccaaaaagataaaagcccggatgaacttcaggtaccttaaatacccttaa

SEQ ID NO: 7800 - DNA, 678 bp, Homo sapiens
  SIMILAR (121)..(390): 901254mologous to Homo sapiens MSTP063,accession number AF119814,Smith-Waterman Score=402.
atgtggtggtcacttgggaccctgacttggtataatagcccaggctctatgaggctgggtccagtggcaacaaggagccaggaatggcaagatacagctgtatcttgggccctgtggggtagggaacaatgcagcaataaccactccttggagagagacagggaagaacgattggcagcactcacagctgctcaacaagaagctatggaagagttacagaaaaaaattcagctcaagcatgatgaaagtattcgaaggcacatggaacagattgaacaaagaaaagaaaaagctgctgagctaagcagtgggcgacatgcaaatactgattatgcccccaaactgaccccttatgaaagaaagaagcagtgttctctctgcaatgtcctgtgcggacttggatgcccaaacgaggtgcttccaggtggctgccaccgtagctcctaccccaggagaccctgcctgaccatcggagagcttctgtggatgggcccctgctggcgtgcaactacccacagcctctccccaccactttctggcagctgcatggactttgccaccatgctgctactggcaccggtgcaggtatggactccgttgccattgccctgccatcaccagtgtgcgaatactgttcacactctgccagctgcaactgcgtgcatgtggaacctgtga

SEQ ID NO: 7801 - DNA, 2835 bp, Homo sapiens
  SIMILAR (2)..(772): 551254mologous to Homo sapiens MSTP063,accession number AF119814,Smith-Waterman Score=578.
agcacaagaagaagaagctaaggtaaatgaaattgcctttataaatacccttgaagcccagaataaacgtcatgatgttttatcaaaattgaaggaatatgaacagaggcttaatgagctacaggaagagcgtcagagaagacaggaagaaaagcaagcacgtgatgaagctgtgcaggaacgcaagagagctctagaggcagagcggcaggcccgtgtagaagaattgttaatgaagaggaaagaacaagaagcccgaattgaacaacagaggcaagaaaaggaaaaagcccgtgagggtgcagcccgggaaagagctagagacagggaagaacgattggcagcactcacagctgctcaaccaagaagctatggaagagttacagaaaaaaattcagctcaagcatgatgaaagtattcgaaggcacatggaacagattgaacaaagaaaagaaaaagctgctgagctaagcagtgggcgacatgcaaatactgattatgcccccaaactgacccctttatgaaagaaagaagcagtgttctctctgcaatgtcctgatctcttcagaggtatatctttttagccatgttaaagggagaaaacaccagcaagccgtgagagagaataccagcatccaggggcgtgaactgtcagatgaagaagtggagcatctttccttgaagaagtacattattgacattgtggttgaaagtacagctccagcagaagctttgaaagatggagaagagcggcaaaaaaataaaaaaaaagccaaaaagataaaagcccggatgaacttcagggctaaggaatatgagagtttaatggaaaccaaaaattctggctctgattcaccttataaagcaaagcttcagcgattagccaaagatcttctaaaacaagtacaagttcaagacagtggctcatgggcaaacaataaagtgtctgctttggatcggaccctaggagagatcactagaatactggaaaaagagaatgtggcagatcagattgcatttcaagctgctggtggattaacagcccttgaacacatccttcaagcagtagtcccagccacaaatgtgaacacagttttaaggaattcctcctaagtctctctggcaatgcaattcaatgtttacaaccttcacctggcaattaactgtttcaggaaaacttgcagtgatgttctgtttagtaacaaggtttaccttcttaatggggcctcctgatacaccagttgacggtttatgttccagatgaaaataatactatttgggggagaaatacaaataaacaagttttgaaaggcttgacaactgggacttctcaaagtcagtgctgtgggttttggggctgcctggattgccaatcgaccaggtggggaaactgccagccaggctaccccaaaaataccaacacaggaaatgaaaaacaaaccctcacaaggtgatccttttaacaatcgagttcaggaccttatcagctacgtggtgaacatgggtctgattgacaaactgtgtgcctgcttcctctcggtgcaaggcccagtgggatgaggaatcccaagatgggccatatttctggcaggcatgccgcaggactcttacatgcaatgtgttacactgtgctttgctgtcactggaaggtcatacagcatatttgacaataatcgccaggatcccacagggctgacagctgctcttcaggcaaccgacctggctggagttcttcatatgctctactgtgtcctcttccatggcaccatcttggaccccagcactgccagtcccaaggagaattacactcaaaataccatccaagtggccattcagagtttacgtttcttcaacagctttgcagctcttcatctgcctgcttttcagtctattgtaggggcagagggcttgtcccttgcattccggcacatggccagctccctgctgggccactgcagccaagtctcctgtgaaagcctccttcatgaggtcatcgtctgtgtgggctacttcactgtcaaccacccagataaccagggtgatcgtgcagtccggccgccaccccacagtgctgcaaaaagctctgccagttgcccttccagtatttcagtgacccacggctgatcaaagtactgttcccctcactttatcgcagcttgttacaacaaccatcagaacaagatcattctggagcaagagatgagctgtgttttactggcccctttcattcaggatttggcacagactccaggtcaagcggaaaaccagccttaccaacccaaagggaaatgccttggtttcccaagactatcttgagctggctaacagattttcctcaggcagggcctggggaaagaagctcgacagtttttcttgaaaaaagagaaaaaataaatgttttggttgattctgtatttgagtacccttgttaatattttaaattgtccaaacaaacattctaattgttccttaagaactcattttcccatgtttatactcttcccacactggtagatatggcatgtactttacactatttataatgactgtagatacttgaatgttctacttgctaattttgcaagttgagtttatttcatttatgcagagtatcttggagtttggtaatttccatcttatgataatatatactttgcatttgtgatatgggtgaaaggagacataaaattagcaagtctgttttgttcttgtaataaagtaacttattctgttttcattgttgacttttcatgttaaggaaatacgaatctgaaagaaaaatgttaactccagctcttgaagtatcttaaataaagacttaattaaagtttaaaa

SEQ ID NO: 7802 - DNA, 425 bp, Homo sapiens
  SIMILAR (80)..(136): 311254mologous to Mus musculus proliferin-2,accession number K03235,Smith-Waterman Score=36.
  misc_feature (1)...(425): n = a,t,c or g
attggcagcttagcattttgcaaaggaattgctttgcaggaaatatttaattttcaaaaacataatgattaatgttccaattatgcatcacttcccccagtataaatcaggaatgtttgtgagaaaccattgggaactatacnnnnnnnnnnnnnnnnnnnnnnnnnnnnnnnnannnnnnnnnngggnnnnnnnnnnnnnnnnnnnnnnnnnnnnnnnnnnnnnnnnnnnnnnnnnnnnnnnnnnnnnnnnnnnnnnnnnnnnnnnnnnnnnnnnnnnnnnnnnnnnnnnnnnnnnnnnnnnnnnnnnnnnnnnnnnnnnnnnnnnnnnnnnnnnnnnnnnnnnnnnnnnnnnnnnnnnnnnnnnnnnnnnnnnnnnnnnnnnnnnnnnnnnnnnnnnnnnnnnnnnnnnnnnnnnnnnnnnnn

SEQ ID NO: 7803 - DNA, 1134 bp, Homo sapiens; identical to SEQ ID NO: 5111
  SIMILAR (95)..(3): 831254mologous to Homo sapiens Human secreted protein, SEQ ID NO: 6574,accession number G02493,Smith-Waterman Score=142.

SEQ ID NO: 7804 - DNA, 1389 bp, Homo sapiens
  SIMILAR (958)..(1320): 541254mologous to Homo sapiens PRO2550,accession number AF130089,Smith-Waterman Score=260.
  misc_feature (1)...(1389): n = a,t,c or g
atgcagaattggaagttatacctcactctacaggttcctaagccactcctacaagaagaagatagtagacgacatgcactgcaggacctgctgcccgtggacctgccctgtgagcatcacccaggccaggagcaagggcatgtggctctggtgaagcagggcatccaaacacccacagacactcagcaggggcttggacttggggcttccaagctagtcacttctactcccttaccatgggatccactgaaagatggtgaggcaaagatcaaaagcgactatgcacaacttcttgaagacatgcagaatgcattccgtagccttgaagattagaagccttgaagattacaactgtgatttccttttcctcaggcaagctcctatgtgtatattttcctgaaatttctcatctcaaaccctttgcttctttattgtgcagctttgagactagtgccctatgtgtgttatttgtttccctgttttttttggnaagggcttatataaaaccaaaccattccctttgttctagtgttgtgaagggcctccctcttcccttatctgaagtgggtgaatatagtaaatatacattctggggtacactactgtaaacttgtatgtaggggtgatgaccctctttgtcctagggggtaccctttcctcatctctattaaattgtaaacaggactactgcatgtactctctttgcagtgaatttggaatggaaggccaagtttctataacttttgaacaggtactttgtgaaatgactcaatttctattgtggtaagctcattggcagcttaacattttgcaaaggaatttgctttgcaggaaatatttaattttcaaaaaccataaatgattaatgttccaattatgcatcacattcccccaagtataaatccaggaaatgtttgtgagaaacccatttgggaactaatactctttttaatttttattttttattttttttaattattttttttttgggggacggaagtgtcccctccttgttgcccccaggctggaagtgcaaatggccgtgatcctgggctcactgcaagccttcgcctcccgggttcaaagtgattctccctgcctcagccctccccgagtagctgggattacaggcatgctcccacccatgcccagcctaattttgtatttttagtagaaacggggtttcaccatattggtcaggctggtctcgaactccagacctcaggtgatccgcccacctcggcctcccaaactgctgggattacaggcgtgagccaccgcgcctggccagggactatactctttttaaaatagacatttgtggggctcacacaatatatgaaatagtaccctctaaaaaagaaaaaaaaaaaaaaaagggcggccgct

SEQ ID NO: 7805 - DNA, 2374 bp, Homo sapiens
  SIMILAR (525)..(692): 721254mologous to Homo sapiens FERM-containing protein,accession number AF153416,Smith-Waterman Score=185.
  misc_feature (1)...(2374): n = a,t,c or g
tttcgttgatatcttccagagatggaaagagtgcaggggaaagagccctgcccaggcggaactctcctatctgaataaagcgaagtggctggaaatgtatggggtagacatgcacgttgtcaggggaagagatggctgtgaatattctcttggactgaccccgacaggcatattaatctttgaaggagctaacaaaataggcttattcttttggcctaaaattaccaaaatggattttaaaaagagcaaattgacactcgtggtggtcgaggatgatgatcagggacgtgagcaagagcacacgtttgtgttccggttagacagtgccaggacctgcaaacacctttggaagtgtgcagttgagcaccacgcgttcttccgactgcggacgccaggaaacagcaaatccaatagatccgactttatcaggctgggctctcgcttcaaattcagtgggcggacagaatatcaagctacacatggctccaggttacgaagaaccagcacctttgagaggaagccatagtaaacgttatccatcccggagacattcaacgttcaaagcaagcaacccagtgatagcagcccagctctgctcttaaaacaaatccagaagtccataattaccagcctccaatatccatcctaatatccattcccagcccagcccccggtggcatcctcactctcccaaatgtcaggccatccctttcaggatgacaggtcgcattggaaagcatcggccagtggagatgacagccattttgaattatgccccacgacccagaacccagaaggaaccttaggagggatgccaaagtatgatgtatccgagataaacgtcatgactgcactttgagagactgaagcatctctcttcccattcaccttcatagtttcattgcattcccatgaaaagtgtcttggcctcagatggatggatgtgtttggacgagtgtctttaaggagtagtcctgaaaggtgtttttggtgtccatgtaaatatttgaagataaaaccactatagcttgtcataatttactgttgactgcattctcattaaaatgaaggtaaaggctcaggaatcatattgatgttctgattttaaaattggagtcaaagtctatgtttatcattttactatgttcctgatgttctttgttatttaattaatgggagcaaataaaaccagaagagcttgggaagattgctcagcatatattcctgtcgtagaagttgagattgctagggtccagtttccctagtgtggcctggacgagtcatttccccttcattgacctcattttccccatctgaaaagagagggttggactaagtgatctccaaggtcctttccaactctaaaattctgcaatttgttaacatttcattttgtttaggttgaggacatacattcaaactaattttatcacaaggaaaactgcaatacccacttccttgacagagttactcctttcagaagctaaataaagtatataacttattagatgttatatagatacagggggactttgaatttcacatcttaaagcagttgagctactttgaatttaagcagtcgtactaatcttaaattgcatagcatttgttttgatcgaatttgctgctcaagtatgggaataatttttaatgtcttaatgattggtgctgctaacttgcgtgatttcagaagacataattgtgaatacacactgtcagaattgggggattggtttttaccctagacttcactcttaaaaagcaacgtgcaatcaagatcatttatggctcaaatgaaagcatataaggttttcttgaagttgtgccaaagcattctgtagagtaggatgagatggttgttgccctagtctgttggtagaaccagaaatcaatatgttgtcttttaggttaaagcttgtaccaaaatatttatttcccccatttcaagccctgagtcaaacatttttttctcttaataatagacctgaaatgttttattagtatttctgtgaaatcagttgattcttgtgccatttttgtatatgtaattgtaattttgcccatgttagggccctctaaaaaatgtttgacatcctttgagatattttattactaaaatctgatcttttttgggcnactgcaaaaatctattcagcaagaaggtatcagctgcataccttgcacagtggagctgactacctataaactctccctaaggcatttgtttacaggtgtattccattttagcagacgttctgatgctcagtgtatgtgctgcatacaaataaatgtgttctgaatcttttcatcttattgatagcatttttacaaatgtgtttccaaggaataaagattattcttgctattaaaaaaa

SEQ ID NO: 7806 - DNA, 936 bp, Homo sapiens
  SIMILAR (357)..(193): 1001254mologous to Cloning vector pZC320 SopA,accession number U26464,Smith-Waterman Score=287.
atggagctcacccacctgcagccccatgagccccaggaggatgtgcatgcggtgggcctgcttcttggtttgcgtgaacagcatcacatggtcagtgaaggtcctcgtcaacaaagctggcaggaagagaggactgagctggcagctgtttctaggctcttattcaacatgtaccccctcctcatccacaaaaaccatgcttccccaggcatcccgaatttgctcctccatccacggggactgagagccattactattgctgtatttggtaagcaaaatacgtacatcaggctcgaaccctttaagatcaacgttcttgagcagatcacgaagcatatcgaaaaactgcagtgcggagaacacaactttcctgaacaggaaatccaagagggcaaaagccatcagaaccagcatgaggctcactttgtggtagagctgtgcaagtacttcctgtgccaggaatacctgccttcccagatcaccatcctcactacctataccgggcagctcttctgcctgcgcaaactgatgcctgccaagacatttgctggcgtcagggtccatgttgtggacaaataccaaggggaagagaatgacatcatcctcctctcgctaatatccaaccgcatctgtgtggccttgtcccgagccaagaagggaatgtactgcatcggaaacatgcagatgctggccaaggtgtccctgtggagcaagatcattcatacacttcgagagaacaatcaaataggccccatgctccggctctgctgccagaaccaccctgaaacccacaccttagtatccaaagcttctgacttccaaaaagttaccgaagagggctgcagctgccctgcgagtttcgcctgggctgtgggcatgtctgcacccgtgcctggcacccttatgactcttcacacaaggagtttcaatgcatga

SEQ ID NO: 7807 - DNA, 624 bp, Homo sapiens
  SIMILAR (615)..(352): 1001254mologous to Homo sapiens unnamed protein product,accession number AK022641,Smith-Waterman Score=483.
ttactcgtcaggagatcgaaggttgtagatgtctgcacgtggcttccttggaggtccagtggtgactccctcttccaaaatccattctgtacccgctggctgctctaacctgtgaaccaacaaataaagggcgttaaccgccatcttcccacggtcagaaacgaacaaggccgggccttttgaggccgatgtatcagaactaactggcaaaatataagacgtcagcattgtcgatctgatggggaaaaaagtgaagtcatcatttacaccagccaagggcttctcaggcccgtgcagaaggcagtggcttttccagctccagaaactcatttctcccacgcccttaaggcctgtattctcaggtcctgctggagaaacactttgcgtgaaagaaccgacaccaagacctagccactccagcatcatggaatgcttccagtgctggaagcaaatccattcactatcctgcactggtccattcatgagactttcccagtgctggggtgagatgtacttctgcaggtactgttcccgtaggacaccacgcatggtgcactccagggtcttggctccttcatgaagctcttgctctgactccttcatctgtgtcatgatctgagccat

SEQ ID NO: 7808 - DNA, 1637 bp, Homo sapiens
  SIMILAR (411)..(1295): 981254mologous to Homo sapiens KIAA1404 protein,accession number AB037825,Smith-Waterman Score=1521.
gaacatctctcaagctccaccacagacctactgaaccagaatctgcatttttagctgagaagcatccaaaagcactgctccaacttacacagcagaacacatgctttggattttctgggcctttctatttagccccaggcaaaacctatgtgggtctaaaaattgttcaggccctcctaaccaacgagtctgtttggcaaattagcctccagaagttccccatcttggttgtgtgttatactaatcatgctttggaccagtttctggaaggcatctacaattgtcagaagaccagcattgtgcgggtgggtggaaggagcaacagtgaaatcctgaagcagttcaccctaagggagctgaggaacaagcgggaattcccccgcaacctccccatgcacctccgaagggcctacatgagtagctaccgaaccatgcccatttaccctacctacaatgaagtgcacttggatgagaggcccttccttcgccccaatatcatttctggaaaatacgacagcactgctatctatctggatacccacttccggctcctgcgagaagatttcgtcagacctttacgggaaggtattttggaacttctccaaagctttgaagaccagggcctgaggaagagaaagtttgatgacatccgaatctactttgacaccaggattatcacccccatgtgttcatcatcaggcatagtctacaaggtgcagtttgacacaaaaccactgaagtttgttcgctggcagaattccaaacgattgctctatgggtctttggtatgcatgtccaaggacaacttcgagacatttctttttgccaccgtatctaacagggagcaggaagatctctgccgaggaattgtccagctctgcttcaatgagcaaagccaacagctgctagcagaggtccagccctctgactctttcctcatggtagagacaactgcatactttgaggcctacaggcacgtcctggaaggactccaggtggtccaggaggaagatgttcccttccagaggaatatcgtggagtgtaactctcatgtgaaggagccaaggtacttgctaatggggggcagatacgactttacccccttaatagagaatccttcagccactggggaatttctaagaaatgtcgagggtttgagacatcccagaattaatgtcttagatcctggccagtggcccttaaaagaagccctgaagctggatgactcccaaatggaagccttgcagtttgctctcacaagggaactggctattattcaaggacctcctggaacagtactccacacagccagcccgctcttccagcagcgggaaggggacacccccattcctcggctcctgcaggacacgcctccggtgtacatggcagctacgggaaagagtgggaaaagtgagatagtcccaagaaacaggcaacagcagggtgggaagcagcagagacatttggatctttggctcgaccagccaccaagaacgggtcaagtgtgcagcaaggcccagagcacagcgtctgagggtgggcccttacaaaaagactgcaggggaggtttttctgagaactgggtcaccggttacttagatgcttcaaacctggcagaacagagaaacatcagataa

SEQ ID NO: 7809 - DNA, 387 bp, Homo sapiens; identical to SEQ ID NO: 536
  SIMILAR (1)..(351): 481254mologous to Homo sapiens HSPC164,accession number AF161513,Smith-Waterman Score=189.

SEQ ID NO: 7810 - DNA, 999 bp, Homo sapiens
  SIMILAR (81)..(827): 411254mologous to Homo sapiens HSPC169,accession number AF161518,Smith-Waterman Score=294.
cggacgcgtgggtttttttttcgccggaaatcccggaagtgacagctttgggggtttgctgctgggtctgactcccgtcctgcgatgggttgctgacgggggaacaatccccaagaggcatgaacctggtgaaggggccgaagaaggttgagaaggtcgacaaagatgactgaattagtggcccaatggaactattgtactctaagtcaggaaaatattaagacgaccaatagttgccctgtgaactttgcagacttttataacaaagatgcccgtcattgaatttctcttggacaaatctgcagaaaaaggctcttgggaaggcaggcatctcacattaaaacgcattaacgaattgttgacagagctgaaagctttcctgataatccctgccctgggaaggggataaagggaaacactaaaaggtggacaagcacgatgacctccaagcgggcgcgtcttcatcttcccccgttggtgggcctgggagatggaacggccgacacaggttcttgcttccttcgggtggttgcggcttgtgttgtttttcttgagcggagccttggaaagagataaaagcgggagttttgccacacgtgtggggctggcctttccaggaggatgatgataatcgtgctcaatggcaccaaggaggatgtggacttgctgaagacaatgatggaggagagaaggctgtagagcgaagctggaaaagaaaacaaagaaaacccaaggcagcagagtctgtttcaaaaccaggatgtcagtgaaagaagccccagggccatcaaaagttaagacaggggaagcctgaagaagccagcctttgattctagagagaagaaaaccaacttggctcccaaaagcacagcaatgaatgagagctcttctggaaaagctgggaagcctccgtgtggagccacaaagaggtccatcgctgacagtgaagaatcggaggcctacaagtccctctttatcactcacagctccgccaagcgc

SEQ ID NO: 7811 - DNA, 1497 bp, Homo sapiens
  SIMILAR (1)..(285): 981254mologous to Homo sapiens dJ1153D9.1 (A novel protein (protein X 0001)),accession number AL109806,Smith-Waterman Score= 484.
  misc_feature (1)...(1497): n = a,t,c or g
atgggttgcgacgggggaacaatccccaagaggcatgaactggtgaaggggccgaagaaggttgagaaggtcgacaaagatgctgaattagtggcccaatggaactattgtactctaagtcaggaaatattaagacgaccaatagttgcctgtgaacttggcagactttataacaaagatgccgtcattgaatttctcttggacaaatctgcagaaaaggctcttgggaaggcagcatctcacattaaaagcattaagaatgtgacagagctgaagctttctgagcgagccttgaaagagataaaagcggaagtttgccacacgtgtggggctgccttccaggaggatgatgtcatcatgctcaatggcaccaaggaggatgtggacgtgctgaagacaaggatggaggagagaaggctgagagcgacgtgggaaaaagaaaacaaagaaacccaaggcagcagaggtctgtttccaaaacccagatgtcagtggaaggaagccccagggcccatcaaaagttaagaccagggaagccctgaagaagcccagcccttgattctagagagaagaaaaccaacttggctcccaaaagcacagcaatgaatgagagctcttctgggaaaagctgggaaagcctccgtgtggagccacaaagaggtccatcgcttgacagtggaagaatcggaggcctacaagtccctcttttaccacttcacagctccgccaaagcgcctccaagggaggagtctggcccactggggttcaccccacacgtcctacttgcttctgaaagcccgcactgccaccggctcctgccccagaaggttgtttaagttttccacgtagggcaggtccgctttgtggcctctgagttgcgctgcttgtgtgttcttttctattagtttttgttgttcataaaaggtgttcctgggccagccttcaagctgggtgtgggccacctctttgatgtgagggcgtgttcggttcccaggggggggacatggggaggggcttgcacagtgggcccgaggttcatgctttgtttccaccttgcaggtgccatttgggtccttttccatggccccaggtaangcctgtgggcctggcactttttaatgccttggcagtaacaagagactcccagagtccctcacccggtgcaagagttggcacatattaattaactaaaattcctaatgatcttgctaccagcaataaaatcaagtaaggccaagtgaaactgggctttaaaaaggatggattttaaaaacccctgtgcccactagaagcttcggaagggcctcgtccctctgctaccagccctgggaggagccaggatccttgttggtctagctaaatactgttaggggagtgtgccccatctcatcattctcgaagatagcaaagtcatagttgggcacccggtgattgaggtcaaaaaataaagctggtctgtctcttcccaatattttgtgaaaaggtaaaacgggaaag

SEQ ID NO: 7812 - DNA, 443 bp, Homo sapiens
  SIMILAR (417)..(1): 841254mologous to Homo sapiens mitochondrial outer membrane protein,accession number AF043250,Smith-Waterman Score=592.
caggggtgggagcttcttctccagcgtggcacccacgatccagttgctatccacagagcctttgaagaggaggttggcccttgggcaagttccagctggtacccgaaggagacgctggtgtcctgcatccttgtgctggccttcaaactccacacccacctgcagctggtcactggctttgtggtagtatgttgcgtgcatgcccgcctggcccaacgttaccgttgccaaccagttgttcaatgtgtatttcccagctagagacatgacagtgccctcctctccaggccgccggtggtagaccagctctccacccagggccaggcaaggcgtgatgctctggaggtagtgggctacgaggattcctgaacccacgaggacgtctgggttccccagggtgacggctgctgtgaactcgtgccgaattcctgcagcgcggatca

SEQ ID NO: 7813 - DNA, 2402 bp, Homo sapiens
  SIMILAR (2380)..(497): 1001254mologous to Homo sapiens Lutheran blood group glycoprotein,accession number X83425,Smith-Waterman Score=3298.
gatgtgacaaacagcatttattccagactccagtgtccacagatgatggggtggggcggaggtagggcgggggcaggagtgggaccaggggcggggtgaggggggggaatccagtgtcagactctgcagcaagacgtcaggtggggggaccagcaggggaggcgggaggtaaaaatagctccggccagccgaccctcggagccttgtcccaggctgggccttgggcttgggtccaggagctattctggggcctgggagagtcacattccctggaggaaggccccctcccacccacccaccctccctctccttccctcccggaggcaggcagccactgtgggtccctgccttgccggcagaggaaggaagggagggctgggcagggagagggaagagggaagagggaaggcgggggcgggcatggcgtgagcagggctggttctctgatgcctgcagctccaggtccagggacagcctctaggaggttcttggctcagcactcgtctccgaagcccccgctgccacccctggctcctccggaggcacctcccatgagaaggccggtctgctctggttgctccgaccccgagtggctcagccctggctcccctggcggcggagcccccttctcccgccgctggcggcagcaggggccccctttgcgtctcacgcagtagaagacagcaacgacgaggagcaggaggcccacgctgacggccacggccatgacggccactccagcctgggaggtctgggggctcacggcgccgaagtggaagacatggcgcttgttcccgtgggggttggaggcttcacaggagatgccatcgcggctcagggcgctggtcactttcagggtcagagagctgctcacccaaccctgccgtccggggattggctctgcggggctgccccccaattggctccagctgagtttggggtctggatggccgcgggcagagcagatgagtgtgacttcgtctccttccctccagctgccatctgccttgggctctatttccgctgtctttagctctggcgagccttggaccagcagcgtgaagttctgggtgcggctgaggaccgggactgtgggcagggaggcctcacatacgtaggtgccattggaatcgaaggtgatagaactgagcgacagcatggggccatcgcccaggggagtggagtccttggtccagcgtagggcaggggtgggcaggccgtgcacggagcagttcacgactgcactgctgtttagaggtaaggaaagcaccttcccctcgctgagctccagggggtccagataggccacgcgcagctccagcgtcttggagagctgcacgtcatctgccgcgtcgtaatcctccactctgcagccataggtcccgctctggccccgggtcactccctccagggtcaagttcccctcgagattcacattcagcacttcctcctgctcatcctgaaggcggaaaagcgtatactccgggctggggctgccgtccccccggcagagcagctggacagtgtcaccctcgcgtacccagcctgctggggtggacgggctgcccacccagaactgcacgtgctccgtgggatagtgcagggtgaggtggaaggtggggctgtccaggcggccgtggcggccctcgggcaggctgtagtgggcggcgcagtggaagctggcgtctcggtcatccttgcggagccgcaggtagagggtgctggtgagggagagcaggcccgaggcctcccggaccgtgcggctggtcatgtagccctctgggttcatctctacgggcacctccaggcgctgcccgttgcgataccacgtgatcttgggggccgggttcccgttccggctgttgcaggtggcgatctcctgggcagagtcctccatcacagacagtgtccctttgttgggggagacctcagtggcctctggctttgcaaacacgttgagccgcgcagtggcctcagcagtgcctgccgcccctgccctcaccacgcacacgtagtctcgctcgtcgcccacctgggcctcagccagcaccaggcgcccctgggagtccagctggtatgggggactgcggccccgggtgtcgtgcattgtgacctggagctcagagccctgcatctcagccgaggctaggcgggggcgagctcccgagcggtcggtaaggaaccattccagcatataatggtcgtgggttcccgtaggggtgcagtccagaatgacagactttcctcgcatcacctccaccagcgggggtacagacaagcgcacctccgcctgggcatctgggtgcgccgccagcaggactgcgagcaacagcagccgcggggccccgcgcgcctgggccggtgcgtccgggggctccatgttcacggcggcggcggagact

SEQ ID NO: 7814 - DNA, 932 bp, Homo sapiens
  SIMILAR (175)..(246): 581254mologous to Homo sapiens Human apolipoprotein E gene +2 frameshift mutant product,accession number W18652,Smith-Waterman Score=66.
ttataaatcggaattggaggaacaactgacctcggtggcggaggagatgcgggcacggttgtctaaggagttgcaggcatagaaagaccggctgggagagaatatggagaaagtaagaggacgcttggttaagtatcgtggcgaggtgcaggccatgctcggagagagtatcgaggagctgcgggtgcgccttgctttatatcgtgcgcaagctgtgtacagggttcctccgcgatgccgatcacctttgaagaggaggttggccttgggcaggtccagctggtacccgaaggagacgctggtgtcctgcatccttgtgctggcctcaaactccacacccacctgcagctcctgggcagagtcctccatcacagacagtgtccctttgttgggggagacctcagtgcctctgctttgcacgcacacgtagtctcgctcgttcgccacctgggcgtcagccagcaccaggcgcccctgggagtccagctggtatgggggactgcggccccgggtgtcgtgcattgtgacctggagctcagagccctgcatctcacaccaaaaaactgatcggctgatgatcacgtagatgccatcggccggcggcgggctcgaccctgtcattactgtatgctttggtctgtgggtgtgtagaatgagggacaggaactttaactcttcgtcctcctctgccccctgcagcgtctgctccttccgctgctgccggcagataaggatgcccgtggcagccacagcagtagcaatgatggcggcgatgatgcccccgatgatgccgcctgtggcccctgcgcctgctgtgttgggggtctgagggtacgagaatcaggctcagggcgatgggctcgacctgcggggaggtcgcacaaccgggacgtgctgggggcagaaccgtaaagccccacgtcctcaggcaa

SEQ ID NO: 7815 - DNA, 3639 bp, Homo sapiens
  SIMILAR (664)..(2133): 981254mologous to Homo sapiens dJ25J6.2 (zinc finger protein),accession number Z84476,Smith-Waterman Score=2722.
atggaaacaagcagtgtaagttctggaacagatttcatccttctggggttttctgatcgaccccaattagagcacatcatctcagtggttgtcttcatcatctatattgtgactctgaaaacctacaacaaatacacggtgctgagattatcaccagcaatatcccagaactcaaatatgaagatggaacagtgcccgtggcaacaaagaagtaaaaaacttcaagcagacgctgttgtgctgttggatgagagttcaggaccaccaagccagctgctttggacccgccaggatacccagctccctcaggaaagcgctctattacctgctccatatcctgccttcactaaagatggaagccaaggaaacctgccgcaagcagatatcacactaatgagccaggcccaagatagcaggagcatattatttcaggagtcagtgacatttgaggatgtagctgtgaacttcactaacagggagtggcagtgtctgacctacgctcaaaggcatctctataaggatgtgatgttggaaaattatgggaacatggtatcacttggatttccatttcctaaacctcctttaatctctcatctggagcgagaagtagacccctgtgtgcaggatccacaggacagggagtccctaagctgctcctacccagtgtcagctgacaagatgtggcctgagaatgaaaaggcaagttcacaacaagagatttttgaaaatggagaagcctactggatgaaatttaacagtctcctaaaagttgattcccgggatcctaaggttagagaagtttgtgttcaggatgtcaaattagagaatcaatgggaaacatctataagggagaaactgagagaagagaaagaaggctctgaggaagtgacctgcaaaaaaggaaagaaccagaaagtgcttagtaaaaacttgaatccaaactcaaaacatagtcaatgtaataaagttcttatagcacagaaactccatgaatgtgccaggtgtggcaaaaacttcagttggcactcagatctaattctccatgagcaaattcattctggtgagaaaccccatgtgtgtaatgagtgtgggaaagcattcaagaccagaaatcagctttctatgcaccggataatccacacaggggagaaaccttttaattgcacccagtgtgggaaggctttcaacagtagatcagctctttgccgacataaaaaaacccacagtggggagaagcctcacgagtgcagggactgtgggaaggccttcaagaccaggaaccgtctctgtatgcatcagcttatccacaccggggagaagccttacaaatgtaactgctgtgggaaggccttccagtttaagcattcccttaccatccatggcagaatccacactggggagaagccatatgaatgtgaggagtgcgggaaggccttcagtgggagttcagacctcaccaaacacataagaatccacactggggaacgaccttatgagtgcagcaagtgtggaagggccttcagtcggagctcagacctaagcaaacacaaacgaatccatactcgggagaaacactatgggtgtccccagtgtggaaaagacttcagcatcaaggcagaactcaccaaacacagaaggatccacactgaagagaaacgttacaggtgtgaggagtgtgggaaagcctttcgtcataactgtaagcgcagggctcatgaacgagagcatacaggggagaagccctatcaatgcagggattgtgggaaaaccttccaagataagcactgccttaccatccatcagagaatccacactggagagaaaccttacaaatgtttagagtgtgggaaagctttcagtgggaagtcaaacttgaccaatcatcgaagaattcacactggagagaagcctcacaaatgtgaggtatgtggaatggccttccatcatagttcagtcctgaggcagcacaaaagaatccacactggtgagaagccatacacctgcagtgagtgtggcacgtccttccgtcagggctcagctctgattggacataagcgagttcatactggggagaaaccttatgaatgtgaggaatgtggaaaagcttttagacgccatcagagaacttcaggcagctgttcagccgccacacaccccgaacccccaacacgttgctttcgcactgatgggagcagtgaggaaggaaaccggcggatcctagacgcccttcccttgcgtcaccgatgttcgctgtggaaggtgacgcctggctggagccccgacgccgctgagcgagtttcaagtggttttggccgacggaactctacgaaaaaacggggcgccgtgcgaaagagcgcagtccttgctgtttatgaagctaggaggaaaggccaactgattaagcaattgcaagtcatcatcgtgactgaattggtgctgggtcacacagctcgggattggaacttagtgtcgatctggaaaggcctgcttggagaaattcacgaatgcactgaggaatggggtggggctcaatcaagccttcagaggaatggagtccttactgacatcatgtggagcagaatcacccagagtttaattggtcgtcagcaaagcctgagtcctgtcctctcgctctcctccccggacagcaagagcttcaccactcgctccaccttctccaccaactaccggtccctgggctctgtccaggcgcccagctacggttcccagccagtctgcagcgcggccagcgtctatgcaggcgccgggggctctggttcccggatctccgcgtccccctccaccagcttctggggcggcatggggtctggaggcctggcggcagggatggctggggttctggcaggaatgggaggcatccagaacgagaaggagaccatgcaaagcctgaaggaccgcctggcctcctacctggacagagtgagaagcatggagaccaagaaccggaagctggagagcaaaatccgggagcacctggagaagaagggacgccagtctgtggagagcgacatccatgggttccgcaaggtcattgatgataccaatgtcactcggctgcagctggagacagagatcgaggctctcaaggaggagctgctcttcctgaagaagaaccaagaagaggaagtaaaaggcctacaagcccagattgccatctctgggttgaccgtggaggagtgcgaggccctgctgaacatcaaggtaaagctggaggctgagatcgccacctaccgccgcctgctggaagatggcgaggacttcagccttcgtgatgccctggacagcagcaactccatgcaaaccatccgaaagaccaccacccgcccgatagtgagaagtggggggtcatcagttcagaataagaggggcaaaagcagcgggatcagcagcgactttcttcatctgattcaggttttggaagctgcccgagcctccccgacgagcgccgccccctgctccacggcacccagtcccatcgaccacccaagggatgaggagtgcgagcgcatggcgtggggttggcaggcaactccacctgcaaccccggtgcgggatccactgggtgaagccagctgggatcctgagtctggtggggacgtggagaatctttatgtctag

SEQ ID NO: 7816 - DNA, 1080 bp, Homo sapiens
  SIMILAR (279)..(341): 661254mologous to Homo sapiens cytokeratin 18 (424 AA),accession number X12883,Smith-Waterman Score=64.
atggctcccagcgtgccagcggcagaacccgagtatcctaaaggcatccaggccgtgctgctggggcctcccggggacggtaaaggcacccaggcacccatattggctgaaaacttctgtgtctgccattcggctactggggacaggctgagggccatggtggcttctggctcagagctagaaaaaaagctgaacgcaactatggatgctgggaaactggcagaaatgctcgatgacctcatggagaagaggaaaaagaagcttgattctgtgattgaattcagcatcccagactctctgctgatgattttagagtcaactgtgagacagagcctgccatgtgcacgcagtagagaacgacatccatgggctctgcgagctgcagctggagacagagatccaggctttcaaggaggagctgctcttatgaagaagaaccatgaagaggaagtaaaaggcctacaagcccagattgccagctctgggttgactgtggtggtagatgcccccatatctcaggacttcgccaagatcatggcagacatctgggcccaatatgacgaggtggctcagaagaacagagaggagctggacaataacaggtctcagcagattgaggagagcaccacagtggtcaccacacagtccaccgaggttggagctgctaaggcgatgctcacagagctgacacgtacagtccagttcttggagatcaacctagactccatgagaaatctgaaggccagtttggagaacagcctgagggaggtagtggcccgctatgccctgcagatggagcagctcaatgggatcctgctacacctggagtcagagctggcacaaacctgggcagagggacagtgccaggcccaggagtaccaggccctgctgaacatcaaggtcaagctggaggctgcgatcgccacctaccgccgcctgctggaagatggcaaggacttcaatcttggtgataccctggactgcagcaactccatgcaaaccatccaaaagaccaccacccgccagagaatggatggcaaagtgctgtctgagaccaatgacaccaaattgagacattaa

SEQ ID NO: 7817 - DNA, 891 bp, Homo sapiens
  SIMILAR (836)..(732): 911254mologous to Homo sapiens adenylate kinase 2B,accession number U54645,Smith-Waterman Score=167.
ggccttctgatactaggatgtggctttggagaaggctgctaggatgcttgcgaacacgacatcgggggtctgggatgcatcgatggcggagtggatcccccgtttcctgtagtactctatgagtggggtggtttgagtgtggtaggcttgcaggcggattttcaaggccttttcattatcatctgatcgacggatcaagggttccccggtgatgtcatctttcatgggctcttttggagggttgaactcctcgtggtaggaacggccactcttggggtgaatcagccttcctgtgattcttcggatcagcagagagtctgggatgctgaattcaatcacagaatcaagcttctctttcctcttctccatgaggtcatcgagcatttctgcctgcctcacagtccgagggaagccatccagaagaaaaccatttttgcacaagggggtctccaaattcttctcaatgagctccactaccatttcatcactcaccaagtttcccagcatcccatagttgccttcagcttttttccctagctctgagccatgaagccaccatggccctcagcatgtccccaggtagctaaatggcagacacagaagttttcagccaatctgggtgcctggggcagtagatagcatgcagaaatgagcaggagctttggagtcattcagatgcaagctctgtaaattacttgctatgtagcctagagaacaagccattcaaacttcagtttctccaactgggtccctttaccggccccgggaggccccagcagcacggcccggatgcctttaggatactcgggttctgccgctggcacgctgggagccatgtccgccgaagtctctcactgaacaccagttcgcacgcctcacaggtccacgaaa

SEQ ID NO: 7818 - DNA, 832 bp, Homo sapiens
  SIMILAR (198)..(650): 561254mologous to Homo sapiens cytokeratin 18 (424 AA),accession number X12883,Smith-Waterman Score=315.
gactgagctggagacagagatcgaggctctcaaggaggagctgctcttcatgaagaagaaccacgaagaggaagtaaaaggcctacaagcccagattgccagctctgggttgaccgtggaggtagatgcccccaaatctcaggacctcgccaagatcatggcagacatccgggcccaatatgacgagctggctcggaaagaaccgagaggagctagacaagtactggtctcagcagattgaggagagcaccacagtggtcaccacacagtctgctgaggttggagctgctgagacgacgctcacagagctgagacgtacagtccaggtctttggagattcgacctggacttccatgagaaatctgaaggccaagcttggagaacagccttgagggaggtggaggcccccgtacgcccttacagatggagcagcttcaacgggaatcctgctgcaccttgagtcagagctggcacagaccccgggcagagggacagcgccaggccccaggagtatgaggccctgcatgaacatcaaggtcaagcctggaggcttgagatcgccacctaccgccgcctgctggaagatggcgaggactttaatttttggtgatgccttggacagcagcaactccatgcgaaaccgatccaaaagaccaccaccccgcccggataagttggattgggcaaagtggtgtcttgagaccaattgacacccaaagttcttgaaggcatttaagcccagcaagaagcaagggtacccttttggggaagcaaggaaggccaataaaaagtttcagagttcaaaaaaaaaaaaaagaaaaagaaagttttg

SEQ ID NO: 7819 - DNA, 372 bp, Homo sapiens
  SIMILAR (372)..(154): 1001254mologous to Homo sapiens putative ATG/GTP binding protein,accession number AJ245874,Smith-Waterman Score=362.
ctaggcaaaataatatggtactgttctaatgtctaaagtcaatttcatattttcaaatgcttcaggtcctctgcgtgtaactgtgaccttggcagcaagcacaggaattggccattgaacatgtttcatgtacagcccctgaaatgctatgctccttttgccagccccacttttgcctgttttactgctgccgctgctagatttgccagatgattttgaagagaagagtcttgtcatgaactcagaaacatcaggcaactcatggttggaattcagcatattcattgactgctccatttcccgtctcatgtcaggatcacttgtgttgaccactttaggcagaagcacaaatatcaataaaggaagaaccat

SEQ ID NO: 7820 - DNA, 743 bp, Homo sapiens
  SIMILAR (247)..(315): 691254mologous to Homo sapiens alternatively spliced product using exon 13A,accession number U22376,Smith-Waterman Score=72.
tttttttttttgagacggagtttcactctgttgcccaaactggagtgcaatggcacgatcccagctcaccacaacctccgcctcccaggttcaagtgactctcccgccccagcctcccgagtagctgggactacaggcacgtgccatcacacccaggtaattttttgcattttcagtagaaacggggttccaccaaccaggctggtctcgaactcccgacctcaggtgatcttgctgcctttgccctccccaagtgctaggattacaggcgtaagccactgtgcccggcctaactaccaatgttttctggagtttaaatattaaaattcaaactagcaatctttactttttcctttacgagacaaatcaataaagaccaaagtcaaattcactgtgatttaaatagtttaccttctcaaaaagcataacattagcaaaagtaaaacttaatctccaaaaccatttaattatgtttcttatcccttgtttccatgagttcctcgtcttgttttctgatgctgtccttattggattctcaaaattttttcaaatacttttctctgattaaaaccctctgtaaatatcctctagcatagcatttcaggggctgtacatgaaacatgttcaatggccaattcctgtgcttgctgccaaggtcacagttacacgcagaggacctgaagcatttgaaaatatgaaattgactttagacattagaacagtaccatattattttgcctaga

SEQ ID NO: 7821 - DNA, 1474 bp, Homo sapiens
  SIMILAR (668)..(808): 581254mologous to Homo sapiens Human secreted protein sequence encoded by gene 27 SEQ ID NO:88,accession number B24463,Smith-Waterman Score=102.
atgctgctgacgctggccgggggcgcgctcttcttcccggggctcttcgcgctctgcacctgggcgctgcgccgctcccagcccggatggagccgcaccgactgcgtgatgatcagcaccaggctggtttcctcggtgcacgccgtgctggccaccggctcggggatcgtcatcattcgctcctgcgacgacgtgatcaccggcaggcactggcttgcccgggaatatgtgtggtttctgattccatacatgatctatgactcgtacgccatgtacctctgtgaatggtgccgaaccagagaccagaaccgtgcgccctccctcactcttcgaaacttcctaagtcgaaaccgcctcatgatcacacatcatgcggtcattctctttgtccttgtgccagtcgcacagaggctccggggagaccttggggacttctttgtcggctgcatcttcacggcagaactgagcactccgtttgtgtcgctgggcagggttctgattcaggcatgtatgaatgaaatgacagagagtctaaagcagcagcacacccttctgtacaaggtgaatggaatcctcacgctgggcaacttcctttccttgccggaatccttctcttccccttcatggtactggtcctatggccgcaagaagggactaagcctggttccaagtacccttcagcatcccattctaactgcaacgtgggccaatgcctttcctcggtaagctcctcagatctactggttctgtctgctgttgcaggaaggcagtccggctctttgacactccccaagccaaaaaggatggctaaatgctcctgggagtcaggcgcagcctcacaccagctgcctcctccactcagcattccatggaccaaattgtgccctgggtagcctcagactttgggtattgataagccgatggatttgagtttttctaaagaatattcatattacctccttcttctaacttgccctatttgcaaacgcacttttgtagtaacaactattggggtcctgtcagacctccacggacagcaaagtggttttaatggcaagcccaagggatccttcttaaggtcttatctcaagagctctgggaggtggaagcatggggtgggatcggtggaccagggtggtaagtgtctgcacatctgcctgtccctgtatcagcggctacccaccttccaaaccactcaggacagtacccgtggcactgggcccgcagaagcaagggatgacttggttctttggaagtaatgtcgtcttgtgacattggcctgggacaatcattgtgggtaggtagttattgatcgtttactagataacccattggttctttgcctcatcctctcatccatgggtcagagttgaattcttatgtctatagacttccaatcagaagtctcactggtggggctgggggtggggtcaggcaggaggcatgggatggggaacctgagtaaggtagtgtt

SEQ ID NO: 7822 - DNA, 1534 bp, Homo sapiens
  SIMILAR (29)..(265): 681254mologous to Homo sapiens Human secreted protein, SEQ ID NO: 7871,accession number G03790,Smith-Waterman Score=266.
atcatgccactgcactccagcatggattcttgctctgtcgcccaggctagagtgcagtggcgctatcttggcccactgcaacctccatctttgggggtaaagcgattctcctgcctcagcctcccgagtggctgggactgcaggcgcacactgccgtgcctggctaattttttgtgttttagtagagatggggtttcaccgtgttgccccaggctagtgttgaactcctgagctcagacaatccgcttgcctcggcctcccaaagtgctaggattacaggcatgagccaccgcacccggccccggaatctgcatttcaacaagctcttctgatggttcctctgcatctggggagtcgagaagttcttgctgctatgggcctcttgaagtttgctttcgaaccccaatttcagaatctcaacccactcctctgcctcttctagacatagttacttttccttaagtgccacactggcataaaggcgttcgatgttccactatctttcctgcaggtgttcagcacatgatcggtggtttctagggtctgccatgggtcttactaattatttggaaccaaatataacagaaaacaagtttggaattctaaaaaatcccttaaaaacctttttaaaaaatcttggacacagcagctgtgaatggtctgggcctgcctgtgcagttattgctgaaattactggggctgttgagtatttggaaatcaaatcccagaagtgaattggctgtgccaatcagttgtaaaaggatctggccctgggaggtttgatgggtaggggcaaatggggacatgggaagagggtgggaggcttcatgactgcatgaactgagtagaaagatttggccttttgggacagagcatgcaacgggcagctgttcccggtgacctgggcatctgggacttactgagggagagacgtgatcttggcctagctgaccaccatcgaaaccactcatcggaggcgtggatgcagtttgctgggaagatgagcaccgatctgtctggtggtcacatggagggctttgcagatctctgacactggatatttccccttgccctggtgccaaggactaggggagagatcactctgggcttgagtcagggacagggatgccaggcacagcgaaagaagatgactgtggtacaaacccagctgatggaagtgggaaaattaaataaaaggaggaagggaatcaagctggttcatgtaggaagcatgcacacactcatcccatccattgttccacatcgggcacctccctgagctagctgccactcctgctgcactctgccactccttggaaggcagcacagggcagtggttagagccttctctttcagtgtcagacaggcctgggttcatgtccaggtctgccactttacttactagctgtgggatgctgatgagcccaagctctctcctagcctgcttcttgatcagtaaaatgacaatgactagagtacctgtcacttctgagcaactggtacttccagcagcccctcctgctgccccctccat

SEQ ID NO: 7823 - DNA, 1104 bp, Homo sapiens
  SIMILAR (1)..(699): 391254mologous to Mus musculus surfeit 3 protein,accession number M14689,Smith-Waterman Score=229.
ccgaaagtaagaagcccaaggataaagaggttggccccggccccagcttttcgtgaggaagcaggagcttaagaagattgttgacccccctgttgtagaaaaagtcttaagaatttgggcatttggacagggacatccagccccaaaagagacctcccccccttttgtgaaaatggccccggctatatcagggtgccagggcaggagagccatcctctataaagcggctgaaaggtcccttctgcgattaccccggtttcacccagggccctgggaccccgcaaaccagctaatccagcttgcttaagctgggcccacaagtacagacccagagacaaagcacagagaagcaaacagagacctgttagccccgggccgagaagaaggctgctgccaaaggggccgtcccccaagaaagagcccaccctgtcctcagagcaggagtttaaccccgtttcaccacccttggtgggagaacaagaaaagctcagcttggtggtgattgccacacgaccgtggatccccatcggagctggttgtcttcttgcctgccctgggtccgtaaaaatgggggtcccttactgcattatcaaggggaaaggcaagactggggacggtctagtccaccagaaggccctgcacccactgtcggccttcacacaaggtgaactcgggaagacaaaggcgcttttggctaaagctggtgggaagctaccagggaccaaattacaatgacagatacgatgaggtaagaggcagctttacccaaaatactgtcattcacaaatctttctcccaaataactggctggcttaacctatgagaagttctatctgacgatcagcttggaacagccaaacagaattaacgcaactaataaccttgaaaatctcagaaaacagtaagccaagctaactgcctctttttgtcttttcagatccgccgtcactggggtggcaatgtcctgggtcctaagtctgtggctcgtatcgccaagctcgaaaaggcaaaggctaaagaacttgccactaaactgggttaaatgtacactgttgagttttctgtacataaaaataattgaaataatacaaattttccttcaaa

SEQ ID NO: 7824 - DNA, 472 bp, Homo sapiens
  SIMILAR (247)..(462): 711254mologous to Homo sapiens mSin3A associated polypeptide p30,accession number AF055993,Smith-Waterman Score=265.
gcggccgcggagtggcctaccggggaccctcccccagagggaccggcccggggcggggagatgaacggcttcagcacggaggaggacagccgcgaagggccccccgccgccccagctgccgccgccccgggctacggccagagctgctgcctcatcgaggacggcgagcgctgcgtccggcccgcgggcaacgcctccttcagcaagagggtccagaagagcatctcgcagaagaaactcaagctggacatcgacaagagcgttgatctgttccagctgcaggtgaacaccctacgacgttataaacgacactacaagttgcagaccagaccaggcttcaataaggcccagttagcagaaactgtgagtcgacacttcaggaacatacctgtgaatgaaaaagagacccttgcctacttcatctacatggtgaagagtaacaagagtagactggaccagaaatcggagggtg

SEQ ID NO: 7825 - DNA, 794 bp, Homo sapiens
  SIMILAR (112)..(615): 361254mologous to Homo sapiens mSin3A associated polypeptide p30,accession number AF055993,Smith-Waterman Score=173.
gcggccgcggagtggcctaccggggaccctcccccagaggtaccggcccggggcgggtgagatgaacggcttcagcacggaggaggacagccgcgaagggccccccgccgccccagctgccgccgccccgggctacggccaagagctgctgcctcaatcgaggacggcgagcgctgcgtccggcccgcgggcaacgcctccttcagcaagaggggtcaggaagagcatctcgcagaagaaactcaagctggacatcgacaagagcgtaaggcacctatatattctgtgattttcacaaaaaatttcatccagaagtgtccgaaataaaaggaagaaggaagaccaagtgtacgatgggcgggagaattcttcccgagcacggacactgacattcctgaggttgatcctgttcccagcctgccaggtgaacacccctacggacgttataaacgacactaacaagttgccagacccagacccggcttcaataaggccccagttagcagacaactgtgagtcgacactttcaggaacatacctgtggattgaaaagagacccttgccctactttcatcttccatggtgaagagtaacaagagtagactggaccagaaatccggagggtggcaagcagcttgagtgaggatgaagcacatcttaaaggaatgaagtgtaaatgcttgatgcacaggtgatatctactacatttaagcccataaagactgtttaaatattattgtaaataaaaaagtttgaatgatgaaaaaaaaaaaaaaaaaacctcgtgccgaatt

SEQ ID NO: 7826 - DNA, 2448 bp, Homo sapiens
  SIMILAR (1933)..(311): 1001254mologous to Homo sapiens UDP-Galactose ceramide galactosyl transferase,accession number U30930,Smith-Waterman Score =2867.
gggacacgcacatatcaagatttaaaactaaggtctgacacagtcactgaattgatttaaataattaaggcttctaaaaggttcagtgccaaaactctctacatcagtatttgaataaaatacatttctgcattttaggtttgtgctttttacagccatcttaattccacagaatttcattagtagtctcataagggcatgttagaattgtttactgatgttttacttttagtagctgttagactaaataatagcaataaaaattcaatgagtgaaccaatttatttctatcacctgggctgttggctcatttcactttcttttcatgtttaatatggccatttcttttgtacttgccattgaggattccattgtggtaatgtccattaactgtgctatgcttatttctagaccacagacttttgatttttctgtagataaattttgtcacccaagacaagagaaagtataacaaggcagcaccaagcaaaagcacaaaggcaatatccagtaaaaaatactgacaaaaggagatctgatggacagcggcacgtaggtgatgggctccattgtgacgaataatataatctatccaatagatagttcgattgacagggtgaccaggttgatccttgtgaatttccgaaagcttctgagccctctgacggtagctgggattattgataaccttcactagtgcttcatagagctctttttcagtaactgtcttccattctagcaatatccccatgccttttgcctgtactctggtcatagtatcataatggtctccaaagagtggaattcccactacaggcacaccatgatacatagtttcaaaaatactgttcaaaccaccatggctcaggaaggctttaatctttgaatgcccaagcaggtcattttgtggtaaccattctatgagtttagtgttgtttcctagattctttggtttgggtccagaaaacctccaaatcactttttgaggcaatctccccagagctcctgccagtttgttagcaatgtcttctgacagatacttgacaccagctccaaaagacaccaagacaaagccatgttcattagcaccatttacccatctttggagatcttctggtagtgggctggctggtttggttaggattcctcctacataaacaacattaggcagagtgggtcttgggaattccagtgctacgtcagtacacagcatccacaggctggacccatgaaccaaatcatacatggacttctccggcagcaggttgtacttctgcattatcctttcatatttgggaagaaccagaaagctgacccctaatctggaaatgaggtaaacaccggtatttttcatcctttgcagcaagttcatgcggtctgtgaggagtgagttaaactctgggacgtatgctaatggagcaggagcacccacttcagcaggataccaaaggccagttgaaaatacagcatatttaacccctaaaagatgagctatcacaaatccacacatatcattagggtccaccagcagcaggtcaaatttttctttcttcagaccctggatcagggcatggttgccaaccatcaggtcacagttcttagtatagtgatccagtatgtcaaacagttcgattgctgtcaatctcccagagaaaatattccgcatcttggactgtaggaaagcatctgaggtggtactgttaaagatccctgggtagcgctggaggctgtaatgattagatggggcgatgtctctgccttcagagaggaggaacactgtatggtggcctctctcgtgcaaggctgaggctagcgtcttgaaaatgtacatatggctttcaaacataattggcggcacgatgatgattttggcagccttcgctatcccaacagcactccacaggagaatgaaatatggagtgtaagacttcatagctgtaataacaaccagaaaacaacttaaaacaaaatacaatgctcaccattcaaaacaagcaatcacaaagcatttttccccaaaaatatctgatctaatactttgtctaaaaaaaaaaatcatgaacagacacttctcaaaagaagacatttatgcagccaaaaaacacatgaaaaaatgctcaccatcactggccatcagagaaatgcaaatcaaaaccacaatgagatatcatctcacaccagttagaatggcaatcattaaaaagtcaggaaacaacaggtgccggagaggatgtggagaaataggaacacttttacactgttggtgggactgtaaactagttcaaccattgtgcaagtcaatgtggcgattcctcagggatctagaacccagccatcccattactgggtatatacccaaaggactataaatcatgctgctataaagacacatgcacacgtatgtttattgcggcactattcacaatagcaaagacttggaaccaaccc

SEQ ID NO: 7827 - DNA, 1030 bp, Homo sapiens; identical to SEQ ID NO: 6900
  SIMILAR (4)..(39): 911254mologous to Homo sapiens putative p150,accession number U93563,Smith-Waterman Score=64.

SEQ ID NO: 7828 - DNA, 1875 bp, Homo sapiens
  SIMILAR (16)..(1842): 941254mologous to Homo sapiens putative p150,accession number U93565,Smith-Waterman Score=3000.
atgcagaacaagggaattgatgcaaaaatcctcaataaaatactggcaaaacaaatccagcagcacatcaaaaagcttatgcaccatgatcaagtgggcttcatccctgggatgcaaggctggttcaatatacgcaaatcaataaatgtaatccagcatataaacagagccaaagacaaaaaccacatgattatctcaacagatgcagaaaaagcctttgacaaaattcaacaacccttcatgctaaaaactctcaataaattaggtattgatgggatgtatttcaaaataataagagctgtctatgacaaacccacagccaatatcatactgaatgggcaaaaactggaagcattccctttgaaaactggcacaagacagggatgccctctctcaccactcctattcaacatagtgttggaagttctggccagggcaattaggcaggagaaggaaataaagggtattcaattaggaaaagaggaagtcaaattgtccctgtttgcagacgacatgattgtatgtctagaaaaccccattgtctcagcccaaaatctccttaagctgataagcaacttcagcaaagtctcaggatacaaaatcaatgtacaaaaatcacaagcattcttatacaccaacaacagacaaacagagagccaaatcatgagtgaactcccattcacaattgcttcaaagagaataaaatacctaggaatccaacttacaagggatgtgaacgacctcttcaaggagaactacaaaccactgctcaaggaaataaaagaggatacaaacaaatggaaaaacattccatgctcatgggtaggaagaatcaatatcatgaaaatggccataatgcccaaggtaatttacagattcaatgccatccccataaagctaccaatgactttcttcacagaattggaaaaaactactttaaagttcatatggaaccaaaaaagagcccgcatcaccaagtcaatcctaagccaaaagaacaaagctggaggcatcacactacctgacttcaaactatactacaaggctacagtaaccaaaacagcatggtactggtaccaaaacagagatatagatcaatggaacagaacagagccctcagaaataacaccgcatatctacaactatctgatctttgacaaacctgagaaaaacaagcaatggggaaaggattccctatttaataaatggtgctgggaaaactggctagccatatggagaaagctgaaactggatcccttccttacaccttatgcaaaaatcaattcaagatggattaaagatttaaatgttagacctaaaaccataaaaaccctagaagaaaacctaggcaataccattcaggacataggcatgggcaaggacttcatgtccaaaacaccaaaagcaatggcaacaaaagacaaaattgacaaatgggatctaattaaactaaagagcttctgcacagcaaaagaaactaccatcagagtgaacaggcaacctacaaaatgggagaaaattttcgcaacctactcatctgacaaagggctaatatccagaatctacaatgaactcaaacaaatttacaagaaaaaaacaaacaaccccatcaaaaagtgggcgaaggacatgaacagacacttctcaaaagaagacatttatgcagccaaaaaacacatgaaaaaatgctcatcatcactggccatcagagaaatgcaaatcaaaaccacaatgagataccatctcacaccagttagaatggcaatcattaaaaagacaggaaacaacagcaccacctactggcagagcctaacagggccagccggcaaacaagaaaactgttcacagtcccagccccaagatcccaagtataca

SEQ ID NO: 7829 - DNA, 809 bp, Homo sapiens
  SIMILAR (126)..(809): 831254mologous to Homo sapiens putative p150,accession number U93563,Smith-Waterman Score=933.
agaagtgcttaaaggagctgatggagctgaaagccaaggctcgagaactacgtgaagaatgcagaagcctcaggagccgatgcgatcaactggaagaaagggtatcagtgatggaagatgaaatgaatgaaatgaagcgggaagggaagtttagagaaaaaagaataaaaagaaacgaacaaagcctccaagaaatatgggactatgtgaaaagaccaactctacatctgattgatgtacctgaaacactaaatgcccacaagagaaagcaggaaagatctaaaaccgacaccctaacatcacaattaaaagaactagagaagcaagagcaaacacattcaaaagctagcagaaggcaagaaataactaaaatcagagcagaactgaaggaaatagagacagaaaaaacccttcaaaaaattaatgaatccaggagctggttttttgaaaggatcaacaaaattgatagaccgctagcaagactaataaagaagaaaagagagaagaatcaaatagatgcaataaaaaatgataaaggggatatcaccagcgatcccacagaaatacaaactaccatcagagaatactacaaacacctctacgcaaataaactagaaaatctagaagaaatggataaattcctcgacacatacaccctcccaagactaaaccaggaagaagttgaatctctgaatagaccaataacaggctctgaaattgtggcaataatcaatagcttaccaaccaaaaagagtccaggaccagatggatccacagctgaattctaccagaggtacaaggaggaactg

SEQ ID NO: 7830 - DNA, 2142 bp, Homo sapiens; identical to SEQ ID NO: 4221
  SIMILAR (799)..(1992): 901254mologous to Homo sapiens putative p150,accession number U93563,Smith-Waterman Score=1908.

SEQ ID NO: 7831 - DNA, 3819 bp, Homo sapiens; identical to SEQ ID NO: 3971
  SIMILAR (1084)..(2460): 571254mologous to Mus musculus reverse transcriptase,accession number U15647,Smith-Waterman Score=1502.

SEQ ID NO: 7832 - DNA, 3570 bp, Homo sapiens; identical to SEQ ID NO: 2157
  SIMILAR (790)..(2313): 951254mologous to Homo sapiens putative p150,accession number U93572,Smith-Waterman Score=2493.

SEQ ID NO: 7833 - DNA, 1641 bp, Homo sapiens
  SIMILAR (2)..(1603): 981254mologous to Homo sapiens putative p150,accession number U93564,Smith-Waterman Score=2788.
tctcaataaattaggtattgatgggacgtatctcaaaataataagagctatctatgacaaacccacagccaatatcatactgaatgggcaaaaactggaagcattccctttgaaaactggcacaagacagggatgccctctctcaccgctcctattcaacatagtgttggaagttctggccagggcaatcaggcaggagaaggaaataaagggtattcaattaggaaaagaggaagtcaaattgtccctgtttgcagacgacatgattgtttatctagaaaaccccatcgtctcagcccaaaatctccttaagctgataagcaacttcagcaaagtctcaggatacaaaatcaatgtacaaaaatcacaagcattcttatacaccaacaacagacaaacagagagccaaatcatgggtgaactcccattcacaattgcttcaaagagaataaaatacctaggaatccaacttacaagggatgtgaaggacctcttcaaggagaactacaaaccactgctcaaggaaataaaagaggacacaaacaaatggaagaacattccatgctcatgggtaggaagaatcaatatcgtgaaaatggccatactgcccaaggtaatttacagattcaatgccatccccatcaagctaccaatgactttcttcacagaattggaaaaaactactttaaagttcatatggaaccaaaaaagagcccgcatcgccaagtcaatcctaagccaaaagaacaaagctggaggcatcacactacctgacttcaaacgatactacaaggctacagtaaccaaaacagcatggtactggtaccaaaacagagatatagatcaatggaacagaacagagccctcagaaataatgccgcatatctacaactatcttatctttgacaaacctgagaaaaacaagcaatgggaaaaggattccctatttaataaatggtgctgtgaaaactggctagccatatgtagaaagctgaaactggatcccttccttacaccttatacaaaaatcaattcaagatggattaaagatttaaactttagacctaaaaccataaaaaccctagaagaaaacctaggcattaccattcaggacataggcgtgggcaaggacttcatgtccaaaacaccaaaagcaatggcaacaaaagccaaaattgacaaatgggatctaattaaactaaagagcttctgcacagcaaaagaaactaccatcagagtgaacaggcaacctacaacatgggagaaaattttcgcaacctactcatctgacaaagggctaatatccagaatctacaatgaactcaaacaaatttacaagaaaaaaacaaacaaccccatcaaaaagtgggcgaaggacatgaacagacacttctcaaaagaagacatttatgcagccaaaaaacacatgaagaaatgctcatcatcactggccatcagagaaatgcaaatcaaaaccactatgagatatcatctcacaccagttagaatggcaatcattaaaaagtcaggaaacaacaggtgctggagaggatgtggagaaataggaacacttttacactgttggtgggactgtaaactagttcccgcatattctcactcataggtgggaattgaacaatg

SEQ ID NO: 7834 - DNA, 3465 bp, Homo sapiens
  SIMILAR (67)..(1476): 961254mologous to Homo sapiens putative p150,accession number U93569,Smith-Waterman Score=2359.
tttgaataaagcatctaagagagaacacttgagttcaacagagaagtcacaggaaatactggagacatggaaggagtacaaagagacttagactcccacacattaataatgggagactttaacaccccactgtcaatattagacagatcaacgagacagaaagtcaacaaggatacccaggaattgaactcagctctgcaccaagcggacctaatcgacatctacagaactctccaccccaaatcgacagaatatacatttttttcagcaccacaccatacctattccaaaattgaccacatacttggaagtaaagctctcctcagcaaatgtaaaagaacagaaattataacaaactgtctctcagaccacagtgcaatcaaactagaactcaggattaagactctcactcaaagccactcaactacatggaaactgaacaacctgctcctgaatgactactgggtacataacgaaatgaaggcagaaataaagatgttctttgaaaccaacgagaacaaagacacaacataccagaatctctgggacgcattcaaagcagtgtgtagagggaaatttatagcactaaatgcccacaagagaaagcaggaaagatccaaaattgacaccctaacatcacaattaaaagaactagaaaagcaagagcaaacacattcaaaagctagcagaaggcaagaaataactaaaatcagagcagaactgaaggaaatagagacacaaaaaacccttcaaaaaatcaatgaatccaggagctggttttttgaaaggatcaacaaaattgatagaccgctagcaagactaataaagaaaaaaagagagaagaatcaaatagacacaataaaaaatgataaaggggatatcaccactgatcccacagaaatacaaactaccatcagagaatactacaaacacctctacgcaaataaactagaaaatctagaagaaatggatacattcctcgacacatacactctcccaagactaaaccaggaagaagtcgaatctctgaatagaccaataacaggagctgaaattgaggcaataatcaatagtttaccaaccaaaaagagtccaggaccagatggattcacagccgaattctaccagaggtacaatgaggagctggtaccattccttctgaaactattccaatcaatagaaaaagagggaatcctccctaactcattttatgaggccagcatcattctgataccaaagccaggcagagacacaaccaaaaaagagaattttagaccaatatccttgatgaacattgatgcaaaaatcctcaataaaatactggcaaaccgaatccagcagcacatcaaaaagcttatccaccatgatcaagtgggcttcatccctgggatgcaaggctggttcaatatacgcaaatcaataaatgtaatccagcatataaacaaagccaaagacaaaaaccacattattatctcaaggaagcattccctttgaaaactggcacaagacagggatgccctctctcaccgctcctattccatagtgttggaagttctggccagggcaatcaggcagaagaaggaaataaagggtattcaattaggaaaagaggaagtcaaattgtccctgtttgcagacgacatgattgtttatctagaaaaccccattgtctcagcccaaaatctccttaagctgataagcaacttcagcaaagtctcaggatacaaaatcaatgtacaaaaatcacaagcattcttatacaccaagaacagacaaacagagagccaaatcatgagtgaactcccattcacaattgcttcaaagagaataaaatacctaggaatccaacttacaagggatgtgaaggacctcttcaaggagaactacaaaccactgctcaaggaaataaaagaggacacaaacaaatggaagaacattccatgctcatgggtaggaagaatcaatatcgtgaaaatggccatactgcccaaggtaatttacagattcaatgccatccccatcaagctaccaatgactttcttcacagaattggaaaaaactactttaaagttcatatggaaccaaaaaagagcccgcatcgccaagtcaatcctaagccaaaagaacaaagttggaggcatcacactacctgacttcaaactatactacaaggctacagtaaccaaaacagcatggtactggtaccaaaacagagttatagatcaatggaacagaaaagagccctcagaaataacaccgcatacctacaactatctgatctttgacaaacctgagaaaaacaagcaatggggaaaggattccctatttaataaatggtgctgggaaaactggctagccatatgtagaaagctgaaactggatcccttccttacaccttatacaaaaatcaattcaagatggattaaagatttaaatgttagacctaaaaccataaaaaccctagaagaaaacctaggcattaccattcaggacataggcatgggcaaggacttcatgtccaaaacaccaaaagcaatggcaacaaaagccaaaattgacaaatgggatctaattaaactaaagagcttctgcacagcaaaagaaactaccatcagagtgaacaggcaacctacaacatgggagaaaattttcacaacctactcatctgacaaagggctaatatccagaatctacaatgaactcaaacaaatttacaagaaaaaaacaaacaaccccatcaaaaagtgggtgaaggacatgaacagacacttctcaaaagaagatatttatgcagccaaaaaacacatgaaaaaatgctcatcatcactggccatcagagaaatgcaaatcaaaagcttccagaggaaggatcaggcagcaatatttgctattctgcagcctccactggtgataaccaggcaaacagggtctggagtggacctgaagcaaactccaacagacctgaagctgagggacctaactgttagaagaaaaatgaacaaacagaaagaaagatagagagaaaccagaggagaagttaaaaattctaaaaaccagagcacctctgctcctccaaaggactgcagttccttggccgatcccaaaaaaatacaaactaccatcagagaatactataaacacctctatccaaataaactagaaaatcaagaagaaatggataaatttctggacacatacaccctcccaagattaaaccaggaagaagttgaatctctgaatagaccaataacaggttctgaaattgaggcaataggaaattatcaaagaaataattgaagaaatttacttccaaagaagtaagttttacttctttgcagaattaaagtcttctgcactgagagcttagcaaaatggataaaatggacccataccaagacattcatcatggaatttcacactattggaaatgcaaagattctgcaggcttcttcgtttacggaagta

SEQ ID NO: 7835 - DNA, 1419 bp, Homo sapiens; identical to SEQ ID NO: 5408
  SIMILAR (697)..(1416): 951254mologous to Homo sapiens putative p150,accession number U93572,Smith-Waterman Score=1254.

SEQ ID NO: 7836 - DNA, 1935 bp, Homo sapiens; identical to SEQ ID NO: 4325
  SIMILAR (1)..(1020): 951254mologous to Homo sapiens putative p150,accession number U93563,Smith-Waterman Score=1665.

SEQ ID NO: 7837 - DNA, 3441 bp, Homo sapiens; identical to SEQ ID NO: 3973
  SIMILAR (574)..(1962): 951254mologous to Homo sapiens putative p150,accession number U93563,Smith-Waterman Score=2340.

SEQ ID NO: 7838 - DNA, 1710 bp, Homo sapiens
  SIMILAR (148)..(981): 871254mologous to Homo sapiens putative p150,accession number U93563,Smith-Waterman Score=1243.
atggatgaagctggaaaccatcattctcagcaaactattgcaagaacaaaaaaccaaacgctgcatgttctcactcacagtaaccttaacatctggacgcagacagccccagcaatcctggaggaaaccttggaaatacgcgggtcatcttctatgaagaccacagcagccctgagaaaccaatacagcgttccaatctttaaaagaagtgcaatcaaactagaactcaggattaagaaattcactcaaaaccgctcaactacatggaaactgaacaacctgctgctgaatggctactgggtacataacgaaatgaagggagaaataaagatgttttttgaaaccaacaagaacaaaaacacaacataccagaatctctgggacacattcaaagcagtgtgtagagggaaatttatagcactaaatgcccacaagagaaagcatgaaaggtctaaaattgacaccctaacatcacaattaaaagaactagagaagcaagagcaaacacattcaaaagctagcagaaggcaagaaatgactaagatcagaacagaactgaaggaaatagagacacaaaaaactcttcaaaaaatcaatgaatccaggagctggttttttgaaaagatcaacaaaattgatagaccactagcaagactaataaagaagaaaagagagaagaatcaaatagatgtaataaaaaatgataaaggggatatcaccactgatcccacagaaatacaaactaccatcagagaatactataaacacctctatgcaaataaactagaaaatcaagaagaaatggataaattcctcaacacatacactctcccaagactaaaccaggaagaagttgaatctctgaatagaccaataacaggctctcaaattgaggcaataattaatagcttaccaaccaaaaaaagtccaggaccagatggattcacagccgaattctaccagaggtacaaggaggagctggccacagtaaccaaaacagcatggtactggtaccaaaacagagatatagaccaatggaaaaggacagagctcttagaaataatgccgcacatctacaactatctgatctttgacaaacctgacaaaaagaagaaatggggaaaggattccctatttaataaatggtgttgggaaaactggctagacatatgtagaaagctgaaactggatcccttccttacaccttatacaaaaattaattcaagatggattaaagacttacatgttagacctaaaaccataaaaaccctacaagaaaacctaggcaataccattcaggacataggcgtgggcaaggacttcatgtctaaaacaccaaaagcaatggcaacaaaagccaaaattgacaaatgggatctaatcagactaaagagcttctgcacagcaaaagaaaccaccatcagagtgaacaggcaacctacagaatggaagaaaatttttgcaacctactcatctgacaaagggctagggctaatatccagaatctacaatgaactccaacaaatttacaggaaaaaaacaaacaaccccatcaaaaagtgggtgaaggatatgaacagacacttctcaaaagaagacatttatgcagccaaaaaacacatgggaaaaatgctcatcatcactggccatcagagaaatgcaaatcaaaaccacaatgagataccatccatctcacaccagttagaatga

SEQ ID NO: 7839 - DNA, 2265 bp, Homo sapiens; identical to SEQ ID NO: 2285
  SIMILAR (946)..(2256): 951254mologous to Homo sapiens putative p150,accession number U93574,Smith-Waterman Score=2181.

SEQ ID NO: 7840 - DNA, 2142 bp, Homo sapiens
  SIMILAR (1409)..(1501): 831254mologous to Homo sapiens putative p150,accession number U93569,Smith-Waterman Score=128.
atgggagactttaacaccccactgtcaacattagacagatcaacgagacagaaagttaacaaggatatccaggaattcaactcagctctgcaccaagcggacctaatagacatctacagaactctccaccccaaatcaacagaatatacattcttttcagcaccacaccacacctattccaaaactgaccacatagttggaagtaaagccctcctcagcaaatgtaaaagaacagaaattataacaaactgtctctcagaccacagtgcaatcaaactagaactcaggattaagaaactcactcaaaaccgctcaactacatggaaactgaacaacctgctcctgaatgactactgggtacataacaaaatgaaggcagaaataaagatgttctttgaaaccaatgagaacaaagacacaacataccagaatctctgggacacattcaaagcagtgtgtagagggaaatttatagcactaaatgcccacaagagaaagcagggaagatctaaaattgacaccctaacatcacaattaaaagaactagaaaagcaagagcaaacacattcaaaagctagcagaaggcaagaaataactaagatcagagcagaactgaaggaaatagagacacaaaaaaaccttcaaaaaatcaatgaatccaggggctggttttttgaaaagatcaacaaaattgatagactgctagcaagactaataaagaagaaaagagagaagaatcaaatagatgcaataaaaaatgataaaggggatatcaccaccaatcccacagaaatacaaactaccatcagagaatactataaacacctctacgcaaataaactagaaaatctagaagaaatggataaattcctggacacatacaccctcccaagactaaaccaggaagaagttgaatctctgaatagaccaataacaggctctgaaatcgaggcaataattaatagcttaccaaccaaaaaaagtccaggaccagatggattcacagccgaattctaccagaggtacaaggaggagctgaaaataaaatacctaggaatccaacttacaagggacgtgaaggacctcttcaaggagaacaacaaaccactgctctatgaaataaaagaggatacaaacaaatggaagaacattccatgctcatgggtaggaagaatcaatattgtgaaaatggccatactgcccaaggaaatttacagattcaatgccatccccatcaagctaccaatgactttcttcacagaattggaaaaaactactttaaagttcatatggaaccaaaaaagagcccacattgccaagtcaatcctaagccaaaagaacaaagctggaggtatcacactacctgacttcaaactatactacaaggctacagtaaccaaaacagcatggaatatggatgaagctggaaaccatcattctgagcaaactatcgcaaggatagaaaaccaaacaccgcatgttctcactcacaggtgggaatttaacaatgagaacacttggacacaggctgctgccctcgctaccgcaccgacttcgcccgtgtgctcgcctgcacttgcgctgcccgccatggccaccgcccagccgtcgcaggtgcgccagaagtacgacaccaactgcgacgccgccatcaacagccacatcacgctggagctctacacctcctacctgtacctgtctatggccttctacttcaaccgggacgacgtggccctggagaacttcttccgctacttcctgcgcctgtcggacgacaaaatggagcatgcccagaagctgatgaggctgcagaacctgcgcggtggccacatctgccttcacgatatcaggaagccagagtgccaaggctgggagagcgggctcgtggccatggagtccgccttccacctggagaagaacgtcaaccagagcctgctggatctgtaccagctggccgtggagaagggcgacccccagctgtgccacttcctggagagccactacctgcacgagcaagtcaagaccatcaaagagctgggtggctacgtgagcaacctgcgcaagatttgttccccggaagccggcctggctgagtacctgttcgacaagctcaccctgggcggccgcgtcaaagagacttga

SEQ ID NO: 7841 - DNA, 1794 bp, Homo sapiens
  SIMILAR (529)..(1758): 951254mologous to Homo sapiens putative p150,accession number U93574,Smith-Waterman Score=2078.
atggggaaaaaacagaacagaaaaactggaaactctaaaatgcagagcgcctctcctcctccaaaggaatgcagttcctcaccagcaatggaacaaagctggatggagaatgactttgacgagctgagagaagaaggcttcagactatcaaattactctgagctacaggaggacattcaaaccaaaggcaaagaagttgaaaactttgaaagaaatttagaagaatgtataagtagaataaccaatacagagaagtgcttaaaggagctgatggagctgaaaaccaaggctcgagaactacgtgaagaatgcagaagcctcaggagccgatgcgatcaactggaagaaagggtatcagcgatggaagacgaaatgaatgaaatgaaactaaaccaggaagaagttgaatctctgaatagaccaataacgggagctgaaattgtggcaataatcaatagtttaccaaccaaaaagagtccaggaccagatggattcacagccgaattctaccagaggtacaaggaggaacagctgataagcaacttcagcaaagtctcaggatacaaaatcaatgtacaaaaatcacaagcattcttatacaccaacaacagccaaacagagagccaaatcatgagtgaactcccattcacaattgcttcaaagagaataaaatacctaggaatccaacttacaagggatgtgaaggacctcttcaaggagaactacaaaccactgctcaaggaaataaaagaggatacaaagaaatggaagaacattccatgctcatgggtaggaagaatcaatatcgtgaaaatggccatactgcgcaaggtaatttacagattcaatgccatccccatcaagctaccaatgactttcttcacagaattggaaaaaactactttaaagttcatatggaaccaaaaaagagcccccgtcgccaaggcaatcctaagccaaaagaacaaagctggaggcatcacactacctgacttcaaactatactacaaggctacagtaaccaaaacagcatggtactggtaccaaaacagagatataggtcaatggaacagaacagagccctcagaaataacaccgcatgtctacaactatctgatctttgacaaacctgagaaaaccaagcaatggggaaaggattccctatttaataaatggtgctgggaaaactggctagccatatgtagaaagctgaaactggatcccttccttacaccttatacaaaaatcaattcaagatggattaaagacttaaacgttagacctaaaaccataaaaaccctagaagaaaacctaggcattaccattcaggacataggcatgggcaaggacttcatgtctaaaacaccaaaagcaatggcaacaaaagacaaaattgacaaatgggatctaattaaactaaagagcttctgcacagcaaaagaaactaccatcagagtgaacaggcaacctacggaatgggagaaaacttttgcaacctactcatctgacaaagggctaatatccagaatctacaatgaactcaaactaatttacaagaaaaaaacaaacaaccccatcaaaaagtgggcgaaggacatgaacagacacttctcaaaagaagacatttatgcagccaaaaaacacatgaaaaaatgctcatcatcactggccatcagagaaatgcaaatcaaaaccacagtgagataccatctcacaccagttagaatggcgatcattaaaaagtcaggaaacaacagggacatggatgaagttggaaatcatcattctcagtaa

SEQ ID NO: 7842 - DNA, 1881 bp, Homo sapiens
  SIMILAR (1)..(1128): 941254mologous to Homo sapiens putative p150,accession number U93564,Smith-Waterman Score=1912.
atgagtgaactcccattcacaattgcttcaaagagaacaaaatacctaggaatccaacttacaagggatgtgaaggacctcttcaaggagaactacaaaccactgctcaaggaaataaaagaggatacaaacaaatggaagaacattccatgctcatgggtaggaagaatcaatatcatgaaaatggccacactgcccaacgtactttatagattcaatgccatccccatcaagctaccagtgactttcttcacagaattggaaaaatctactttaaagttcatatggaaccaaaaaagagcccgcatcgccaagtcaatcctaagccaaaagaacaaagctggaggcatcacgctacctgacttcaaactatactacaaggctacagtaaccaaaacagcatggtactggtaccaaaacagagatatagatcaatggaacagaacagagccctcagaaataacgccgcatatctacaactacctgatcgttgacaaacctgagaaacacaagcaatggggaaaggattccctatttaataaatggtgctgggaaaactggctagctatatgtaggaagctgaaaccggatcccttccttacaccttatacaaaaattaattcaagatggattaaagacttaaacgttagacctaaaaccataaaaaccctagaagaaaacctaggtattaccattcaggacataggcatgggcaaggacttcatgtctaaaacaccaaaagcaatggcaacaaaagccaaaattgacaaatgggatctaattaaactaaagagcttctacacagcaaaagaaactaccatcagagtgaacaggcaacctacaaaatgggagaacattttcgcaacctactcatctgacaaagggctaatatccagaatctacaaagaactcaaacaaatttacaagaaaaaaacaaacaaccccatcaaaaagtgggcaaaggacatgaacagacacttctcaaaagaagacatttatgcagccaagaaacacatgaaaaaatgctcatcatcactggccatcagagaaatgcaaatcaaaaccacaacgagatatcatctcacaccacttagaatggcaatcattaaaaagtcaggaaacaacaggattcaaggctggttcaacataagcaaatcaataaacgtaacccatcacacaaacagaaccaaaaacaaaaaccacatgattatctcaatagatgcagaaaaggccttcaataaaattcaataccccttcatgctaaaaactctcaataaattaggtgttgatggaacatatctcaaaacagtaacagctatttatgacaaacccacagtcaatatcatactgaatgggcaaaagctggaagcattccctttgcaaaccagcacaagacaaggatgctctctctcaccactcctattcaacactgtattggaagttctagccagggcaatcaggcaagagaaagaaataaaaggtattcaaataggaggagaggaagtcaaattgtctctgtttgcagatgacatgactgtatatttacaaaaccctatcatctcagcccaaaatctccttaagctgataagcaacatcagcaaggtctcaggatacaaaatcaatgtacaaaaatcacaagcattcttatacaccaataacagacaaacagagagacaaattatgagtgaactcccattcacaattgcttcaaagcgaagaaaatacctaggaatccaacttacaagggatgtgaaggacctcttgaaggagaactacaaaccactgctcaaggaaataagagaggacacaaacaaatggaaaaacattccatattcatggataggaagaatcaatatcgtgaaaatggccatactgccctaa

SEQ ID NO: 7843 - DNA, 2094 bp, Homo sapiens; identical to SEQ ID NO: 6727
  SIMILAR (310)..(1629): 851254mologous to Homo sapiens putative p150,accession number U93563,Smith-Waterman Score=1914.

SEQ ID NO: 7844 - DNA, 2283 bp, Homo sapiens
  SIMILAR (1)..(1605): 941254mologous to Homo sapiens unknown protein,accession number M22333,Smith-Waterman Score=2642.
atgattatctcaatagatgcagaaaaggcctttgacaaaattcaacaacccttcatgctaaaaactctcaataaattaggtatcgatgggacatatttcaaaataataagagctaactatgacaaacccacagccaatatcatactgaatgggcaaaaactggaagcactccctttgaaaaatggcacaagacagggatgccctctctcaccactcctattcaacacagtgttagaagttctggccagggcaattaggcaggagaaggaaataaagggtattcaattaggaaatgtggaagtcaaattgtccctgtttgcagacgacatgattgtatatctagaaaaccccattgtctcagcccaaaatctccttaagctgataagcaaattcagcaaagtctcaggatacaaaatcaatgtacaaaaatcacaagcattcttatacacaaacaacagacaaacagagagccaaatcatgagtgaactcccattcacaattgcttcaaagagaataaaatacctaggaatccaacttacaagggatgtgaaggacctcttcaaggagaactacaaaccactgcttaaggaaataaaagaggatacaaacaaatggaagaacattccatgctcatgggtaggaagaatcaatatcatgaaaatggccatactgcccaaggtaatttacagattcaatgccatccccatcaagctaccaatgcctttcttcacagaattggaaaaaactactttaaagttcatatggaaccaaaaaagagcccgcatcgccaagtcaatcctaagccaaaagaacaaagctggaggcatcacaccacctgacttcaaactatactacaaggctacagtaaccaaaacagcatggtgctggtaccaaaacagagatatagaccaatggaacagaacagagccctcagaaataacgccgcatatctacaactatctgatctttgacaaacctgagaaagacaagcaatggggaaaggattccctatttaataaacggtgctgggaaaactggctagccatatgtagaaagctgaaactggatccgttccttacaccttatacaaaaatcaattcaagatggattaaagacttaaaggttagacctaaaaccataaaaaccctacaagaaaacctaggctttaccattcaggacataggcatgggcaaggacttcatgtctaaaacaccaacagcaatgggaacaaaagacaaaattgacaaatgggatctaattaaactaaagagcttctgcacagcaaaagaaactaccatcagagtgaacaggcaacctacaaaatgggagaaaattttcacaacctactcatctgacaatgggctaatatccagaatctacaatgaactcaaacaaatttacaagaaaaaaacaaacaaccccatcaaacagtgggcaaaggacatgaacagacacttctcaatagaagacatttatgcagccaaaaaacacatgaaaaaatgttcatcgtcactggccatcagagaaatgcaaatcaaaaccacaatgagataccatctcacaccagttagaatggcaatcattaaaaagtcaggaaacaacagaaatcatcttgacttcaagcacattagaattctcggtatttgttatctggctagaagatttatcagccatgactacatctggtttcaagaaacagaaaacctgaaaaactatcgcctaaacaagcagcaggttttccttatcgttagtctacttgccctgaaagtagtacagatatgtaaatacctgagaggacctgcttatggcactgttagtagaccacagttgctgaaaatttccatttacagaataaacagcatagagaagaccttaaatgacctgatggagctgaaaaccatggtacgagaaatacgtgacgcatgcacaagcttcagtagccaattcaatcaagtggaagaaaggaaccaaagacaaattgtctcagtagatgaagaaaaagcctttgataaaattcaacagcgcttcatgctaaaaacgctcaataaactagaccctagcgagcggagacacaagcagctgggcgtcaagagaaacacaccagccgaagaacacacaagtggccgggcgtcgagaggaacacatcggtggaagagcacagcgacaggcgccggcagactgcggcaggccatcgaccggtggaacgacgcggggattgaccgaggcggactccggggggacaaccagccccttctggcctccccagccaccaccactcaatag

SEQ ID NO: 7845 - DNA, 2709 bp, Homo sapiens
  SIMILAR (913)..(2145): 861254mologous to Homo sapiens unknown,accession number AF149422,Smith-Waterman Score=1862.
atgggagactttaacaccccactgtcaacattagacagatcaacgagacagaaagtcaacaaggatacccaggaattgaactcagctctgcaccaaccagacctaatagacatctacggaactctccaccccaaatcaacagaatatacatttttttcagcaccacaccacacctattccaaaattgaccacatacttggaagtaaagctctcctcagcaaatgtaaaagaacagaaattataacaagctatctctcagaccacagtgcaatcaaactagaactcaggattcagaatctcactcaaaaccactcaactacatggaaactgaacaacctgctcctgaatgactactggttacataacgaaatgaaggcagaaataaagatgttctttgaaaccaacgagaacaaagacacaacataccagaatctctgggatgccttcaaagcagtgtgtagagggaaatttatagcactaaatgcccacaagagaaagcaggaaagatccaaaactaacaccctaacatcgatcaacaaaattgatagaccactagcaaggctaataaagaaaaaaagagagaagactcaaatagatgcaataaaaaatgataaaggggatatcaccaccgatcccacagaaatgcaaactaccatcagagaatactacaaacacctctatgcaaataaactagaaaatctagaagaaatggataaattcctcaacacatacactctcccaagactaaaccaggaagaagttgaatctctgaatagaccaataacaggagctgaaattgtggcaataatcaatagcttaccaaccaaaaagagtccaggaccagatggattcacagccgaattctaccagagttgcttcaaagagaataaaatacctaggaatccaacttacaaggatgtgaaggacctcttcaaggagaactacaaaccactgctcaatgaaataaaagaggatacaaacaaatggaagaacattccatgctcatggataggaagaatcaatatcgtgaaaatggccatactgcccaaggtaatttacagattcaatgccatccccataaagctaccaatgactttcttcacagaagtggaaaaaactactttaaagttcatatggaaccaaaaaagagcccgcatcgccaagtcaatcctaagccaaaagaacaaagctggaggcatcatgctatctgacttcaaactatactacaaggctacagtaaccaaaacagcatggtactggtaccaaaacagagatatagatcaatggaaaagaacagagccctcagaaataatgccgcatatctacaactatctaatctttgacaaacctgagaaaaacaagcaatggggaaaggattccttatttaataaatggtgctgggaaaactggctagccatatgtagaaagctgaaactggatcccttccttacaccttatacaaaaatcaattcaagatggattaaagacttaaacattagacctaaaaccataaaaaccctagaagaaaacctaggcattaccattcaggacataggcacgggcaaggacttcatgtctaaaacaccaaaagcaatggcaacaaaagccaaaattgacaaatgggatctaattaaactaaagaacttctgcacagcaaaagaaactaccatcagagtgaacaggcaacctacaaattgggagaaaatttttgcaacctacccatctgaccaagggctaataaccagaatctacaatgaactcaaacaaatttacaagaaaaaaacaaacaaccccatcaaaaagtgggcaaaggacatgaacagacacttctcaaaagaagacatttatgcagccaaaaaacacatgaaaaaatgctcagcatcactggccatcagagaaatgcaaatcaaaaccacaatgagataccatctcacaccagttagaatggcaatcattaaaaagtcaggaaataacaggtcctcaatggattggatgatgtccagctgtttaggtgaaataaacagccatgttgctcacacaaagcctgtttggtggtctcttcatacagacgtgcatgaagtttggtgtcgtgactcggattgggggacctcccttgggagatcaatcccccgtcctcctgctctttgctccgtgagaaagatccgcctacgacctcaggtcctcagacctaccagcccaagaaacatctcaccaatttcaaatccgcatgctttgaaaggattaaagcctgttatcactcgcctgctaaagcatggccttttaaagcctataaactctccttacaattcccccattttacctgtcttaaaaccagacaagccttacaagttagttcaggatctatgccttatcaaccaaatggttttgcctatccaccccatggtgccaaacccatatactctcctatcctcaatacctccctccacaatccattattctgttctggatctcaaacgtgctttctttactattcctttgcacccgtcatcccagcctctcttcgctttcacttgcactgaccctgacacccatcaggctcagcaaattacctgggctgcactgccgcaaggcttcacagacaacccccattacttcagtcaagcccaaatttcatcctcatctgttacctatctcaacataattctcgtaaaaacacacgtgctgtccctgctgatcatgtccagctga

SEQ ID NO: 7846 - DNA, 1593 bp, Homo sapiens
  SIMILAR (1533)..(1592): 761254mologous to Homo sapiens putative p150,accession number U93574,Smith-Waterman Score=93.
atggggaaaaagcagaacagaaaaactggaaactctaaaaagcagagcacctctcctcctccaaaggaacgcagttcctcaccagcaatggaacaaagctggatggagaatgactttgttgagctgagagaagaaggcttcagacgatcaaattactctgagctacaggaggacattcaaaccaaaggcaaagaagttgaaaactttgaaaaaaatttagaagaatgtatgactagaataaccaatacagagaagtgcttaaaggagctgatggagctgaaaaccaaggctcgagaactacatgaagaatgtagaagcctcaggagccgatgcgatcaactggaagaaagggtatcagcaatggaagatgaaatgaatgaaatgaagcgagaagggaagtttagagaaaaaagaataaaaagaaatgagcaaagcctccaagaaatatgggactatgtgaaaagaccaaatctacatctgatgggtgtacctgaaagtgatggggagaatggaagcaagttggaaaacacgctgcaggatattatccaggagaacttccccaatctagcaaggatcaacaaaattgatagaccgctagcaagactaataaagaagaaaagagagaagaatcaaatagacacaataaaaaatgataaaggggatatcaccaccaatcccacagaaatacaaaccaccatcagagaatactacaaacacctctacgcaaataaactagaaaatctagaagaaatggatacattcctggacacatacactctcccaagactaaaccaggaagaagttgaatctctgaatagaccaataacaggagctgaaattgtggcaataatcaatagcttaccaaccaaaaagagtccaggaccagatggatccatagctgaattctaccagaggtacaaggaggaactgctgataagcaacttcagcaaagtctcagcatacaaaatcaatgtacaaaaatcacaagcattcttatacaccaacaacagacaaacagagagccaaatcatgagtgaactcccattcacaattgcttcaaagagaataaaatacctaggaatccaacttacaagggatgtgaaggacttcttccaggagaattacaaaccactgctcaaggaaataaaagaggatacaaacaaacggaagaacattccatgctcatgggtaggaagaatcaatatcgtgaaaatggccatactgcccaaggtaatttttagattcaatgccatccccatcaagctaccaatgcctttcttcacagaattggaaaaaactactttaaagttcatatggaaccaaaaaagagcccgcatcgccaagtcaatcctaagccaaaagaacaaagctggaggcatcacactacctgacttcaaactatactacaaggctacagtaaccaaaacagcatggtactggtaccaaaacagggatatagatcaatggaacagaacagagccctcagaaataatgccgcatatctacaactatctgatctttgacaaacctgagaaaaacacgcaatggggaaaggttccctatttaataaatggtgctgggaaaactggctag

SEQ ID NO: 7847 - DNA, 2337 bp, Homo sapiens; identical to SEQ ID NO: 2287
  SIMILAR (2292)..(2336): 601254mologous to Homo sapiens putative p150,accession number U93565,Smith-Waterman Score=55.

SEQ ID NO: 7848 - DNA, 1677 bp, Homo sapiens
  SIMILAR (1587)..(1676): 431254mologous to Homo sapiens putative p150,accession number U93563,Smith-Waterman Score=60.
atgggagactttaacaccctactgtcaatattagacagatcaacaagacagaaggttaacaaggatatccaggacttgaactcagctctgcaccaagcagacctaatagacatctacagaaccctccaccccaaatcaacagaatatacattcttctcagcaccacatcgcacttattccgaaattgaccacatagttggaagtaaagcactcctcaccaaatgtaaaagaacagaaatcacagcaaactgtctctcagaccacagtgcaatcaaattagaactcaggattaagaaactccctcaaaaccacacaactacatggaaactgaacaacctgctcctgaatgactactgggtaaataacaaaatgaaggcagaaataaagatgttctttgaaaccaatgagaacaaagacacaatgtaccagcatctctgggacacatttaaagcagtgtgtagagtgttggaaattctggccagggcaatcaggcaagagaaagaaataaagggtattcaattaggaaaagaggaagtcaaattatccctgtttgcagatgacatgattgtatatttagaaaaccccaacgtctcagcccaaaatctccttaagctgataagcaacttcagcaaagtctcaggatacaaaatcagtgtgcaaaaatcacaagcattcctatacacaaataacagaaaaacagagagccaaatcacgagtgaactcccattcacaattgctacaaagagaataaaatacctaggaatgcaacttacaagggatgtgaaggacctcttcaaggagaactacaaaccactgctcaacaaaataaaggaggtcacaaacaaatggaagaacattccctgctcatggatgggaagaatcaatatcgtgaaaatggccatactgcccaagataatttacagattcaatgccattcccatcaagctgccaatgattttcttcacagaattggaaaaaactactttaaagttcatatggaaccaaaaaagagcccacataaccaagacaatcctaagcaaaaagaacaaagctggaggcatcacgctacctcacttcaaactatactacaagactacagcaaccaaaacagcatggtactggtaccaaaacagagatatagaccaagggaacagaacagaggcctcagaaatgacaccacacatctacaaccatctgatccttgacaaacctgacaaaaacaagaaatggggaaaggattccctatttaataaatggtgctgggaaaactggctagccatatgtagaaagctgaaactggatcccttccttacgccttatacaaaaattaattcaagatggattaaagacttaaatgatagacctaaaaccataaaagccctagaagaaaacctaggcaataccattcaggacataggcatgggcaaggacttcaagactaaagcaccaaaagcaatggcaacaaaagccaaaattgacaaatgggatctaattaaacaaaagagcttctgcacagcaaaagaaactaccatcagagtgaacaggcaacctacagaatgggagaaaaattttgcaatctacccatctcacaaaaggctaatatccagaatctttaaagaacttaaacaaatttacatgaaaaaaacaaccccatcaaaaagtgggcaaaggatatga

SEQ ID NO: 7849 - DNA, 1722 bp, Homo sapiens
  SIMILAR (187)..(1002): 851254mologous to Homo sapiens putative p150,accession number U93569,Smith-Waterman Score=1161.
atggccgggtacccctctgagatgaagcttccagaggaactatcaggcagcaacatttgctgttcagcagtattcactgttctgcagcctctgctgctgatacccaggcaaacagggtctggagtggacctccggcaaactccaacagacctgcagctgagggtcctgactgttagaaggaaaaataacaaacagaaaaggacatctacaccaaaaccccatctgtacgtcaccatcatcaaagaccaaaggagtaagaaactcactcaaaaccactcaactacatggaaactgaacaacctgctcctgaatgactactgggtaaataacgaaatgaaggcagaaataaagatgttctttgaaaccagtgagaacaaaggcacaatataccagaatctctgggacacatttaaagcagtgtgtagagggaaatttatagcactaaatgcccacaagagaaaacaggaaagatctaaaattgacaccctaacatcacaattaaaagaactagagaagcaagagcaaacacattcaaaagctagcagaaggcaagaaataactaagatcagagcagaacagaaggagatagagacccaaaaaacccttcaaaaaatcaatgaatccaggagctgcttttttgaaaagatcaacaaaattgatagactgctagcaagacgaataaagaagaaaagagagaagaatcaaatagatgcaataaaaaatgataaaggggatatcaccgccgatcccacagaaatacaaagtaccatcagagaatactataaacacctctacacaaataaactagaaaatctagaagaaatggataaattcctggacacatacaccctcccaagactaaaccaggaggaagatgaatccctgaatagaccaataacaggctctgaaattgaggcaataattaatagcttaccagcgaaaaaaagtccaggaccagacagattcacagccgaattctaccagaggtacaaggaggagctgcacataaacaggaccaaagacaaaaaccacatgactatctcagtagatgcagaaaacgcctttgacaaaattcaacaacccttcatgctaaaaactctcaataaattagtgttggaagttctggccagggcaatcaggcaggagaaggaaataaagggtattcaattaggaaaacaggaagtcaaattgtccctgtttgcagatgacgtgattgtatatctagaaaaccccatcgtctcagcccaaaatctccttaagctgataagcaacttcagcaaagtctcaggatacaaaatcaatgtgcagaaatcacaggcattcctatacagcaataacaggcaaacagagagccaaatcatgaatgaactctcattcacaattgcttcaaagagaataaaatacctaggaatccaacttacaagggatgtgaaggacctcttcaaggagaactacaaaccactactcaatgaaataaaagatgatacaaacaaatggaagaacattccatgctcatgggtaggaagaatcaatattgtgaaaatgggcatactgcccaaggtagtttatagattcaatgccatccccatcaagctaccaatgactttcttcacagaattggaaaaaaactactttaaagttcatatggaaccaaaaaagagcccgcattgccatgacaatcctaagctaaaagaacaaagctggaggcatcacgctacctga

SEQ ID NO: 7850 - DNA, 2313 bp, Homo sapiens
  SIMILAR (976)..(2310): 881254mologous to Homo sapiens putative p150,accession number U93574,Smith-Waterman Score=2196.
atgaacatcgatgcaaaaatcctcaataaaatactggcaaaccgaatccagcagcacatcaaaaagcttatccaccatgatcaagtgggcttcatccctgggatgcaaggctggttcaacatacgaaaatcaataaacatagtccagcatataaacagaaccaatgacaaaaaccacatgattatctcaatagatgcagaaaaggcctttgacaaaattcaacaacgcttcatgctaaaaactctcaataaattaggtattgatgggacgtatctcaaaataataagagctatctatgacaaatccacagccaatattgtactgaatgggcaaaaactggaagcattccctttgaaaactggcacaagacagggatgccctctctcaccacttctattcaacatagtgttggaagttctggccagggcaatcaggcaggagaaggaaataaagggtattcaattacgaaaagaggaaatcaaattgtccctgtttgcagatgacatgattgtacatctagaaaaccccattgtctcagcccaaaatctccttaagctgatagacaatttcagcaaagtctcaggatacaaaatcaatgtgcaaaaatcacaagcattcttatacaccaataacagacaaacagagagccaaatcatgagtgaactcccattcacaattgcttcagagagaataaaatacctaggaatacaacttacaagggacgtgaaggacctcttcaaggagaactacaaaccactgctcaatgacataaaagaggatacaaacaaatggaagaacactccacgctcatgggtaggaagaatcaatatcatgaaaatggccatactgcccaaggtaatttatagattcaatgccatccccatcaagctaccaatgactttcttcacagaattggaaaaaactactttaaagttcatatggaaccaaaaaggagcccgcattgccaagtcaatcctaatttatagattcaatgcccaagaattggaaaaaactactttaaagttcatatggaaccaaaaaggagcccgcattgccaagtcaatcctaagccaaaagaacaaagctggaggcatcacgctacctgacttcaaactatactacaaggctacagtaatcaaaacagcatggtactggtaccaaaacagagatatagaccaatggaacagaacagagccctcagaaataatgccacatatctacaaccatctgatctttgacaaacctgacaaaaacaagaaatggggaaatgattccctatttaataaatggtgctgggaaaactggctagccatatgtagaaagctgaaactggatcccttccttataccttatacaaaaattaattcaagatggattaaagacttaaatgttagacctaaaaccataaaaaccctagaagaaaacctaggcaataccattcaggacatagccatgggcaaggactttatgtctaaaacaccaaaagcaatggcaacaaaagccaaaattgacaaatgggatctaattaatctaaagagcttctgcacagcaaaagaaaccaccatcagagtgaacaggcaacctatagaatgggagaaaatttttgcaatctactcatctgacaaagggcgaatatccagaatctacaatgaactcaaacaaatttacaagaaaaaaacaaacaaccccatcaaaaagtgggcaaaggatatgaacagacacttctcaaaagaagacatttatgcagccaaaagacacatgaaaaaatgctcatcatcactggccattagagaaatgcatatcaaaaccacaatgagacaccatctcacatcagttagaatggcgatcattaaaaagttaggaaacgactggtgctggaggggatgtggagaaataggaagacttttacactgttggtgggactgtaaactagttcaaccattgtggaagtcagtgtggcgattcctcagggatctagaactagaaacaccatttgacccagccagcccattactgggtatacacccaaaggattatagatcatgctgctataaagacacatgcacacgtatgtttactgcagcactattcacaatagcaaagacttggaaccaacccaaatgtccatcaatgatagactggattaagaaaatgtggcacatatacaccatggaatactatgcagccataaaaaaggatgagttcatgtcctttgcagggacatggataaagctggaaaccatcattctcagcaaactatcgcaaggacaaaaaaccaaacaccacatgttctcactcatagatgggaattga

SEQ ID NO: 7851 - DNA, 791 bp, Homo sapiens
  SIMILAR (198)..(698): 891254mologous to Homo sapiens unknown protein,accession number M22334,Smith-Waterman Score=806.
ttattagacagtctacatactttattgaaagtcacatgaatgagccccaggatctcgtttgttttattatttggatatagcatatgtctttcacacaggcaatctttctagccctctactaatgtccttggcatcaagtgcttcatttcccccaggaaaatgaaggcttttctttatcgaaaacttatctttaaggtatcttgtccttcgcgaaggacatgaacagacacttctcaaaagaagacatttatgcagccaaaaaacacatgaagaaatgctcatcatcactggccatcagagaaatgcaaatcaaaaccactatgagatatcatctcacaccagttagaatggcaatcattaaaaagtcaggaaacaacaggtgctggagaggatgcggagaaataggaacacttttacactgttggttggactgtaaactagttcaaccattgtggaagtcagtgtggcgattcctcagggatctagaactagaaataccatttgacccagccatcccattactgggtatatacccaaatgagtataaatcatgctgctataaagacacatgcacacgtatgtttattgcggcactattcacaatagccaagacttgtgaaccacccaaatgttccaacatgatagactggattaagaaatgtggcacaatacaccagggatactatgcggcctaaaaatgatgaggtccaatccttggtagggcatgggtgaattgggaaaccaccttctcagtaactatcgcggtacaaaaaccaacacggctttctcac

SEQ ID NO: 7852 - DNA, 987 bp, Homo sapiens
  SIMILAR (635)..(787): 881254mologous to Homo sapiens putative p150,accession number U93563,Smith-Waterman Score=236.
atgttctttgaaaccaacgagaacaaacacacaacataccagaatctctgggacgcattcaaagcagtgtgtagagggaaatttatagcactaaatgcccacaagagaaagcaggaaagatccaaaattgacaccctaacatcacaattaaaagaactagaaaagcaagagcaaacacattcaaaagctagcagaaggcaagaaataactaaaatcagagcagaactgaaggaaatagagacacaaaaaacccttcaaaaaattaatgaatccaggagctggttttttgaaaggatcaacaaaattgatagaccgctagcaagactaataaagaaaaaaagagagaagaatcaaatagatgcaataaaaaatgataaaggggatatcaccaccgatccaacagaaatccaaactaccatcagagaatactacaaacacctctgcgcaaataaactagaaaatctagaagaaatggataaattcctcgacacctacactctcccaagactaaaccaggaagaagttgaatctctgaatagaccaataacaggatctgaaattgtggcaataatcaatagcttaccaactaaaaagagtccaggaccagatggattcacagccgaattctaccagaggaatccaacttacaagggatgtgaaggaactcgtcaaggagaactacaaatcactgctcaaggaaataaaagaggttacaaacaaatggaagaacattccatgctcatgggtaggaagaatcaatatcatgaaaatggccatacggcccaaggaatccaacttacaagggacgtgaaggaccccttcaaggagaactacaaaccactgctcaatgaaataaaaggatacaaacaaatggaagaacattccatgctcatgggtaggaagaatcaatatcatgaaaatggccatactgcccaagatgccttggcggctaatcaacaaaagccattgaaagacttaatcctctaa

SEQ ID NO: 7853 - DNA, 2079 bp, Homo sapiens
  SIMILAR (1)..(1710): 741254mologous to Homo sapiens putative p150,accession number U93563,Smith-Waterman Score=2099.
atgggagactttaacaccccactgtcaacattagacagaccaacgagacagaaagttaacaaggatatccaggaactgaactcagctctgcaccaagcggacctaatagacatctacagaactctccaccccaaatcaacagaatatacattttttttggcaccacaccacacctattccaaaattgaccacatacttggaagtaaagctctcctcagcaaatgtaaaagaacagaaattataacaaactatctctcagaccacagtgcaatcaaactagaactcaggattaagaaactcactcaaaaccgctcaactaaatggaaactgaacaacctgctcctgaatgactactgggtacataatgaaataaaggcagaaataaagatgttctttggaaaaaatgagaacaaagacacaacataccagaatctctgggacacattcaaagcagtgtgtagagggaaatttatagcactaaatgcccacaagagaaagcaggaaagatctaaaattgacaccctaacatcacaattaaatgaactagaaaagcaagagcaaacacattcaaaagctagcagaaggcaagaaataactaagatcagagcagaacagaaagaaatggagacacaaaaagcccttcaaaaaatcaatgaagccaggagctggttttttgaaaagatcaacaaaattgatagactcctagcacgactaataaagaagaaaagagagaagaatcaaatagacacaattaaaaatgataaaggggatatcaccactgatcccacagaaatacaaactaccatcagagaatactacaaacacctctatgcaaataaactagaaaatccggaagaaatggataaattccttgacacatacactctcccaagactaaaccaggaagaagttgaatctctgaatagaccaataacaggatctgaaattgaggcaataattaatagcttaccaaccaaaaaaagtccaggaacagatggattcacagccgaattctaccagaggtacaaggaggagctagtaccattccttttgaaacgattccaatcaatagaaaaagagggaatcctccctaactcattttatgaggccagcatcatcctgataccaaagcatggcagagacacaacaaaaaaagagaattttagaccaatatacctgatgaacatcgatgcaaaaatcctcaataaaatactggcaaaccgaatccagcagcacatcaaaaagcttatccactatgatcaagtgggcttcatccctgggatgcaaggcagggcaatcaggcaggagaaggaaataaagggtattcaattaggaaaagaggaagtcaaattgtccctgtttgcagatgacatgattgtgtatctagaaaaccccatcgtctcagcccaaaatctccttaagctgataagcaacttcagcaaagtctcaggatacaaaatcaatgtgcaaaaaccacaagcattcttatacaccaataacagacaaacagagagccaaatcatgagtgaactcccattcacaattgcttcaaagagaataaaaaacctaggaatccaacttacaagggatgtgaaggacctcttcaaggagaactacaaaccactgctcaatgaaataaaagaggatacaaacaaatggaagaacattccatgctcatgggtaggaagaatcaatatcatgaaaatggtcatactgcccaaggggcttgctcctgcagacaaactgggagccgttctaaaggagagggtcacatttccaacacagctaataaagtggcatgcccaggatgcaggaaagggggcacagtgtgactgcggagtggtgatctgcagccgagtggcattgctgacaagcagacatcaccctatcctaccatctgactcacagaactgtaaagaattccaagttttcaccaaattaaatgcaaacagtaaaaagagaagcgctcaacagaagcattacaaagatgaggttctggccctgcttctgccacttgccccagcccatctagcaggctgtcatgatgctcagacacagagtcagcagcagcagggctag

SEQ ID NO: 7854 - DNA, 1875 bp, Homo sapiens
  SIMILAR (820)..(1872): 871254mologous to Homo sapiens putative p150,accession number U93565,Smith-Waterman Score=1668.
atggagctgaaaaccatggtacaagaactacgtgacacaagcacaagcttcagtagccaatttgatcaagtggaagaaagggtatcagagattgaagatcaaatgaatgaaatgaaaaccaatgacaaaaaccacatgactatctcaatagatgcagaaaaggccttcaacaaaattcaacagccattcatgctaaaaactctcaataaactaggtattgatgtgacatatctcaaaataataagagatatttatggcaaacccacagccaatatcatactgaatgggcaaaaactgggagcattccctttgaaaactggcacaagacagggatgccctctcccaccactcctattcaatgtagtgttggaagttctggccagggcaatcaggcaggagaaagaaatgaagaatattcaattagaaaaagaggaagtcaaattgtccctgtttgcagatgacatgattgtatatttagaaaaccccatcatcttagccccaaatctccttaagctgataagcaacttcagcaaagtctcaggatacaaaacccatgtgcaaaaatcacaagcattcttatacaccaataacagacaaacagagagccaaatcacgagtgaactcccattcgcaattgcttcaaagagaataaaatacctaggaatccaacttacaagggatgtgaaggacctcttcaaggagaactacaaaccacagctcaacgaaataaaagaggacacaaacaaatggaagaacattccatgctcatggataggaagaatcaatattgtgaaaatggccatattgcccaagaattggaaaaaaactactttaaagttcatatgggaccaaaaaagagcctgcattgccaagactatcctaagcaaaaagaacaaagctggaggcatcacactacgtgacttcaaactatactacaaggctacagtaaccaaaacagcatggtactggtaccaaaacagagatatagaccaatggaacagaatagagccctcaaaaattataccacacatctacaaccatctgatctttgacaaatctgataaaaacaagcaatggggaaaggattccctatttaataaatggttctgggaaaactggctagccatatgtagaaagctgaaactggatcccttccttacaccttatacaaaaattaattcaagatggattaaaaaagtaaatgttagacctaaaaccataaaaaccctagaagaaaacctaggcaataccaatcaggccacaggcatgggcaaggacttcatgactaaaacaccaaaagcaatggcaacaaaagccaaaattgacaaatgggatctaattaaactaaagaacttctgcacagcaaaagaaactaccatcagagtcaacaggcacactacagaatgggagaaaatttttgcaatctactcatctgacaaagggctaatatccagaatctacaatgaactcaaacgaatttacaagaaaacaaacaaccccatcagaaagtgggtgaaggatacgaacagacatttctcaaaagaagacatttatgcagccaaaagacacatgaaaaaatattcatcatcactggccatcagagaaatgcaaatcaaaaccacaatgagataccatctcacaccagttagaatggcgatcattcaaaagtcaggaaacaacaggtgctggagaggatgtggagaaatagaaatgcttttacactgttggagggaccgtaaactagttcaactattgtggaagacagtgtggcgattcctcaaggatctagaactagaaataccatttgacccagccatcccattactggacatatacccaaaggactataaatcatgctgctataaagacacatga

SEQ ID NO: 7855 - DNA, 3309 bp, Homo sapiens
  SIMILAR (2083)..(3291): 931254mologous to Homo sapiens putative p150,accession number U93574,Smith-Waterman Score=1983.
atgaatgctggcaagggtatggagaaaggggaacccttttacactgctgattcagagaagactctgagaaatgtttgtggggaatctggtgatgcagtgacacaagggctgagattccctgaatctgcacaacgagtatcgcacccactgcttcagctcaggtttgggggcaatgtgagcccagctgcacaagctgaccacctggtgctctgcccacaggatgtttccagattactattggcagaattgcccaggtttgcaggggcagaggggctctctgacaattcacttctcagcagtttgtcacattgttctgatagtatcagcagtgatgaggaggagctaaggactttgggaagcagtggtagcgaaagcagtactccagagaatgtcggacctcctttcctcatggatgagaacagttggttcaacaagtgtaagagagttaaacaaaagtatcagcttaccctggaacagaagggttaccttgaagaactcttacgacttcgagagaaccaactatctgaatctgtctcccagaataaaatactacttcaaaggattgaagattccgatctggctcataaactggagaaggaacaattagaatatataattgtggagcttcaagatcagctgaacagacctaaccagctagatttgttccaagctttctgtgctgaaattgcggggctgtcccaagtgttccaggccatggggctccctcaagcagaagggttgaacaccagctgtgctggggaagctaaactgctcccaggtcactggcaaaacactcaggcggggcagtgcaggctgtgctctgtgcaccctcttacaggaatggcgaggcagaacagtgaagacaaaagcactcaccatcttaatattcacaggactgtgctaaagaataatgatttaagatcgagacaagagttaactgcccatctcaccaaccagtggccttctccaggagctctggatgtcaatgctgttgccttggatacgttgctttaccgaaaacacaataaacagtggtatgagaaaagttatcaaagtcttgaccagttatcagcagaagttagcctttctcagacttcactagatccaggccagtcacaagaaggagatggaaaacaagacacattaaatgtaatgagtgaagcaccacaccacacctattccaaaattgaccacatagttggaagtaaagcactcctcagcaaatgtaaaagaacagaaactacaacaaactgtctctcagaccacagtgcaatcaaactagaactcaggactaagaaactcactcaaaaccgctcaactacatggaaactgaacaacctgctcctgagtgactactgggtacataacgaaatgaaggcagaaataaagatgttctttgaaaccaacgagaacaaagacccaacataccagaatctctgggacacattcaaagcagtgtgtagagggaaatttatagcactaaatgcccacaagagaaagcaggaaagatccaaaattgacaccctaacatcacaattaaaagaactagaaaagcaagagcaaacacattcaaaagctagcagaagaccaataacaggatctgaaattgtgacaataatcaatagcttaccaaccaaaaagagtccaggaccagatggattcacagctgaattctaccagaggtacaaggaggaactggtaccattccttctgaaactattccaatcaatagaaaaagagagaatcctccctaactcattttatgaggccagcatcatcctgataccaaagccgggcagagacacaaccaaaaaagagaattctagaccaatatccttgatgaacattgatgcaaaaatcctcaataaaatactagcaaaccgaatccagcagcacatcaaaaagcttatccaccatgatcaagtgggcttcatccctgggatgcaaggctggttcaacatacgcaaatcaataaatgtaatccagcatataaacagaaccaaagacaaaaaccacatgattatctcaatagatgcagaaaaggcctttgacaaaattcaacagcccttcatgctaaaaactctcaataaattagtgttggaagttctggccagggcaattaggcaggagaaggaaataaagggtattcaattaggaaaagaggaagtcaaattgtccctgtttgcagatgacatgattgtatatctagaaaaccccattgtctcagcccaaaatctccttaagctgataagcaacttcagcaaagtctcaggatacaaaatcaatgtacaaaactcacaagcattcttatacaccaataacagacaaacagagagcgaaatcatgagtgaactcccattcacaattgcttcaaagagaataaaatacttaggaatccaacttacaagggatgtgaaggaccttttcaagcagaactacaaaccactgctcaatgaaataaaagaggatacaaacaaatggaagaacactccatgctcatgggtaggaagagtcaatattgtgaaaatggccatactgcccaaggtaatttacagattcaatgccacccccatcaagctaccaatgactttcttcacagaattggaaaaaactactttaaagttcatgtggaatcaaaaaagagcccgcatcgccaagtcaatcctaagccaaaagaacaaagccagaggcatcacgctacctgacttcaaactatactacaatgctacagtaaccaaaacagcatggtactggtaccaaaacagagatatagatcaatggaacagaacagaaccctcagaaataatgccgcatatctacaaccatctgatctttgacaaacctgacaaaaaccagcaatggggaaaggattccctatttaataaatggtgctgggaaaactggctagccatatgtagaaagctgaaactggatcccttccttacaccttatacaaaaattaattcaagatggattaaagacttacatgttagacctgaaaccataaaaaccctagaagaaaacctaggcaataccattcaggacataggcatgggcaaggacttcatgtctaaaacaccaaaagcaatggcaacaaaagccaaaattgacaaatgggatctaattaaactaaagagcttctgcacagcaaaagaaactaccatcagagtgaacaggcaacctacaaaatgggagaaaatttccgcaacctactcatctgacaaaggactaatatccagaatctacaatgaactcaaacaaatttacaagaaaaaaacaaccccatcaaaaagtgggcgaaggacatga

SEQ ID NO: 7856 - DNA, 3213 bp, Homo sapiens; identical to SEQ ID NO: 2322
  SIMILAR (1)..(1821): 851254mologous to Homo sapiens putative p150,accession number U93563,Smith-Waterman Score=2589.

SEQ ID NO: 7857 - DNA, 1364 bp, Homo sapiens; identical to SEQ ID NO: 6918
  SIMILAR (1)..(1224): 941254mologous to Homo sapiens unknown,accession number AF148856,Smith-Waterman Score=1971.

SEQ ID NO: 7858 - DNA, 3252 bp, Homo sapiens; identical to SEQ ID NO: 6598
  SIMILAR (595)..(2109): 891254mologous to Homo sapiens putative p150,accession number U93563,Smith-Waterman Score=2297.

SEQ ID NO: 7859 - DNA, 2760 bp, Homo sapiens
  SIMILAR (1432)..(2619): 881254mologous to Homo sapiens putative p150,accession number U93563,Smith-Waterman Score=1863.
atgggagactttaacaccccactgtcaacattagacagatcaacgagacaggaagttaacaaggatacccaggaattgaactcagctctgcaccaagtggacctaatagacatctacagaactctccaccccaaatcaacagaatatacattcttttcagcaccacactacacctactccaaaattgaccacatagttggaagtaaagcactcctcagcaaatgtaaaagaacagaaattataacaaactgtctctcagaccacagtgcaatcaaactagaactcaggattaagaaactcactcaaaaccactcaactacatggaaactgaacaacctgctcctgaatgactactgggtaaataatgaagtgaaggcagaaataaagatgttctttgaaaccaacgagaacaaagacacaacataccagaatctctgggacacattcaaagcaatcaacaaaattgatagaccactagcaagactaataaagaagaaaagagagaagaatcaaatagatgcaataaaaaatgataaaggggatatcaccaccaatcccacagaaatacaaactaccatcagagaatattataaacacctctacgcaaataaactagaaaatctagaagaaatggataaattcctcgacacatacatcctcccaagactaaaccaggaagaagttgaacctctgaatagaccaataacaggctctgaaattgaggaaataatcaatagcttaccaaccaaaaaaactccaggaccagatggattcacagccgaattctaccagaggtacaaagaggagctggtaccaatccttctgaaactattccaatcaatagaaaaagagggaatcctccctaactcattttatgaggccagcatcatcctgataccaaagcctgacagagacacaaccaaaaaagagaatttcagaccaatatccctgatgaacatcgatgtaaaaatcctcaataaaatactggcaaaccgaatccagcagcacatcaaaaagcttatccaccatgatcaagtgggcttcatccctgggatgcaaggctggttcaacatacgcaaatcaataaatgtaatccagcatataaacagaaccaaagacaaaaaccacatgattatctcaatagatgcagaaaaggcctttgacaaaattcaacaacccttcatgctaaaaactctcaataaattaggtattgatgggacgtatctcaaaataataagagctatctatgacaaacccacagccgatatcatactgaatgggcaaaaactggaagcattctctttgaaaactggcacaagacagggatgccctctctcaccactcctattcaacatagtgttggaagttctggccagggcagtcaggcaggagaaggaaataaagggcattcgattaggaaaagaggaagtcaaattgtccctgcttgcagatgacatgattgtatatctagaaaaccccatcgtctcagccccaaatctcctcaagctgataagcaacttcagcaaaagaataaaatacctaggaatccaacttacaagggatgtgaaggacctcttcaagaagaactacaaaccactgctcaatgaaataaaagaggatacaaacaagtggaagaacattccatgctcatgggtaggaagaatcaatatcgtgaaaatggccatactgcccaaggtaatttatagattcaatgccatcccaatcaagctaccaatgactttcttcacagaattggaaaaaactactttaaagttcatatggaaccaaaaaagagcctgcatcgccaagtcaatcctaaaccaaaagaacaaagctggaggcatcatgctacctgacttcaaactatactacaaggctacaggaaccaaaacagcatggtactggtaccaaaacagagatatagatcaatggaacagaacacagccctcagaaataatgccacatatctacaactatctgatctttgacaaacctgacaaaaacaagaaatggggaaaggattccctatttaataaatggtgctgggaaaactggctagccatatgtagaaagctgaaactggatcccttccttacaccttatacaaaaattaattcaagatggattaaagacttaaacgttagccctaaaaccataaaaaccctagaagaaaacctaggcaataccattcaggacataggcatgggcaaggacgtcatgtctaaaacaccaaaagcaatggcaacaaaagccaaaattgacaaatgggatctaattaaactaaagagcttctgcacagcaaaagaaacgaccatcagagtgaacaggcaacctacagaatgggagaaaatttttgcaacctactcatctgacaaagggctaatattcagaatctacaatgaactcaaacaaatttacaagaaaaaaacaaacaacctcatcaaaaagtgggcgaagaacatgaacagacacttctcaaaagaagacatttatgcagccaaaaaacacatgaaaaaatgctcatcatcactggccatcagagaaatgcaaatcaaaaccacaatgagataccatctcacaccagttggaatggcaatcattaaaaagtcaggaaacaacagtctaagtaaccagatgtacagaatacaaaagatgcaggtacaagcccaaattcaagcttacaatgtgattacaaataataattataataacaatggcattcagctacgggacctgacactgaagatacctactgaatag

SEQ ID NO: 7860 - DNA, 2268 bp, Homo sapiens; identical to SEQ ID NO: 6266
  SIMILAR (178)..(1701): 871254mologous to Homo sapiens putative p150,accession number U93563,Smith-Waterman Score=2227.

SEQ ID NO: 7861 - DNA, 4729 bp, Homo sapiens
  SIMILAR (1093)..(2538): 941254mologous to Homo sapiens putative p150,accession number U93564,Smith-Waterman Score=2460.
atgggagactttaacaccccactgtcaacagtagacagatcgatgagacagaaagttgacaaggatacccaggaattgaactcagctctgcaccaagcagacctcatagacatctacagaactctccaccccaaatcaacagaatatacatttttttcagcaccacaccacacctattccaaaattgacaacataattggaagtaaagctctcctcagcaaatgtaaaggaacagaaattataacaaactctctctcagaccacagtgcaatcaaactagaactcaggattaagaaactcactcaaaaccactcaactacagagaaactgaacaacctgctcctgaatgactactgggtacataacgaaatgaaggcagaaataaagatgttctctgaaaccaatgagaacaaagacacaacataccagaatctctgggacacattcaaagcagtgtgtagagggaaatttatagcactaaatgcccacaagagaaagcaggaaagatccaaaattgacaccctaacatcacaattaaaagaactagaaaaactaaaccaggaagaagttgaatctctgaatagaccaataacaggagctgaaattgtggcaataatcaatagcttaccaaccaaaaagagtccaggaccagatggattcacagccaaattctactggaggtacaaggaggaactggtaccattccttctgaaactattccaatcaatagaaaaagagggaatcctccctaactcatgttatgaggccagcatcatcctgataccaaagcctggcagagacacaacaaaaaaagagaattttagaccaatatccttgatgaacattgatgcaaaaatcctcaataaaatactggcaaaccgaatccagcagcacatcaaaaagcttatccaccatgatcaagtgggcttcatccctgggatgcaaggctggttcaatatatgcaaatcaataaatgtaatccagcatataaacagaaccaaagacaaaaaccacatgattatctcaatagatgcagaaaaggcctttgacaaaattcaacaacccttcatgctaaaaactctcaataaattagcccaaaatctccttaagctgataagcaacttcagcaaagtctcaggatacaaaatcaatgtacaaaaatcacaagcattcttatacaccaataacagacaaacagagagccaaatcatgagtgaactcccattcacaactgctttaaagagaataaaatacctaggaatccaacttacaagggatgtgaaggacctcttcaaggagaactacaaaccactgctcaaggaaataaaagaggatacaaacaaatggaagaacattccatgctcatgggtaggaagaatcaatatcttgaaaatggccacactgcccaaggtaatttatagattcaatgccatccccatcaagctactaatgactttcttcacagaattggaaaaaactactttaaagttcatatggaaccaaaaaagagcccgcatagccaagtcaatcctaaaccaaaagaacaaagctggaggcatcacactacctgacttcaaactatactacaaggctacagtaaccaaaacagcatggtactggcaccaaaacagagatagagaccaatggaacagaacagagccctcagaaacaatgctgcatatctacaactatctgatctttgacaaacctgacaaaaacaagcaatggggaacggattccctatttaataaatggtgctgggaaaactggctagccatatggagaaagctgaaactggatcccttccttacaccttatacaaaaattaattcaagatggattaaagacttacacattagagctaaaaccataaaaaccctagaagaaaacctaggcaataccattcagtacataggcatgggcaaggacttcatgtctgaaacaccaaaagcaatggcaacaaaagccaaaattgacgaatgggatctaattaaactaaagagcttctgcacagcgaaagaaactaccatcagagtgaacaggcaacccacaaaatgggagaaaattttcgcaacctactcatctgacaaagggctaatatccagaatctacaatgaactcaaacaaatttacaagaaaaaaacaaacaaccccatcaaaaaatgggcaaaggacatgaacagacacttctcaaaagaagacatttatgcagccaaaaaacacatgaaaaaatgctcatcatcactggccatcagagaaatgcaaatcaaaaccacaatgagataccatctcacaccagtcagaatggcgatcattaaaaagtcaggaaacaacaggtgctggagaggatgtggagaaataggaacacttttacactgttggtgggactgtaaactagttcaaccattgtggaagtcagtgtggcgattcctcagggatctagaactagaaataccatttgacccagccatcccattactgggtatatacccaaaggactataaatcatgctgctacaaagacacatgcacacgactgaagtgtggaattcgcatggtcaacatgaaaagtaaggaacctgccgtgggatctagattcttctctagaattagtagttggagaaattcaacagtgactggacatccatggcaggtctccctaaaatcagatgagcaccacttctgtggaggaagcttgattcaagaagatcgggttgttacagcagcacactgcctggacagcctcagtgagaagcagctgaagaatataactgtgacttctggggagtacagcctctttcagaaggataagcaagaacagaatattcctgtctcaaaaattattacccatcctgaatacaacagccgtgaatatatgagtcctgatattgcactgctgtatctaaaacacaaagtcaagtttggaaatgctgttcagccaatctgtcttcctgacagcgatgataaagttgaaccaggaattctttgcttatccagtggatggggcaagatttccaaaacatcagaatattcaaatgtcctacaagaaatggaacttcccatcatggatgacagagcgtgtaatactgtgctcaagagcatgaacctccctcccctgggaaggaccatgctgtgtgctggcttccctgattggggaatggacgcctgccagggggactctggaggaccactggtttgtagaagaggtggtggaatctggattcttgctgggataacttcctgggtagctggttgtgctggaggttcagttcccgtaagaaacaaccatgtgaaggcatcacttggcattttctccaaagtgtctgagttgatggattttatcactcaaaacctgttcacaggtttggatcggggccaacccctctcaaaagtgggctcaaggtatataacaaaggccctgagttctgtccaagaagtgaatggaagccagagaggaaagggtaaggtctgtggaaaaatattgccttcaccattgctggcagagaccagtgaggccatggttccatttgtttctgatacagaagacagtggcagtggctttgagcttaccgttactgctgtacagaagtcagaagcagggtcaggttgtgggagtctggctatattggtagaagaagggacaaatcactctgccaagtatcctgatttgtatcccagtaacacaaggtgtcattggttcatttgtgctccagagaagcacattataaagttgacatttgaggactttgctgtcaaatttagtccaaactgtatttatgatgctgttgtgatttacggtgattctgaagaaaagcacaagttagctaaactttgtggaatgttgaccatcacttcaatattcagttctagtaacatgacggtgatatactttaaaagtgatggtaaaaatcgtttacaaggcttcaaggccagatttaccattttgccctcagagtctttaaacaaatttgaaccaaagttacctccccaaaacaatcctgtatctaccgtaaaagctattctgcatgatgtctgtggcatccctccatttagtccccagtggctttccagaagaatcgcaggaggggaagaagcctgcccccactgttggccatggcaggtgggtctgaggtttctaggcgattaccaatgtggaggtgccatcatcaacccagtgtggattctgaccgcagcccactgtgtgcaattgaagaataatccactctcctggactattattgctggggaccatgacagaaacctgaaggaatcaacagagcagaattctacatcagctcaggccaaactgaatgacttcagctatgttggtacagagctacatctgaacttaaatacatttctaacaacactttctgcttacttcatcatcgagctctctctgaatgtttcttcattagatggtggcctagcaagtcgcctacagcagattcaagtgcatgtgttagaaagagaggtctgtgaacacacttactattctgcccatccaggagggatcacagagaagatgatctgtgctggctttgcagcatctggagagaaagatttctgccagggagactctggtgggccactagtatgtagacatgaaaatggtccctttgtcctctatggcattgtcagctggggagctggctgtgtccagccatggaagccgggtgtatttgccagagtgatgatcttcttggactggatccaatcaaaaatcaatg

SEQ ID NO: 7862 - DNA, 2685 bp, Homo sapiens
  SIMILAR (1009)..(2544): 921254mologous to Homo sapiens putative p150,accession number U93572,Smith-Waterman Score=2525.
atgggagactttaacaccccactgtcaacattagacagatcaacaagacagaaagtcaacaaggatacccaggaattgaactcagctccacaccaggcagacctaatagacatctacagaactctgcaccccaaatcaacagaatatacatttttttcagcaccacaccacacctattccaaaactgaccacatacttggaagtaaagctctcctcagcgaatgtaaaagaacagaaattataacaaactatctctcagatgacagtgcaatcaaactagaactcaggattaagaatctcactcaaaaccgctcaactacatggaaactgaacaacctgctcctggatgactactgggtacataacgaaatgaaggcagaaataaagatgttctttgaaaccaatgagaacaaagacacaacataccagaatctctgggacgcattcaaagcagtgtgtagagggaaatttgtagcactaaatgcccacaagagaaagcagggaagatccaaaattgacaccctaacatcacaattaaaagaactagaaaagcaagagcaaacacattcaaaagctagcagaaggcaagaaataactaaaatcagagcagaactgaaggaaatagagacacaaaaaaccgttcaaaaaattaatgaatccaggagctggttttttgaaaggatcaacaaaattgatagacagctagcaagactaataaagaaaaaaagggagaagaatctaatagacgcaataaaaaatgataaaggggatatcaccaccgatcccacagaaatacaaactaccatcagagaatactacaaacacctctatgcaaataaactagaaaatctagaagaaatggataaattcctggacacatacactctcccaagactaaaccaggaagaagttgaatctctgaatagaccaataacaggatctgaaattgtggcaataatcaatagcttaacaaccaaaaagagtccaggaccagatggattcacagccgaattctaccagagggcaattaggcaggagaaggaaataaagggtattcaattaggaaaagaggaagtcaaattgtccctgtttgcagatgacatgattgtatatctagaaaaccccattgtctcagcccaaaagctgataagcaacttcagcaaagtctcaggatacaaaatcaatgtacaaaagtcacaagcattcttatacaccaacaacagacaaacagagagccaaatcatgagtgaactcccattcacaattgcttcaaagagaataaaatacctaggaatccaacttacaagggatgtgaaggacctcttcaaggagaactacaaaccactgctcaaggaaataaaagaggatacaaacaaatggaagaacattccatgctcatgggtaggaagaatcaatatcgtgaaaatggccatactgcccaaggtaatttacagattcaatgccatccccatcaagctaccaatgactttcttcacagaattaaaaaaaactactttaaatttcatatggaaccaaaaaaagagcccacatcgccaagtcagcctaagccaaaagaacaaagctggaggcatcacactacctgacttcaaactatactacaaggctacagtaaccaaaacagcatggtactggtaccaaaacagagatacagatcaatggaacagaacagagccctcagaaataatgccgcgtatctacaactatctgatctttgacaaacctgagaaaaacaagcaatggggaaaggattccctgtttaataaatggtgctggaaaaactggctagccatatgtagaaagctgaaactggatcctttccttacaccttatacaaaaattaattcaagatggattaaagacttaaacattagacctaaaaccataaaaaccctagaagaaaacctaggcattaccattcaggacataggcatgggcaaggacttcatgtctaaaacaccaaaagcaatggcaacaaaagccaaaattgacaaatgggatctaattaaactaaagagcttctgcacagcaaaagaaactaccaacagagtgaacaggcaacctacaaaatgggagaaaatttttgcaacctactcatctgacaaagggctaatatccagaatctacaatgaactcaaacaaatttacaagaaaaaaacaaacaaccccatcaaaaagtgggcgaaggacatgaacagacacttctcaaaagaagacatttatgcagccaaaaaacacatgaaaaaatgctcatcatcactggccatcagagaaatgcaaatcaaaaccacaatgagataccatctcacactagttagaatggcaatcattaaaaagtcaggaaacaacaggtgctggagaggacgtggagaaataggaacacttttacactgttggtgggactgtaaactagttcaatcattgtggaagtcagtgtggcaattcctcagggatctagaactggaaataccatttgacccagccatcccattactgggaaaactgtctcataaattagggaagtgctcaattacaagcctgacagagattgattttggttctgctgttggtcactaccagcaagtgaaggccgcagaaaccacaactccagctaatgctggaatcgcttcagaggtgctcactgaacaagtgttcattaagaagtga

SEQ ID NO: 7863 - DNA, 1205 bp, Homo sapiens; identical to SEQ ID NO: 6920
  SIMILAR (1)..(1038): 971254mologous to Homo sapiens putative p150,accession number U93563,Smith-Waterman Score=1746.

SEQ ID NO: 7864 - DNA, 2277 bp, Homo sapiens
  SIMILAR (1)..(1188): 951254mologous to Homo sapiens putative p150,accession number U93563,Smith-Waterman Score=1957.
atgaacagagacaaagaaggccattacataatggtaaagggatcagttcaacaagaagagctaactatcccaaatatatatgcacccaatacaggagcaccaatattgataaagcaagtcctgagtgacctacaaggacacttagactcccacacattaataatgggagactttaacacaccactgtcaacattagacagatcaacaagacagaaagccaacaaggatacccaggaattgaactcagctctgcaccaagcagacctaatagacatctacagaactctccaccccaaatcaacagaatatacatttttttcagcaccacaccacacctattccaaaattgaccacatacttggaagtaaagctctcctcagcaaatgtaaaagaacagaaattataacaaactatctctcagaccacagtgcaatcaaactagaactcaggattaagaatctcactcaaaaccgctcaactacatggaaactgaacaacctgctcctgaatgactactgggtacataacgaaatgaaggcagaaataaagatgttctttgaaaccaacgagaacaaagacacaacataccagaatctctgggacgcattcaaagcagtgtgtagagggaaatttatagcactaaatgcccacaagagaaagcaggaaagatccaaaattgacaccctaacatcacaattgaaagaactagaaaagcaagagcaaacacattcaaaagctagcagaaggcaagaaataactaaaatcagagcagaactgaaggaaatagagacacaaaaaacccttcaaaaaattaatgaatccaggagctggttttttgaaaggatcaacaaaattgatagaccgctagcaagactaataaagaaaaaaagagagaagaatctaatagatgcaataaaaaatgataaaggggatatcaccaccgatcccacagaaatacaaactaccatcagagaatactacaaacacctctacgcaaataaactagaaaatctagaagaaatggataaattcctcgacacatacactctcccaagactgaaccaggaagaagttgaatctctgaatagaccaataacaggatctgaaattgtggcaataatcaatagcttaccaaccaaaaagagtccaggaccagatggattcacagccgaattctaccagaggcacacagtatcaatactcatcagctattgtcagggtggaagcctgatgagccaagtatactggaaccagcaagagaaacccccttcctccagcaacgcccctccagggctctctgttaacaaagctcagcatcgtcatgtttgctgcagaggagaaatgctaaaaagggtccaggttcattatgtcagagcaggggaatctgacagtgctagctttcactgtgtggcccaaggcccaagagcctttggcaaaccactgatcctctccaaagagaatcatctcttgactgtcactgcaatagccaaattaaaccacaaattatgtgaaattaaaagcatgggtgtttttatcaacacagagcccctgtatgacagttgtttagaacagaaacatgctctttttgcctctcctccagccaccacccactccactaccatgatcagtaaggcaaaggtgataccgatgctttctctgacgccagggagtttccaaaccgtggaaagctctttggccccctctgctggtaagttccaggggacagaaacaagctctctgaagactctcattaatctttgctgtccgaagctaccttctccatctcctgctcacctgggaggactccctggaggaagccaggaaagaccatcaaggcagtacctctatgagtctgcaagaaccactgtgttactgggcttggggtgtcccctaaagcagatacagcttagatcacaacactcaagtcctttagaatacctggagagccttcccaagaaggacagaaaaaaaagagagaagatccaaataaataaagtcagagatgaaaaaggagacattacaaccaatagtgcagaaattcaaaggatggttattggctaccatgagcaactatatgccaataaattggaaaatctagaagaaatggacaaatttctagacacatacgacctaccaagattgaaccatgaagaaatccaaaagctggacagaccaataacaagtaacaagattgaagctgtaaaaaaaagtctcccagtaaagaaaagcctggaacctgatggcttcactgctgagtttcaccaaacatttagataa

SEQ ID NO: 7865 - DNA, 2310 bp, Homo sapiens; identical to SEQ ID NO: 6271
  SIMILAR (1138)..(2307): 911254mologous to Homo sapiens putative p150,accession number U93568,Smith-Waterman Score=1900.

SEQ ID NO: 7866 - DNA, 3033 bp, Homo sapiens
  SIMILAR (574)..(3024): 861254mologous to Homo sapiens putative p150,accession number U93567,Smith-Waterman Score=3636.
atgaagcgagaaggaagtttagagaaaaaaagaataaaaagaaatgaacaaagcctccaagaaatatgtgactatgtgaaaagagcaaatctacgtctgattggtggacctgaaagtgacggggaaaatggaaccaagttggaaaacactctgcaagatatgcaggagaaattccccaatctagcaaggcaggccaacattcaaattcaggagatacagagaacgccacaaagatactcctcaagaagagcaactccaagacacataattgtcagattcaccaaagttgaaatgaaggaaaaaatgttaagggcagccagagagaaaggtcaggttacccacaaagggaagtccatcagactaacagctgatctctcggcagaaactctacaagccagaagagagtgggggccaatattcaacattcttaaagaaaagaattttcaacccagaatttcatatccaggcaaactaagcttcataagtgaaggagaaataaaatcctttacagacaagcaaatgctgagagattttgtcaccaccaggcctgccctaaaagagctcctgaaggaagcactaaacatggaaaagaacaagcagtaccagccaccacaaaaacatgccaaattaactagagaagcaagagcaaacacattcaaacctagcagaaggcgagaaataacaaagatcagagcagaactgaaggaaatagagacaccaaaaaccgctcaaaaaattaatgaatccaggagctggttttctgaaaggatcaacaaaattgatagaccgctagcaagactaagaaagaagaaaagagagaagaatcaaatagacacaataaaaaatgatgaaggggatatcaccacccatcccacagaaatacatactatcatcagagaatactataaacacctctatgcaaataaactagaaaatctagaagaaatggataaattcctcgacacctacaccctcccaagaccaaaccaggaagaagttgaatctctgaatggaccaatagcaggctctgaaattcaggcaataattaatagcttaccaaccaaaaaaagtccaggaccagatggattctaccagaggtacaaggaggagctggtaccattccgtctgaaactattccaatcaatagaaaaagagggaatcctccctaactcattttatgaggccagcatcatcctgataccaaagcctggcagagacacaacaaaaaaagagaattttagaccaatatccctgttgaacatcaatgcaaaaatcctcaataaaatactggcaaaccgaatccagcagcacatcaaaaagcttatgcaccatgatcaagtgggcttcatccctggaatgcaaggctggttcaatatacgcaaatcaataaatgtaatccagcatataaacagaaccaaagacaaaaaccacatgattatctcaatagatgcagaaaaggcctttgacaaaattcaacaacccttcatgctaaaaactctcaataaattaggtattgatgggacatatcacaaaataataagagctaactatgacaaacccacagccaatatcatactgaatgggcaaaaactggaagcattccctttgaaaactggcacaagacagggatgccctctctcaccactcctattcaacatagtgttggaagttctggccagggcaatcaggcaggagaaggaaacagagggtattcaattaggaaaagaggaagtcaaattgtccctgtttgcagatgacatgattgtatatctagaaaaccccattgtctcagcccaaaatctccttaagctgataagcaacttcagcaaagtctcaggatacaaaatcaatgtgcaaaaatcacaagtattcttatacaccgataacagacaaacagagagccaaatcatcagtgaactccccattcacaattgcttcaaagagaataaaatacctaggaatccaacttacaaggtacgtgaaggacctcttcaaggagaggtcaatgaaataaaagaggatacaaacaaatggaagaacattccatgctcatgggtaggaagaatcaatatcgtgaaaatggccatactgcccaaggtaatttatagattcaatgccatctccatccagctaccaatgactttcttcacagaattggaaaaaactactttaaagttcatatggaaccaaaaaagagcccacattgccaagtcaatcctgagcaaaaagaataaagctggaggcatcatgctacctgacttcaaactatactacaaggctacagtaaccaaaacagcatggcattggtaccaaaacagagatatagaccaaaggaacagaacagagccctcagaaataatgccgcatgtctacaaccatctgatctttggcaaacctgacaaaaacaagcaatggggaaatgattccctatttaataaatggtgctgggaaaactggctagccatatgtaaaaagctgaaactggatcccttccttacaccttatacaaaaattaattcaagatggattaaagatttaaatgttagacctaaaaccataaaaaccctagaagaaaacctaggcaataacattcaggacataggcatgggcaaggacttcacgtctaaaacaccaaaagcaatggcaacaaaagacaaaattgacaaatgggatctaatgaaactaaagagcttttgcacagcaaaagaaactaccatcatagtgaacaggcaacctacagaatgggagaaaatttttgcaatctactcatatgacaaagggctaatatccagaatctacaaagaattcaaacaaatttacaagaaaaaaacaaacaatcccatcaaaatgtgggcaaaggatatgaacagacacttctcaaaagaagacatttatgcagccaaaagacacatgaaaaaatgctcatcatcactggccatcagagaaatgcaaatcaaaaccacaatgagatatcatctcacgccagttagaatggcaatcattaaaaagtcaggaaacaacaggtacccttga

SEQ ID NO: 7867 - DNA, 3171 bp, Homo sapiens
  SIMILAR (442)..(1884): 911254mologous to Homo sapiens putative p150,accession number U93569,Smith-Waterman Score=2277.
atggggaaaaaacagaacagaaaaactggaaactctaaaaagcagagcgcctctcctcctccaaaggaacacagttccttaccagcaacggaacaaagctggatggagaaagactttgacgagctgagagaagaaggctacagacgatcaaattactctgagctatgggaggacattcaaaccaaaggcaaagaagttgaaaactttgaaaaaaatttagaagaatgtataactagaataaccaatacagagaggtgcttaaaggagctgatggagctgaaaaccaaggctcgagacctacgtgaagaatgcagaagcctcaggagccgatgcgatcaactggaagaaagggcccgccctaaaagagctcctgaaggaagagctaaacatggaaaggaacaaccggtaccagccgctgcaaaatcatgccaaaatgtaaagaccatcaagactaggaagaaactgcatcaactaatgagcaaaataaccagacacagactggcaaattggataaagagtcaagacccatcagtgtgctatattccggaaacccatctcacgtgcagagacacacataggctcaaaataaaaggatggaggaagatctaccaagccaatggaaaacaaaaacaggcaggggttgcaatccacatctctgataaaacagactttaaaccaacaaagatcaaaagagacaaagaaggccattacataatggtaaagggatcaattcaacaagaaaagctaactatcctaaatgtatatgcacccaacacaggagcacccagattcataatgcaagtcctgagtgacctacaaagagacttagactcccacacattaataatgggagactttaacaccccactgtcaacattagacagattaacgagacagaaagtcaacaaggatacccaggaattgaactcagctctgcaccaagtggacctaatagacatctatagaactctccaacccaaatcaacagaatatacattgttttcagcaccacaccacacctattccaaaattgaccacatacttggaagtaaagctctcctcagcaaatgtaaaagaacagaaattataacaaactatctctcagaccacagtgcaatcaaactagaactcaggattaagaaactcactcaaatccgctcaactgcatggaaactgaacaacctgctcctgaatgactactgggtacataacgaaatgaaggcagaaataaagatgttctttaaaaacaatgagaataaagacgcaacatgccagaatctctgggacacattcaaagcagtgtgtagagggaaattcttagcactaaatgcccacaagagaaagcaggaaagatccaaaatcaacaccctaacatcacaattaaaagaactagaaaagcaagagcaaacacattccaaagctagtagaaggcaagaaataactaaaatcagagcagaactgaaggaaatagagacacaaaaaacccttcaaaaaattaatgaatccaggagctggttttttgaaaggatcaacaaaattgatagaccactagcaagactaataaagaaaaaaagagagaagaatcaaatagacacaataaaaaatgataaaggggatatcaccaccgatcccacagaaatacaaactaccgtcagagaatactacaaacacctctacgcaaataaactagaaaatctagaagaaatggataaattcctcgacacatacacactcccaagactaaaccaggaagaatttgaatctctgaatagaccagtaacaggatctgaaattgtggcaataatcaatagcttaccaacgaaaaagagtccaggaccagatggattcacagccgaattctaccggaggtacaaggaggaactgcatataaacagagccaaagacaaaaaccacatgattatctcaatagatgcagaaaaagcctttgacaaaattcaacaacccttcatgctaaaaactctcaataaattaggtactgctgggacgtatttcaaaataataagagctatctatgacaaacccacagccaatatcatactgaatgggcaaaaactggaagcattccctttgaaaactggcacaagacagggatgccctctctcaccactcctattcaatatagtgttggaagttctggccagggcaattaggcaggagaaggaaataaagggtattcaattaggaaaagaggaagtcaaattgtccctctttgctgatgacatgattgtatatctagaaaaactcattgtctcagcccaaaatctccttaagctgataagcaacttcagcaaagtctcaggatacaaaattaatgtacaaaaatcacaagcattcttatacaccaataacagacaaacagagagccaaatcatgagtgaactcccattcacaattgcttcaaagagaataaaatacctaggaatccaacttacaaggaatgtgaaggacctcttcaaggagaactacaaaccactgctcaaggaaataaaagaggatacaaacaaatggaagaacattccatgctcatgggtaggaagaatcaatatcgtgaaaatggccatactgcccaagggaatttacagattcaatgccattcccatcaagctaccaaagactttcttcacagaattggaaaaaactactttaaagttcatatggaaccaaaaaagagcccacatcaccaagtcaatcctaagccaaaagaacaaagctggaggcatcacactgcctgccttcaaactatactacaaggctacagtaaccaaaacagcatggtactggtaccaaaacagagatatagatcaatggaacagaacagagccctcagaaataacgccacatatctacaactatctgatctttgacaaacctgagagaaacaagcaatggggaaaggattccctatttaataaatggtgctgggaaaactggctagccatatgtagaaagctgaaactggatcccttccttacagcttatacaaaaatcaattcaagatggattaaagacttaaacattagacctaaaaccataaaaactctagaagaaaatctaggcattaccattcaggacataggcatgggcaaggacttcatgtctaaaacaccaaaagcaatggcaacaaaagacaaattgacaaatgggatctaa

SEQ ID NO: 7868 - DNA, 2649 bp, Homo sapiens
  SIMILAR (1039)..(2646): 941254mologous to Homo sapiens putative p150,accession number U93563,Smith-Waterman Score=2696.
atgggagactttaacaccccactgtcaacattagacagatcaacaagacagaaagtcaacaaggatacccaggaattgaactcagctctgcaccaagtggacctaatagacatctacagaattctccaccccaaatcaacagaatatacatttttttcagcaccacaccacacctattccaaaattgaccacatacttggaagtaaagctctcctcagcaaatgtgaaagaacagagattataacaaactatctctcagaccacagtgcaatcaaactagaactcaggattaagaatctcactcaacactgctcaacttcatggaaactgaacaaactgctcctgaatgactactgggtacataacgaaatgaaggcagagataaagatgttctttgaaaccaatgagaacaaagacacaacataccagaatctctgggatgcattcaaagcagtgtgtagagggaaatttatagcactaaacgcccacaagagaaagcaggaaagatccaaaattgacaccctaacatcacaattaaaagaactagaaaagcaagagcaaacacattcaaaagctagcagaagtcaacaaataactaaaatcagagcagaactgaaggaaatagagacacaaaaaacccttcaaaaaattaatgaatccaggagcttgttttttgaaaggatcaacaaaattgatagactgctagcaagactaataaagaaaaaaagagagaagaatctaatagacgcaataaaaaatgataaaggggatatcaccaccgatcccacagaaatacaaactgccatcagagaatattacaaacacctctacgcaaataaactagaaaatctagaagaaatggataaattccttgacacatacaccctcccaagactaaaccaggaagaagttgaatctctgaatagaccaataacaggatctgaaattgtggcaataatcaatagcttaccaaccaaaaagaatccaggaccagatggattcacagccgaattctaccagaggttcaaggaggaactgcatataaagagagccaaagacagaaaccacatgattatctcaatagatgcagaaaaagcctttgacaaaattcaacaacccttcatgctaaaaactctcaataaattaggtattgatgggacatatttcaaaataataagagctatctatgacaaacccacagccaatatcatactgaatgggcaaaaactggaagcattccctttgaaaactggcacaagacagggatgccctctctcaccactcttattcaatatagtgtttgaagttctggccagggcaattaggcaggagaaggaaataaagggtattcaattaggaaaagaggaaatcaaattgtctctgtttgccgatgacatgattgtatatctagaaaaccccattgtctcagcccaaaatctccttaagctgataagcaacttcagcaaagtctcaggatacaaaatcaatgtacaaaaatcacaagcattcttatacaccaacaacagacaaacagagagccaaatcatgagtgaactcccattcacaattgcttcaaagagaataaaatacctaggaatccaacttacaagggatgtgaaggacctcttcaaggagaactacaaaccactgctcaaggaaataaaagaggatacaaacaaatggaagaacattccatgctcatgggtaggaagaatcaatatcgtgaaaatggccatactgcccaagctaccaatgcctttcttcacagaattggaaaaaactactttaaagttcatatggaaccaaaaaagagcctgcatcaccaagtcaatcctaagccaaaagaacaaagctgaaggcatcacactacctgacttcaaactatactacaaggctacagtaaccaaaacagcatggtactggtaccaaaacagagatatagatcaatggaacagaacagagccctcagaaataatgccacatatctacagctatctgatatttgacaaacctgagaaaaacaagcaatggggaaaggattccctatttaataaatggtgctgggaaaactggctagccatatttagaaagctgaaactggatcccttccttacaccttatacaaaaatcaattcaagatggattaaagacttaaacgttagacctaaaaccataaaaaccctagaagaaaacctaggcattaccattcaggacataggcatgggcaaggacttcatgtctaaaacaccaaaagcaatggcaacaaaagccaaaattgacaaatgggatctaattaaactaaagagcttctgcacagccaaagaaactaccatcagagtgaacaggcaacctacaaaatgggagaaaattttcgcaacttactcatctgacaaagggctaatatccagaatctacaatgaactcaaagaaatttacaagaaaaaaacaaacaaccccatcaaaaagtgggcaaaggacatgaacagacacttctcaaaagaagacatttatggagccaaaaaacacatgaaaaaatgctcatcatcactggccatcagagaaatgcaaatcaaaaccacaatgagatatcatctcacactagttagaatggcaatcattaaaaagtcaggaaacaaaaggtgctggtga

SEQ ID NO: 7869 - DNA, 2214 bp, Homo sapiens
  SIMILAR (769)..(1758): 941254mologous to Homo sapiens putative p150,accession number U93569,Smith-Waterman Score=1618.
atgagagccaagtggaggaagaagcgaacgctcaggctgaagcgccaaagaagaaagatgaggcagaagtccaaagtgaaattaaaaatcccatctgctgtcaatgaggagtcccttcaggccctaaagtttagggagaggaatccctatcttgacttcttcactgtcatcctggcacatcagttacttcaaacaacccaatttcaagaactgatagaccttcatttctggacacaccaaaaacaagcaaattccagaggatcagcttcagggtggcagaatggaatgagtaaaagccaaccacgaggccagatgtctgatgctgtcaattctcaatggccagaagagggcatctgcccagatcagttcaggtgtctatccctggtcaatcgcctgtgcccagggcagcatatcaggactctggcagatacaaagaacccacagctgactgctgggtccccggcagacctagtgcatggctccacactgccatcttgggggctggcacatgctggcactgagtctggggaagggagctggggctggagggaaagaatcaacctgggagccaagcccaggaatcaggatgaccaagacatactcgacaaggagggaacaaagccatccaaggacaatcaaggacaaatcaagcaaatgaatttaagggagacctgctcatggacctttcataaaaaattcctcaagactgtagcatttcagataagccaccctcacaagaacacttgcctagcaatggctgtttctgccaacagatcaatgagacagaaattcaacaaggatacccaggaattgaactcagctctgcaccaagtggacctaatagacatctacagaactctccaccccaaatcaacagaatatacatttttttcagcaccacaccacacctattcaaaaattgaccacatacttggaagtaaagctctcctcagcaaatgtaaaagaacagagattataacaaactatctctcagaccacagtgcaatcaaactagaactcaggattaagaatctcactcaaaaccgatcaactacatggaaactgaacaagctgctcctgaatgactactgggtacataatgaaatgaaggcagaaataaagatgttctttgaaaccaatgagaacaaagacacaatataccagaatctctgggacgcattcaaagcagtgtgtagagggaaatttatagcactgaatgcccacaagagaaagcaagaaagatccaaaattgacaccctaacatcacaattaaaagaactagaaaagcaagagcaaacacattcaaaagctagcagaaggcaagaaataactaaaatcagagcagaactgaaggaaatagagacacaaaaaacccgtcaaaaaattaatgaatccagtagctggttttttgaagggatcaacaaaattgatagaccgctagcaagactaataaagaaaaaaagagagaagaatcaaatagacacaataaaaaattataaaggggatatcaccaccgatcccacagaaatacaaactaccatcagagaatactataaacacctctacgcaaataaactagaaaatctagaagaaatggataaattcctcgacacttacactctcccaagactaaaccaggaagaagttgaatgtctgaatagaccaataacaggagctgaaattgtggcaataatcaatactttaccaaccaaaaagagtccaggaccagatggattcacagccgaattctaccagagatgttcaaggtggattaaagacttaaacgttagacctaaaaccataaaaaccctagaagaaaacctaggcattaccattcaggacataggcacgggcaaggacatcatgtccaaaacaccaaaagcaatggcaacaaaagacaaaattgacaaatgggatctaattaaactaaagagcttctgcacagcaaaagaaactaccatcagagtgaacaggcaacctacaaaatgggagaaaattttcgcaacttactcatctgacaaagggttaatatccagaatctacaatgaactcaaacaaatttacaagaaaaaatcaaacaaccccatcaaaaagtgggcgaaggacatgaacagacacttctcaaaagaagacatttatgcagccaaaaaacacatgaaaaaacgctcatcactggccatcagagaaatgcaaatcaaaaccacaatgagatag

SEQ ID NO: 7870 - DNA, 3057 bp, Homo sapiens
  SIMILAR (712)..(2940): 971254mologous to Homo sapiens putative p150,accession number U93568,Smith-Waterman Score=3707.
  misc_feature (1)...(3057): n = a,t,c or g
atggggaaaaaacagaacagaaaaactggaaactctaaaacgcagagcgcctctcctcctccaaaggaacgcagttcctcaccagcaacagaacaaagctggatggagaatgattttgacgagctgagagaagaaggcttcagacgatcaaattactctgagctacgggaggacattcaaaccaaaggcaaagaagttgaaaactttgaaaaaaatttagaagaatgtataactagaataaccaatacagagaagtgcttaaaggagctgatggagctgaaaaccaaggctcgaaaactacgtgaagaatgcagaagcctcaggagccgatgcgatcaactggaagaaagggtatcagcaatggaagatgaaatgaatgaaatgaagcgagaagggaagtttagagaaaaaagaataaaaagaaatgagcaaagcctccaagaaatatgggactatgtgaaaagaccaaatctacgtctgattggtgtacctgaaagtgatgtggagaatggaaccaagttggaaaacactctgcaggatattatccaggagaacttccccaatctagcaaggcaggccaacgttcagattcaggaaatacagagaacaccacaaagatactcctcgagaagagcaactccaagacacataattgtcagattcaccaaagttgaaatgaaggaaaaaatgttaagggcagccagagagaaagacagatcaacgagacagaaagtcaacaaggatacccaggaattgaactcagctctgcaccaagcagacctaatagacatctacagaactctccaccccaaatcaacagaatatacatttttttcagcaccacaccacacctattccaaaattgaccacatagttggaagtaaagctctcctcagcaaatgtaaaagaacagaaattataacaaactatctctcagaccacagtgcaatcaaactagaactcaggattaagaatctcactcaaagccgctcaactacatggaaactgaacaacctgctcctgaatgactactgggtacataacgaaatgaaggcagaaataaagatgttctttgaaaccaatgagaacaaagacacaacataccagaatctctgggacgcactcaaagcagtgtgtagagggaaatttatagcactaaatgcccacaagggaaagcaggaaagatctgaaattgacaccctaacatcacaattaaaagaactagaaaagcaagagcaaacacattcaaaagctagcagaaggcaagaaataactaaaatcagagcagaactgaaggaaatagagacacaaaaaacccttcaaaaaatcaatgaatccaggagctggttttttgaaaggatcaacaaaattgatagaccgctagcaagactaataaagaaaaaaagagagaagaatcaaatagacacaataaaaaatgataaaggggatatcaccaccgatcccacagaaatacaaactaccatcagagaatactacaaacacctctacgcaaataaactagaaaatctagaagaaatggatacattccttgacacatacactctcccaagactaaaccaggaagaagttgaatctctgaatcgaccaataacaggctctgaaantgtggcaataatcaatagtttaccaaccaaaaagagtccaggaccagatggattcacagccgaattctaccagaggtacaaggaggaactggtaccattccttctgaaactattccaatcaatagaaaaagagggaatcctccctaactcattttatgaggccagcatcatactgataccaaagccgggcagagacacaaccaaaaaagagaattttagaccaatatccttgatgaacattgatgcaaaaatcctcaataaaatactggcaaaccgaatccagcagcacatcaaaaagcttatccaccatgatcaagtgggcttcatccctgggatgcaaggctggttcaatatacgcaaatcaataaatgtaatccagcatataaacagagccaaagacaaaaaccacatgattatctcaatagatgcagaaaaagcctttgacaaaattcaacaacccttcatgctaaaaactctcaataaattaggtattgatgggacgtatttcaaaataataagagctatctatgacaaacccacagccaatatcatactgaatgggcaaaaactggaagcattccctttgaaaaccggcacaagacagggatgccctctctcaccgctcctattcaacatagtgttggaagttctggccagggcaatcaggcaggagaaggaaataaaggctattcaattaggaaaagaggaagtcaaattgtccctgtttgcagacgacatgattgtttatctagaaaaccccatcgtctcagcccaaaatctccttaagctgataagcaacttcagcnaactctcaggatacaaaatcaatgtacaaaaatcacaagcattcttatacaccaacaacagacaaacagagagccaaatcatgggtgaactcccattcacaattgcttcaaagagaataaaatacctaggaatccaacttacaagggatgtgaaggacctcttcaaggagaactacaaaccactgctcaaggaaataaaagaggagacaaacaaatggaagaacattccatgctcatgggtaggaagaatcaatatcgtgaaaatggccatactgcccaaggtaatttacagattcaatgccatccccatcaagctaccaatgactttcttcacagaattggaaaaaactactttaaagttcatatggaaccaaaaaagagcccgcattgccaagtcaatcctaagccaaaagaacaaagctggaggcatcacactacctgacttcaaactatactacaaggctacagtaaccaaaacagcatgtgggtaccagaagcagggagcagacacctcggagcctgcaggggcagtgaggggaaaccttccgaacttcccaagcccccaagagtgcagagatgccaggtccacagccatggcttggctggctgcagctgtgcctaagaag

SEQ ID NO: 7871 - DNA, 1833 bp, Homo sapiens
  SIMILAR (1066)..(1530): 761254mologous to Homo sapiens NAG13,accession number AF194537,Smith-Waterman Score=566.
atgacgactttggaccatgtgattgccacccaccagtcagaatgggtctccttcaatgaagagccaccctttcctgcccactcgcaggtgcttagagcagtgcctggcacgtggaaagagctcagtacggtcatccttgatcataaggaggatgactatattgactttggagaacttgtgctcagggatgaaggtcaagggggcacggaagagcacctcccaggactgtcatcttccccagaccagtccgagagctcctccggggagaaccatgtggtggatggaggctctcaagaccattcccactcggagcaggatgactcctctgaaaagatgggcctcatctctgaagcagcttccccacctgggagccctgagcagcccccacctgacctggcctcggccatcagcaactgggttcagtttgaagatgacacaccctgggccagcacatctccacctcatcaggaaacagctgagacagccctaccattgaccatgccctgctggacatgcccttcctttgactccctggggagatgccctctgacttctgagagcagctggaccacccattctgaagacaccagcagtcctagctttggatgttcgtatacagatctgcagctcatcaatgctgaggagcagacgagtggccaggcttctggggctgactcaactgtagatcctagcctgaggccaaaggacatgaagccctggggaagcagcccacagaggtcagtcgccagagcagatagagtggatctgaggttggaagcggcaaacaggtgtgttggaatagccagcacacttgatcctcaccagaaactaactggcccctacgccagagtttacaccagagactcaaaggcaaatctgggactagagaatgaggagggatgctcttattcaacaagaggcagtttctatggctacaaggagggtagaggcttgtggcagtgccaacctctgggagagccctgctttgaggctggatggttccagttgggtaaaccgaaaccccctggggttatggggcagattcccatcagtctgtcctccgggatcaacaaaattgatagacagctagcaagactaataaagaaaaaaagagagaagaatcaaatagatgcaataaaaaatgataaaggggatatcactaccgatcccatagaaatacaaactaccatcagagaatactacaaacacctctacgcaaataaactagaaaatctagaagaaatggataaattcctcaacacatacactctcccaagactaaaccaggaagaagttgaatctctgaatagaccaataacaggagctgaaattgtggcaataatcaatagcttaccaaccaaaaagagaccaggaccagatggattcacagccgaattctaccagaggtgttcttttgtagaggtaggccttcactgtttagtgattccgattttacagctggtaaggaccctggaaagacagaacttgctttcagattctctagatggctgggctgcttcctttgccttgcatttggatggggcagctggctgggctccagtatctggagagaatgacttcacaactttcattgggtcaaagggacgaaacatcataaaaagttcaggagaccgagctactggaaaagagcagctttctctgatagaatttactgctgctgagcacatctgccatgagactcaagaacaaatcacatcaccactttgtgatgcatctggaaactcagacaagtgttgcaaacagggctgtcaacaagatgtcagcccttccagtggcagtaccaaggatgctcattggacttttcttctgtga

SEQ ID NO: 7872 - DNA, 3192 bp, Homo sapiens; identical to SEQ ID NO: 3969
  SIMILAR (1087)..(2478): 961254mologous to Homo sapiens unknown,accession number AF148856,Smith-Waterman Score=2341.

SEQ ID NO: 7873 - DNA, 3485 bp, Homo sapiens
  SIMILAR (1488)..(2651): 951254mologous to Homo sapiens putative p150,accession number U93563,Smith-Waterman Score=1980.
atgggaacctctgaagtgcagaatggagaggagagagctggcaccagcggccagggcagcgtggagcagctcagcggcagctcagtccagctccctcctggcctcaaactctgctttgagccctacttttccagctgtgcttctgactgcattcttcatgccagccccctctccttaatggctgcatcaggctcccaaaaccccaatctgtgggcttcctggttgtgctgcaaatgggttcagtgcccagaacgtcagcttggctgccacctgacttcaagtgtcatctatggcctcaggtactacccccaggccaaacgcagtgaattagaactcagggactgtgagggcctctgcaatcagacatctcccctcagctcacttgatgggatgggctggaaagcagcagcagaagagagcaactctggaatcagaaacatctggattccaattccagcatttgctactcacaagcaatacaatgtcagacaggtgataagcccctctccaccttactggtctcatcgaggaaatggaaataacagcctctgtgtcacaaggttatcaggaggactgaagcaaccagtagcaggcacaggaagaggtttagaaggtgggagcggaacaagggacctgatgccattcttgtcagcagcacccaaggaacagcccccaatcctggcacctgcacgtaggagctggttttttgaaaagatcaacaaaattgatagactgctagcaagactaataaagaagaaaagagagaagaatcaaatagatgcaataaaaaatgataaaggggatatcaccactgatcccacagaaatacaaactatcatcagagaatactataaacacctctatgcaaataaactagaaaatccacaagaaatggataaattcctcaactcttacaccctcccaagactaaaccaggaagaagctgaatctctgaatagaccaataacaggctctgaaattgaggcaataattaatagcttaccaaccaaaaaaagtccaggaccagatggattcacagccaaattctaccagaggtacaaggaggagcttgtacccattccttctgaaactattccaattaatagaaaaagagggaatcctccctaactcattttatgaggccagcatcatcctgataccaaagcctggcagagacacaacaacaacaaaaaaagaattttagaccaatatccttgatgaacattgatgcaaaaatcctcaataaaatactggcaaaccgaatccagcagcacatcaaaaagcttatccaccatgatcaagtgggcttcatccctgggatgcaaggctggttcaacatacgaaaatcaataaacgtaatccagcatataaacagaaccaaacacaaaaaccacatgattatctcaatagatgcagaaaaggcctctgacaaaattcaacaacccttcatgctaaaaactctccgtaaattaggtattgatgagacacaaacagagagccaaatcatgagtgaactcccattcacaattgcttcaaagagaataaaatacctaggaatccaacttacaagggacgtgaaggacctcttcaaggagaactacaaaccactgctcaatgaaataaaagaggatacaaacaaatggaagaactttccatgctcatgggtaggaagaatcaatattgtgaaaatggccatagtgcccaaggtaatttatagattcaatgccagccccatcaagctaccaatgactttcttcacagaattggaaaaaactactttaaagttcatatggaaccaaaaaagagcctgcattgccaagtcaatcctaagccaaaagaacaaagctggaggcatcatgctacctgacttcaaactatactacaaggctacagtaaccaaaacagcatggtactggtaccaaaacagagatatagaccaatggaacagaacagagccctcagaaataacgccgcatatctacaactatctgttctttgacaaacctgacaaaaacaagcaatggggaaaggattccctatttaataaatggtgctgggaaaactggctagccatatgtagaaagctgaaattggatcctgtacttacaccttatacaaaaattaattcaagatggattaaagacttacatgttagacctaaaaccataaaaaccctagaagaaaacctaggcattaccattcaggacataggcatgggcaaggacttcatgtctaaaacaccaaaagcaatggcaacaaaagccaaaattgacaaatgggatctaattaaactaaagagcttctgcacagcaaaagaaactaccatcagagtgaacaggcaacctacagaatgggagaaaatttttgcaacctactcatctgacaaagggctaatatccagaatctacaatgaactcaaacaaatttacaagaaaaaaacaaacaaccccatcaaaaagtgggcgaaggacatgaacagacacttctcaaaagaagacatttatgcagacaaaaagcacatgaaaaaatgctcatcatcactgatcatcagagaaatgcaagtcaaaaccacaatgagataccatctcacaccagttagaatggcgatcattaaaaagtcaggaaacaacagcctctttagaggtcatggagccaaagaatcttatgttgacaaggacaagaggggccatctacattcaggagttccttttcaaaagtccccagcaggatttgcaaaagctgagagaggatccaggagaagtgtagtagctgcaggcctgctgccgtctctcaccagcaacatgagccggcagacaaatgacaacacatgcacggctgccacagtgccgagctaccgaatgcacagacaatatgatgctgtcctgtcctgtgcaagatgtctcttgtggcccaccctaactggaattatgcagaaaagggaattctgggaagcacagttcagccttgccatggtgacatgtaacaatgtggcaggccagaccccaccccatacaacagaaccaagaaagaaaaaaggtgtgatggcaaaactctctggggctttcactggcaaatctgtcttctcaggtgagagctcaatgggagaggaaagccctgcaggaatgcgaaatggaacaggtgctagggtggggcaggaggagagggtgggagttgggaaggaaaggcagctgaggaagaaagaactggaggtgggactccctgaattagaatctccagggagtgaggccagagtggtgtcgagctgcatgtccccctctgatgcgcaggcatatttgggacaccactccccgcccccagctgtgggccacctgggaacttgcttggctacctctagatatactgattcctgtaccttccagtggttctgtttgctgtctggatacatttggtctttgcctactcaatgtgaagatggcgaggatgaagacctttatgatggtccacttccatttaatgaatggtaa

SEQ ID NO: 7874 - DNA, 1948 bp, Homo sapiens
  SIMILAR (1)..(744): 941254mologous to Homo sapiens unknown,accession number AF149422,Smith-Waterman Score=1222.
aatctcactcaaaaccgctcaactacatggaaactgaacaacctgctcctgaatgactactgggtacataacaaaatgaaggcagaaataaagatgttctttgaaaccaacgagaacaaagatacaacataccagaatctctgggacacattcaaagcagtgtgtagagggaaatttatagcactaaatgcccacaagagaaagcaggaaagatctaaaattgacaccctaacatcacaattaaaagaactagaaaagcaagagcaaacacattcaaaagctagcagaaggcaagaaataactaaaatcagagcagaactgaaggaaatagagacacaaaaaacctttcaaaaagttaatgaatccagcagctggttttttgaaaggatcaacaaaattgatagaccgctagcaagactaataaagaaaaaaagagagaagaatcaaatagatgcaataaaaaatgataaagggtatatcaccaccgatcccacagaaatacacactaccatcagagaatactacaaacacctctatgcaaataaactagaaaatctagaagaaatggataaattcgtcggcacatacactctcccaagactaaaccaggaagaagttgaatctctgaatagaccaataacaggctctgaaattgtggcaataatcaatagcttaccaaccaaaaagagtccaggaccagatggattcacagccgaattctaccagaggtacaaggaggaactggcgggcagagacacaaccaaaaaagagaattttagaccaatatccttgatgaacattgatgcaaaaatcctcaataaaatactggcaaaccgaatccagcagcacatcaaaaagcttatccaccatgatcaagtgggcttcatccctgggatgcaaggctggttcaatatatgcaaatcaataaatgtaatccagcatataaacagaaccaaagacaaaaaccacatgattatctcaatagatgcagaaaaggcctttgacaaaattcaacaacctttcatgctaaaaactctcaataaattagtgttggaagttctggccagggcaattagtcaggagaaggaaataaagggtattcaattaggaaaagaggaagtcaaattgtccctgtttgcagacgacatgattgtatatctagaaaaccccattgtctcagcccaaaatctccttaagctgataagcaacttcagcaaagtctcaggatacaaaatcaatgtacaaaaatcgcaagcattcttatacaccaataacagacaaacagagagccaaatcatgagtgaactcccattcacaattgcttcaaagagaataaaatacctaggaatccaacttacaagggatgtgaaggacctcttcaaggagaactacaaactactgagcaaggaaataaaagaggatacaaacaaatggaagaatattccatgctcatgggtaggaagaatcaatatcgtgaaaatggccatactgcccaaggtaatttacagattcaatgccatccccatcaagctaccaatgactttcttcacagaattggaaaaagctactttaaagttcatatggaaccaaaaaagagcccgcattgccaagtcaatcctaagccaaaagaacaaagctggaggcatcacactacctgacttcgaactatactacaagactacagtaaccaaaacagcatggtactcataccaaaacagagataatagatcaatggaacagaacagagccctcagaaataacgccgcatatctacaactatctgatctttgacaaacctgagaaaaacaagcaatggggaaaggattccctatttaataaatggtgctgggaaaactggctagccatatgtagaaagctgaaactggatcccttccttacaccttatacaaaaatcaattcaagatggattaaagacttaaaacgttag

SEQ ID NO: 7875 - DNA, 4802 bp, Homo sapiens
  SIMILAR (1437)..(2882): 941254mologous to Homo sapiens putative p150,accession number U93563,Smith-Waterman Score=2457.
atgggagactttaacaccccactgtcaacattagacagatcaacgagacagaaagtcaacaaggatacccaggaactgaactcagctctgcaccaagcggacctaatagacatctacagaacactccaccccaaatcaacagaatatacatttttttcagcaccacaccacacctattccaaaattgaccacatactgggaagtaaagctctcctcagcaaatgtaaaagagcagaaattataacaaactatctctcagaccacagtgcaatcaaactagaactcaggattaagaatctcactcaaagccgctcaactacatggaaactgaacaacctgctcctgaatgactactgggtaaataacgaaatgaaggcagaaataaagatgttctttgaaaccaaaagagaacaaaggacacaacataccagaatctctgggacgcattcaaagcagtgtgtagagggaaatttatagcactaaatgcgcacaagagaaagcaggaaagatctaaaattgacaccctaacatcacaattaaaagaactagaaaagcaagagcaaacacattcaaaagctagcagaaggcaagaaataactaaaatcagagcagaactgaaggaaatagagacacaaaaaacccttcaaaaaatcaatgaatccaggagctggttttttgaaaggatcaacaaaattgatagaccgctagcaagactaataaagaaaaaaagagagaagaatcaaatagacacaataaaaaatgataaaggggatatcaccactgatcccacagaaatacaaactaccatcagagaatactacaaacacctctacgcaaataaactagaaaatctagaacaaatggatgcattcctcgacacatacactctcccaagactaaaccaggaagaagttgagtctctgaatagaccaataacaggagctgaaattgtggcaataatcaatagtttaccaaccaaaaagagtccaggaccagatggattcacagccgaattctcccagaggtacaaggaggaactggtaccattccttctgaaactattccaatcaatagaaaaagagggaatcctccctaactcattttatgaggccagcatcattctgataccaaagccaggcagagacacaaccaaaaaagagaattttagaccaatatccttgatgaacatcgatgcaaaaatcctcaataaaatactggcaaaccgaatccagcagcacatcaaaaagcttatccaccatgatcaagtgggcgtcatccctgggatgcaaggctggttcagtatacgcaaatcaataaatgtaatccagcatataaacagagccaaagacaaaaaccatatgattatctcaatagatgcagaaaaagcctttgacaaaattcaacaacccttcatgctaaaaactctcaataaattagcccaaaatctccttaagctgataagcaacttcagcaaagtctcaggatacaaaatcaatgtacaaaaatcacaagcattcctatacaccaacaacagacaaacagagagccaaatcatgagtgaactcccattcacaattgcttcaaagagaataaaatacctaggaatccaacttacaagggatgtgaaggacctcttcaaggagaactacaaaccactgctcaaggaaataaaagaggatacaaacaaatggaagaacattccatgctcatgggtaggaagaatcaatatcgtgaaaatggccatactgccccaggtaatttacagattcaatgccatccccatcaagctaccaatgactttcttcacagaattggaaaaaactactttcaagttcatatggaaccaaaaaagagcccgcatcgcccaagtccaatccctaagcccaaaagaacaaaagccgggggcatcaaccctacctgacttcaaactatactacaaggctactgtaaccaaaacagcatggtactggtaccaaaacagagatatagatcaatgggacagaacagagccctcagaaataacgccgcacatctacaactatgtgatctttgacaaacctgagaaaagcaagcaatggggaaaggattccctatttaataaatggtgctgggaaaactggatagccatatgtagaaagctgaaactggatcccttccttacgccttatacaaaaatcaattcaagatggattaaagacttaaatgttagacctaaaaccataaaaaccctagaagaaaacctaggcattaccattcaggacataggcacgggcaaggacttcatgtctaaaacaccaaaagcaatggcaacaaaagccaaaattgacaaacgggatctaattaaactaaacagcttctgcacagcaaaagaaactaccatcagagtgaacaggcaacctacaaaatgggagaaaattttcacaacctactcatctgacaaagggctaatatccagaatctacaatgaactcaaacaaatctacaagaaaaaaacaaacaaccccatcaaaaagtgggcgaaggacatgaacagacacttctcaaaagaacacatttatgcagccaaaaaacacatgaaaaaatgctcaccatcactggccatcagagaaatgcaaatcaaaaccacaatgagataccatctcacaccagttagaatggcaatcattaaaaagtcaggaaacaacaggtgctggagaggatgtggagaaataggaacacttttacactgttggtgggactgtaaactagttcaaccattgtggaagtcagtgtggcgattcctcagggatctagaactagaaataccatttgacccagccatcccattactgggtatatacccaaaggactataaatcatgctgctataaagatacatgcacacctctcaagaaacacatcagctttcatctttatcagtatgacactgacatgataggaaatgctgggctggtgattcagcagccatccattttacagtcagaggacaagtcgtacaatggtggaggaataggttcttcaaataggatcatggacttcttggaggagccaatccctggtgtagggacctatgatgatttcaatacaattgattgggtgagagagaagtctcgagaccgggataggcaccgagagggagcctttgcctacatagtcaattatttcatgtacgtcctctgggctctcctatttgccttccttgccgtatctcttgtcaaggtgtttgcgccttatgcctgtggctctggaatccctgagataaaaactatcttgagtggtttcattattaggggctatttgggtaagtggactctggttatcaaaaccatcaccttggtgctggcagtgtcgtctggcttgagcctgggcaaagagggccctctagtgcacgtggcttgctgctgtgggaacatcctgtgccactgcttcaacaaatacaggaagaatgaagccaagcgcagagaggtcttgtcggctgcagcagcagctggtgtatctgtagcctttggagcacctataggtggagtattattcagccttgaagaggtcagctactattttcccctcaaaacattgtggcgttcattctttgctgccttggtggcagcattcactctacgctccatcaatccatttgggaacagccgcctggtactattttatgtggagtttcacaccccatggcatctctttgagctcgtgccattcattctgctgggcatatttggtggtctgtggggagcactgtttatccgcacaaacattgcctggtgtcggaagcgaaagaccacccagttgggcaagtatcctgttatagaggtactcgtcgtgacagccatcactgccatcctggctttccccaatgaatacactcggatgagcacaagtgagctcatttctgagctgtttaatgactgtggccttctggactcctccaagctctgtgattatgagaaccgtttcaacacaagcaaagggggtgaactgcctgacagaccggctggcgtgggagtctacagtgcaatgtggcagctggctttaacactcatactgaaaattgtcattactatattcacctttggcatgaagatcccttctggcctctttatccctagcatggctgttggtgctatagcaggtcgacttctaggagtaggaatggaacagctggcttattaccaccaggaatggaccgtcttcaatagctggtgtagtcagggagctgattgcatcacccccggcctttatgcaatggttggggctgcagcctgcttagccaaagaagagtttgctcataagaccctggcaatggatgtgatgaaaccccggagaaatgatcctttgttgactgtccttactcaggacagtatgactgtggaagatgtagagaccataatcagtgaaaccacttacagtggcttcccagtggtggtatcccgggagtcccaaagacttgtgggctttgtcctccgaagagatctcattatttcaattgaaaatgctcgaaagaaacaggatggggttgttagcacttccatcatttatttcacggagcattctcctccattgccaccatacactccacccactctaaagcttcggaacatcctcgatctcagccccttcactgtgactgaccttacacccatggagatcgtagtggatattttccgaaagctgggactgcggcagtgcctggttacacacaacgggcgattgcttggaatcattaccaaaaaggatgtgttaaagcatatagcacagatggcgaaccaagatcctgattccattctcttcaactag

SEQ ID NO: 7876 - DNA, 3148 bp, Homo sapiens
  SIMILAR (2468)..(2866): 761254mologous to Homo sapiens putative p150,accession number U93563,Smith-Waterman Score=554.
atgggagactttaacaccccactgtcaacattagacagatcatcgagacagaaagttaacaaggatacccaggaattgaactcaactctgcaccatgcggacctaatagacatctacagaactctccacccgaaatcaactgaatatacatttttttcagcaccacaccacacctattccaaaattgaccacgtagttggaagtaaagctctcctcagcaaatgtaaaagaacagaaattataacaaactgtctctcagaccacagtgctatcaaaccagaactcaggattaagaaactcactcaaaaccgctcaactacatggaaactgaataacctgctcctgaatgactactgggtgcataacaaaatgaaggcagaaataaagatgttctttgaaaccaacgagaacaaagacacaacataccagaatctctgggacacattcaaagcagtgagtagagggaaatttatagcactaaatgcccacaagagaaagcagaaaagatgcaaaattgacaccctagcatcacaattaaaagaagtagaaaagcaagagcaaacacattcaaaagctagcagaaggcaagaaataactaaaataagagcagaactgaaggaaatagagacacaaaaaacccttcaaaaaattaatgaatccaggagctggtttcttgaaaggatcaacaaaattgatagaccactagcaagactaataaagaagaaaagagagaagaatcaaatagatgtaataaaaaatgataaaggggatatcaccactgatcccacagaaatacaaactaccatcagagaatactacaaacacctctacgcaaataaactagaaaatctagaagaactggataaattcctcgacacacacaccctccaaagactaaaccaggaagaagttgaatccctgaatagaccaataacaggctctgaaattgtggcaataatcaatagcttaccaaccaaaaagagtccaggaccagatggatccacagccgaattctaccagaggtacaaggaggagctgttaccattccttcttaaattattccaatcaatagaaaaagagggaatcctccctaactcattttatgaggccagcatcatcctgataccaaagccgggcagagacacagccaaaaaagagaattttagaccaatatccttgatgaacattgatgcaaaaatcctcaataaaatactggcaaaccaaatccagcagcacatcaaaaagcttatatacaccatgatcaagtgggcttcatccctgggatgcaaggctgtgttggaagttctggccagggcaattaggcaggagaaggaaataaagggtattcaattaggaaaagaggaagtcaaattgtccctgtttgcagatgacatgattgtatatctagaaaaccccatcgtctcagcccaaaatctccttaagctgataagcaacttcagtaaagtctcaggatacaaaatcaatgtacaaaaatcacaagcattcttatacaccaataacagacaaacagagagccaaatcatgagtgaaatcccattcacaattgtttcaaagagaataaaatacctaggaatccaacttacaagggacatgaaggacctcttcaaggagaactacaaaccactgctcaatgaaataaaagaggatacaaacaaatggaagaacattccatgctcatggctaggaagaatcaatatggtgaaaatggccatactgcccaaggtaatttatagattcaatgccatcctcatcaagctagcaatgactttcttcacagaatcggaaaaaactactttaaagttcatatggaaccaaaaaagagcctgcatcgccaagtcaatcctaagccaaaagaacaaagtcataggcatcacgctacctgacttcaaactatactacaaggctatagtcaacaaaacagcatggtactggtaccaaaacagagatatagatcaatggaacagaacagagccctcagaaataacaccgcatatctacaactatctgatctttgacaaacctgagaaaaacaagcaatggggaaaggattccctatttaataaatggtgctgggaaaactggctagccatatgtagaaagctgaaactggatcccttccttacaccttatacaaaaattaattcaagatggattaaagacttccatgttagacctaaaaccataaaaaccctagaagaaaacctaggcattaccattcaggacataggcatggacaaggacttcatgtctaaaacaccaaaagcaatggcaacaaaagccaaaattgacaaatgggatctaatcaaactaaagagcttctgcagagcaaaagaaactaccatcagagtgaacaggccacctacagaatgggagaaaattttcgtaacctactcatctgacaaagggctaatatccagaatctacaatgaactcaaacaaatttacaagaaaaaaacaaacaaccccatcaaaaagtgggcaaaggacatgaacagacacttctcaaaagaatacatttatgcagccaaaaaacacgtggaaaaaacgctcatcatcactggccatcagagaaatgcaaatcaaatccacaatgagataccatctcacaccagttagaatggtgatcattaaaaagtcaggaaacaacaggtgctggagaggatgtggagaaataggaacacttttacactgttggtgggactgtaaactagttcatccattgtggaagtcagtgtggcgattcctcagggatctagaactagaaataccatttgacccagccatcctattactgggtatatacccaaaggattataaatcatgctgctataaagacacatgcacacatgagaaagcagagatccagaaaagtaaaggaatcagagattatggagaaataggtactagaactgaggatatggactcccagttcagacctctttccgttgttcgggcacaaattatcccctttgaatttccctgggaaggaatacctctgggtggacccttcccccggcattcctgcagctaccctgtgggcctagcccttttgtaccacagtagctcagcagctggaccagtgagaggacacctctccctgcagtggaattccaggatgactagttga

SEQ ID NO: 7877 - DNA, 2671 bp, Homo sapiens
  SIMILAR (1097)..(2485): 951254mologous to Homo sapiens putative p150,accession number U93564,Smith-Waterman Score=2293.
atgcacaatacagatggaaacagatttctgagccactggggctaccgtcaagctctctccatctccaagccagcaagtgcttctttgcaccccagctctaaaacaaagcccttggggacacaatcaaagacagtagttgccaagaggaatagggagcatggaaagaaggaacgcagttcctcaccagcaatggaacaaagctggatggagaatgattttgacgagctgagagaagaaggcttcagacgatcaaattactctgagctacgggaggacattcaaaccaaaggcaaagaagttgaaaactttgaaaaaaatttagaagaatgtataactagaataaccaatacagagaagtgcttaaaggagctgatggagctgaaaaccaaggctcgagaactacgtgaagaatgcagaagcctcaggagccgatgcgatcaactggaagaaaggagaaagcaggaaagatccaaaattgacaccctaacatcacaattaaaagaactagaaaagcaagagcaaacacattcaaaagctggcagaaggcaagaaataactaaaatcagagcagaactgaaggaaatagagacacaaaaaacccttcaaaaaatcaatgaatccaggagctggttttttgaaaggatcaacaaaattgatagaccgctagcaagactaataaagaaaaaaagagagaagaatcaaatagacacaataaaaaaatgataaagggaatatcaccaccgatcccacagaaatacaaactaccatcagagaacactataaacacctctatgcaaataaactagaaaatctagaaggaatggataaattcctggacacatacaccctcccaagattaaaccagaaagaagttgaatccctgaatagaccaataacaggctctgaaattgtggcaataatcaatagtttaccaaccaaaaagagtccaggaccagatggattcacagccgaattctaccagaggtacaaggaggaactgcatataaacagagccaaagacaaaaaccacatgattatctcaatagatgcagaaaaagcctttgacaaaattcaacaacccttcatgctaaaaactctcaataaattagtgttggaagttctggccagggcaatcaggcaggagaaggaaataaagggtattcaattaggaaaagaggaagtcaaattgtccctgtttgcagacgacatgatcgtttatctagaaaaccccatcgtctcagcccaaaatctccttaagctgttaagcaacttcagcaaagtctcaggatacaaaatcaatgtacaaaaatcacaagcattcttatacaccaacaacagacaaacagagagccaaatcatgagtgaactcccattcacaattgcttcaaagagaataaaatacctaggaatccaacttacaagggatgtgaagcacctcttcaaggagaactacaaaccactgctcaaggaaataaaagaggacacaaacaaatggaagaacattccatgctcatgggtagaaagaatcaatatcgtgaaaatggccatactgcccaaggtcatttatagattcaatgccatccccatcaagctaccaatgactttcttcacagaattggaaaaaactactttaaagttcatatggaaccaaaaaagagcccgcatcgccaagtcaatcctaagccaaaagaacaaagctggaggcatcacgctacctgacttcaaactatactacaaggctacagtaaccaaaacagcatggtactcgtaccaaaacagagatatagaccaatggaacagaacagagccctcagaaatactgccacgtatctacaactatctgatctttgacaaacctgagaaaaacaagcaatggggaaaggattccctatttaataaatggtgctgggaaaactggctagccatatgtagaaagctgaaactggatcccttccttaaaccttatacaaaaattaagtcaggatggattaaagacttaaatgttagacctaaaaccataaaaaccctagaagaaaacctaggcattaccattcaggacataggcatgggcaaggacttcatgtctaaaacaccaaaagcaatggcaacaaaagcaaaaattgacaaatgggatctaattaaactaaagagcttctgcacagcaaaagaaactaccatcagagtgaaccggcaacctacagaaagggagaaaatttttgcaacctactcatctgacaaagggctaatatccagaatctacaaagaactcaaacaaatttacaagaaaagaacaaacaacctcatcaaaaagtgggtgaaggatatgaacagacacttctcaaaagaagacgtttatgcagccaaaaaacacatgaaaaaatgctcatcatcactggccatcagagaaatgcaaatcaaaaccacaatgagataccatctcacaccagttagaatggcaatcattaaaaagtcaggaaacaacagaataaccattgttctgctccccggttcactaatagtgcggtcatttcacgtaactttaaatgcgattcttcttcatccgggtctcaccctctttagtccgtctgctggccgcagagatatcccaagagtagcattctcctacttggctttttcagctcaaccttctcacaacaccccagttaattaa

SEQ ID NO: 7878 - DNA, 2963 bp, Homo sapiens
  SIMILAR (136)..(1584): 921254mologous to Homo sapiens putative p150,accession number U93569,Smith-Waterman Score=2322.
atgaataattcaatcaaggaaaaagtgaaactcagtttaactaaatgggaaatgcaaacaaaacctaacaataatactgttgatcttaaagatgcccaagaggtcaatctcacaagcacggattacagaaagcaacatgtcatgctgcctaccgaaatcaattcagacgactctcttttaaaaattggggttattagactggcaaattggataaagagtcaagacccatcagtgtgctgtaatcaggaaacccatctcacgtgcagagacacacataggctcaaaataaaaggatggaggaagatctaccaagcaaatggaaaacaaaaaaaggcaggggttgcaatcctagtctccgataaaacagacttcaaaccaacaaagatcaaaagagacaaagaaggccattacataatggtaaagggatcaattcaacaagaagagctaactatcctaaatacatatgcacccaatacaggagcacccagattcataaagcaagtcctgagtgacctacaaagagacttagactcctacacattaataatgggagactttaacaccccactgtcaacattagacagatcaacgagacagaaagtcaacaaggatacccaggaattgaactcagctctgcaccaagtggacctaatagacatctacagaactctccaccccaagtcaacagaatatacatttttttcagcaccacaccacacctattccaaaattgaccacatacttggaagtaaagctctcctcagcaaatgtaaaagaacagaaattataacaaactatctctcagaccacagtgcaatcaaactagaactcaggattaagaatctcattcaaaaacgctcaactacatggaaactgaacaaactgctcctgaacgactactgggtacataacgaactgaaggcagaaataaagatgttctttgaaaccaacgagaacaaagacacaacataccagaatctctgggacgcattcaaagcagtgtgtagagggaaatttatagcactaaacgcccacaagagaaagcaggaaagatccaaaattgacaccctaacattacaattaaaagcactagaaaagcaagagcaaacacattcaaaagctagcagaaggcaagaaataactaaaatcagagcagaactgaaggaaatagagacacaaaaaacccttcaaaaaattaatgaatccaggagctggttttttgaaaggatcaacaaaattgataaaccgctagcaagactaataaagaaaaaaagagagaagaatcaaatagacacaataaaaaatgatagaggggatatcaccaccgatcccacagaaatacagactaccatcagagaatactacaaacacctctatgcaaataaactagaaaatctagaagaaatggataaattcctcgacacatacactctcccaagactaaaccaggaagaagttgaatctctgaatagaccaataacaggatctgaaattgtggcaataatcaatagcttaccaacgaaaaagagtccaggaccagatggattcacagccgaattctaccagaggtacaagcaggaactgcatataaacagagccaaagacaaaaaccacatgattatctcaatagatgcagaaaaagcctttgacaaaattcaacaacccttcatgctaaaaactctcaataaattaggtattgatgggacgtatttcaaaataataagagctatctatgacaaacccacagccaatatcatactgaatgggcaaaaactggaagcattccctttgaaaactggcacaagacagggatgccctctctcaccggtcctattcaacatagtgttggaagttctggccagggcaattaagcaggagaaggaaataaagggtattcaattaggaaaagaggaagtcaaattgtccctgtttgcagacgacatgattgtatatctagaaaaccccattgtctcaggccaaaatctccttaagctgataagcaacttcagcaaagtctcaggatacaaaatcaacgtacaaaaatcacaagcattcttatacaccagcaacagacaaacagagagccaaatcatgagtgaactcccattcacaattgcttcaaagagaataaaatacctaggaatccaacttacaagggacgtgaaggacctcttcaaggagaactacaaaccactgctcaaggaaataaaagaggatacaaacaaatggaagaacattccatgctcatgggcaggaagaatcaatatcgtgaaaatggccatactgcccaaggtaatttacagattcaatgccatccccatcaagctaccaatgcctttcttcacagaaatggaaaaaaactactttaaagttcatatggaaccaaaaaagagcccgcatcaccaagtcaatcctaagccaaaagaacaaagctggaggcatcacactacctgacttcaaactatactacaaggctacagtaaccaaaacagcatggtactggtaccaaaacagagatatagatcaatggaacagaacagagccctcagaaataatgctgcatatctacaactatgtgatctttgataaacctgagaaaaacaagcaatggggaaaaggattccctatttaataaatggtgctgggaaaactggctagtcatatgtagaaagctgaaactggatcgcttccttacaccttatacaaaaattaattcaagatggcttaaagacttagacattagacctaaaaccataaaaaccctagaagaaaacatacgcattaccattcaggacataggcatgggcaaggacttcatgtctaaaacaccaaaaggaatggcaatgaaagccaaaattgacaaatgggatctaattaaactaaagagcttctgcacagcaaaagaaactaccatcagagtgaacaggcaacctacaaaatgggagaaaattttcgcaacctaa

SEQ ID NO: 7879 - DNA, 4220 bp, Homo sapiens
  SIMILAR (1208)..(2230): 931254mologous to Homo sapiens ORF2 contains a reverse transcriptase domain.; ORF2,accession number M80341,Smith-Waterman Score=1736.
atgggagactttaacaccctactgtcagcattagacagatcaacgagacagaaagttaacaaggatattcaggaattgaactcagctctgcaccaagcagacctaatagacatctacagaactctccaccccaaatcaacagaatatacattcttctcagcaccacaccgcacttattccaaaattgaccacttagttggaagtaaagcactcctcaggaaatgtaaaagaacagaaattataacaaactgtctctcagaccacagtgcaatcaaactagaactcaggattaagaaactcactcaaaaccactcaactacatggcaactgaacaacctgctcttgaatgactactgggtacataacgaaatgaaggcagaaataaagatgttctttgaaaccaatgaaaacaaagacacaacataccagaatctctggtatgtcaaagataccagaatctctggtatgctctggtatgtgaaagcagtgtgtagagggaaatttatagcactaaatgcccacaagagaaagcaggaaagatctaaaattgacaccctaacatcacaattaaaagaactagagaagcaagagcaaacacattcaaaaactagcagaaggcaagaaataactaagatcagagcagaactgaaggaaatagagacacaaaaaacccttcaaaaaatcaatgaatgcaggagctggttttttgaaaagatcaacaaaattgatagaccgctagcaagactaattaagaagaaaagagagaagaatcaaatagatgcaataaaaaatgacaaaggggatatcatcaccgatcccacagaaatacaaactaccatcagagaatactataaacacctctacggaaataaactagaaaatctagaagaaatggataaattcctggacacatacaccctcccaagactaaaccaggaagaagttgaatctctgaatagaccaataacaggctctgaaattgaggcaataattaatagcttaccaaccaaaaaaagtccaggaccagatggattcacagccgaattctaccagaggtacaaggaggagctgagaataaaatacctaggaattcaacttacaagggacgtgaaggaccttttcaaggagaactacaaaccactgctcaatgaaataaaagaggatacaaacaaatggaagaacattccatgctcatgggtaggaagaaatcaatatcatgaaaatggccatactgcccaaggtaatttatagattcaatgccatccccatcaagctaccaatgactttcttcacagaattggaaaaaactactttaaagttcatatggaaccaaaaaagagcccgcatcgccaagtcaatcctaagccaaaagaacaaagctggaggcatcacgctacctgacttcaaactatactacaaggctacagtaaccaaaacagcatggtactggtaccaaaacagagatacagatcaatggaacagaacagagccctcagaaataatgctgcatatctacaaccatctgatctttgacaaacctgacaaaaacaagcaatggggaaaggattccctatttaataaatggtgctgggaaaactggctagccatatgtagaaagctgaaactggatcccttccttataccttatacaaaaattaattcaagatggattaaagacttaaacgttagacctaaaaccataaaatccctagaagaagacctaggcaataccattcaggacataggcatgggcaaggacttcatgtctaaaacaccaaaagcaatggcaacaaaagccaaaattgacaaatgggatctaattaaactaaagagcttctgcacagcaaaagaaactaccatcagagtgaacaggcaacctacagaatgggagaaattttttgcaatctactcttctgacaaagggctcatatccagaaggtacaatgaactcaaacaaatttacaagaaaaaaacaaacagccccatcaaaaagtggacaaaggatatgaacagacacttctcaaaagaagacatttatgcagccaaaagacacatgaaaaaatgctcatcatcactggccatcagagaaatgcaaatcaaaaccacaatgagataccatctcacaccagttagaatggcgatcattaaaaagtcaggaaacaacaggtgctggagaggatgtggagaaataggaacacttttacactgttgggtggactgttctattattgtcaaggtcccatcttcacttcaagctcatttacagttatcagggaaagaggttgatgtgaactcagaagtccatgttcaggaaatggctgaagttcgtaaagatgatgttgtaacagtgactgaattctaccagacattcaaagaagaattggtaccaatcctattgacactattccgcaagacagagaaagaaggaacactccctaattcatcctatgaagctagcatcaccctaataccaaaaccaggaaaggatacaaccaaaaaagaaaactacaggctgatatccctgatgaacacagacgctaaaattcttaacaaaatactagctaaccgaatccaacaacatatcaaaaagacaatccaccatgatcaagtgggttccataccagggatggagggatggtttaacatatgcaagtcaataaatgtgatacaccacataaacagaattaaaaacaaaaatcacatgatcatctcaatagatgcagaaaaagcattagacaaaatccagcatctctttatgattaaaactctcagcaaaatcggcatacaagggacatacctcaatgtaataaaagccatctatgacaaacccacagctaacataatactgaatggggaaaagttgaaagcattccctctgagaaatgaaacaagacaaggatgccctctctcaccactcctcttcaacacagtactgaaagtcctagccagagcagtcagacaagagaaggaaataaagggtatccaaattggtaaagaggaagtcatactgtcactgtttgctgatgatatgattgtttacctcaaaaaccctaaagactcctctagaaagctcctagaactgataaaaggattcaacaaagtttccagatacaaaattaatgtacacaaatcagtagctcttctaaacaccaacagcaaccaagcagagaatcaaatcaataactcaaccccttttacaatagctgcaaaaaaaaatgaagtacttaggaatatacctagccaaggaggtgaaagacctctacaaggaaaactacaaaccactgctcaaggaaataaaagaggatacaaacaaatggaagaacattccctgctcatgggtaggaagaatcaatatcgtgaaaatggcctcactgcccaagaattggaaaaaaactactttaaagtttatatggaaccaaaaaagaacctgcatcgccaagtcaatcctaagccaaaagaacaaagctggaggcatcacactacctgacttcaaactatactacaaggctacagtaaccaaaagagcatggtactggtaccaaaacagagatatagatcaatggaacagaacagagccctcagaaataacgccacagatctacaactatctgatctttgacaaacctgagaaaaacaagcaatggggaaaggattccctatttaataaatggtgctgggaaaactggctagccatatgtagaaagctgaaactggatcccttccttataccttatacaaaaatcaattcaagatggattaaagtcttaaatgttagacctaaaaccataaaaaccctagaagaaaacctaggcattaccattcaggacatagacatgggcaaggacttcatgtccaaaacaccaaaaggaatggcaacaaaagccaaaattgacaaatgggatctaattaaactaaagaacttctgcacagcaaaagaaactaccatcagagtgaacaggcaacctacaaaatgggagaaaattttcgcaacatacttatctgataaagggctaatatccagaatctacaatgaactcaaacaaattgacaagaaaaaaacaaccaaaccccatcaaaaagtgggcaaaggacatgaacagacacttctcaaaagaagacatttatgcagccaaaaaacacatgaaaaaatgttcatcgtcactggccatcagagaaatgcaaatcaaaaccacaatgagataccatctcacaccagttag

SEQ ID NO: 7880 - DNA, 3256 bp, Homo sapiens
  SIMILAR (712)..(2112): 961254mologous to Homo sapiens putative p150,accession number U93570,Smith-Waterman Score=2328.
atggggaaaaaacagaacagaaaaactggaaactctaaaacgcagagcgcctctcctcctccaaaggaacgcagttcctcaccagcaacggaacaaagctggatggagaatgattttgacgagctgagagaagaaggcttcagacgatcaaattactctgagctacgggaggacattcaaaccaaaggcaaagaagttgaaaactttgaaaaaaatttagaagaatgtataactagaataaccaatacagagaagtgcttaaaggagctgatggagctgaaaaccaaggctcgagaactacgtgaagaatgcagaagcctcaggagccgatgcgatcaactggaagaaagggtatcagcaatggaagatgaaatgaatgaaatgaagcgagaagggaagtttagagaaaaaagaataaaaagaaatgagcaaagcctccaagaaatatgggactatgtgaaaagaccaaatctacgtctgattggtgtacctgaaagtgatgtggagaatggaaccaagttggaaaacactctgcgggatattatccaggagaacttccccaatctagcaaggcaggccaacgttcagattcaggaaatacagagaacgccacaaagatactcctcgagaagagcaactccaagacacataattgtcagattcaccaaagttgaaatgaaggaaaaaatgttaagggcagccagagagaaagacagatcaacgagacagaaagtcaacaaggatacccaggaattgaactcagctctgcaccaagcggacctaatagacatctacagaactctccaccccaaatcaacagaatatacatttttttcagcaccacaccacacctattccaaaattgaccacatagttggaagtaaaactctcctcagcaaatgtaaaagaacagaaattataacaaactatctctcagaccacagtgcaatcaaactagaactcaggattaagaatctcactcaaagccgctcaactacatggaaactgaacaacctgctcctgaatgactactgggtacataacgaaatgaaggcagaaataaagatgttctttgaaaccaacgagaacaaagacaccacataccagaatctctgggacgcattcaaagcagtgtgtagagggaaatttatagcactaaatgcctacaagagaaagcaggaaagatccaaaattgacaccctaacatctcaattaaaagaactagaaaagcaagagcaaacacattcaaaagctagcagaaggcaagaaataactaaaatcagagcagaactgaaggaaatagagacacaaaaaacccttcaaaaaatcaatgaatccaggagctggttttttgaaaggatcaacaaaattgatagaccgctagcaagactaataaagaataaaagagagaagaatcaaatagacacaataaaaaatgataaaggggatatcaccaccaatcccacagaaatacaaactaccatcagagaatactacaaacacctctatgcaaataaactagaaaatctagaagaaatggatacattcctcgacacatacactctcccaagactaaaccaggaagaagttgaatctctgaatagaccaataacaggctctgaaattgtggcaataatcaatagtttaccaaccaaaaagagtccaggaccagatggattcacagccgaattctaccagaggtacaaggaggaactggtaccattccttctgaaactattccaatcaatagaaaaagagggaatcctccctaactcattttatgaggccagcatcattctgataccaaagccgggcagagacacaaccaaaaaagagaattttagaccaatatccttgatgaacattgatgcaaaaatcctcaataaaatactggcaaaccgaatccagcagcacatcaaaaagcttatccaccatgatcaagtgggcttcatccctgggatgcaaggctggttcaatatacacaaatcaataaatgtaatccagcatataaacagagccaaagacaaaaaccacatgattatctcaatagatgaagaaaaagcctttgacaaaattcaacaacccttcatgctaaaaactctcaataaattagagaataaaatacctaggaatccaacttacaagggatgtgaaggacctcttcaaggagaggtccttgaaccactgctcaatgaaataaaagaggatacaaacaaatggaagaacattccatgctcatgggtaggaagaatcaatatcgtgaaaatggccatactgcccaaggtaatttatagattcaatgccatccccccttcaaggttacccaatgactttcttcacagaattggaaaaaactaccttttaaaggtcattatggaaccaaaaaaggagcccgcatcgccaaggcaatcctaagccaaaagaacaaagctggaggcatcacactacctgacttcaaactatactacaaggctacagtaaccaaaacagcatggtactggtaccaaaacagagatatagatcaatggaacagaacagagccctcagaaataacgccgcatatctacaactatctgatctttgacaaacctgagtaaaacaagcaatggggaaaggattccctatttaataaatggtgctgggaaaaactggctagccatatgtagaaagctgaaattgaatcccttccttacaccttatacaaaaatcaattcaagatggattaaagatttaaacgttagacctaaaaccataaaagaccctagaagaaaacctaggcattgccattcaggacataggcatgggcaaggacttcatgtctaaaacaccaaaagcaatggcaacaaaagacaaaattgacaaacgggatccgattgaactaaagagcttctgcacagcaaaggaaaatatcatcggaatgaacaggcaacctacaaaatgggagaaaattttcgcaacctactcatctgacaaagggctaatatccagagtctacagtgaactcaaacaaatttacaggaaaaggacaaacaaccccatcaaaaagtggggcaaggacatgaacagacacttctcaaaagaagacatttatgcagccaaaaaacacatgaaaaaatgctcatcatcactggccatcagagaaatgcaaatcaaaaccactatgagatatcatctcacaccagttagaatggcaatcattaaaaagtcaggaaacaacagggacatggatgatattggaaatcatcgttctcagtaa

SEQ ID NO: 7881 - DNA, 3229 bp, Homo sapiens
  SIMILAR (1630)..(2595): 951254mologous to Homo sapiens putative p150,accession number U93563,Smith-Waterman Score=1612.
atgggagactttaacaccccactgtcaacattagacagatcaacgagacagaaagccaacaaggatacccaggaattgaactcagctctgcaccaagtggacctaatagacatctacagaactctccaccccaaatcaacagaatatacattcttttcagcaccacaccacacctattccacaactgaccacatacttggaagtaaagctctcctcagcaaatgtagaagaacagaaattataacaaactatctctcagaccacagtgcaatcaaactagaactcagaattaagaatctcactcaaaaccgctcaactacatggaaactgaacaacctcctcctgaatgactacggggtgcataatgaaatgaaggcagaaataaagatgttctttgaaaccaatgagaacaaagacacaacataccagaatctcttgggacgcattcaaagcagtgtgtagagggaaatttatagcactaaatgcccacaagagaaagcaggaaagatccaaaattgacaccctaacatcacaattaaaagaactagaaaagcaagagcaaacacattcaaaagctagcagaaggcaagaaataactaaaatcagagcagaactgaaggaaatagagacacaaaaatcccttcaaaaaaatcaatgaatccaggagctggttttttgaaaggatcaacaaaattgatagaccactagcaagactaataaagaaaaaaagagagaagaatcaaatagacacaataaaaaatgataaaggggatatcaccaccgatcccacagaaatacaaactaccatcagagaatactacaaacacctctatgctaataaactaaaaaatctagaagaaatggataaattcctcgacacatacaccctcccaagactaaaccaggaagaagttgaatctctgaatagaccaataacaggatctgaaattgtgacaataatcaatagcttaccaaccaaaaagagtccaggaccagatggattcacagccgaattctaccagaggtacaaggaggaactggtaccattccttctgaaactattccaatcaatagaaaaagagggaatcctccctaactcattttatgaggccagcatcattctgataccaaagccaggcagagacacaaccaaaaaagagaattttagaccaatatccttgatgaacattgatgcaaaaatcctcaataaaatactggcaaaccgaatccagcagcacatcaaaaagcttatccaccatgatcaagtgggcttcatccctgggatgcaaggctggttcaatatacgcaaatcaataaattgtaatccagcatataaacagagccaaagacaaaaaccacatgattatctcaatagatgcagaaaaagcctttgacaaaattcaacaacgcttcaggctaaaaactctcaataaattaggtattgatgggacgtatttcaaaataataagagctatctatgacaaacccacagccaatatcatactgaatgggcaaaaactgaaagcattccctttgaaaactggcacaagacagggatgccctctctcaccactcctattcaacatagtgttggaagctctggccagggcaattaggcaggagaaggaaataaaggcccaaaatctccttaagctgataagcaacttcagcaaagtctcaggatacaaaatcaatgtacaaaaatcacaagcattcttatacaccaataacagacaaacagagagccaaatcatgagtgaactcccattcataattgcttcaaagagaataaaatacctaggaatccaacttacaagggacgtgaaggacctcttcaaggagaactacaaaccactgatcaaggaaataaaagaggatacaaacaaacggaagaacattccatgctcacgggtaggaagaatcaatatcgtgaaaatggccatactgcccaaggtaatttacagattcaatgccatccccatcaagctaccaatgactttcttcacagaattggaaaaaactactttaaagttcatatggaaccaaaaaagagcccacatcgccaagtcaatcctaagccaaaagaacaaagctgggggcatcacactacctgacttcaaactatactacaaggctacagtaaccaaaacagcatggtactcgtaccaaaacagagatatagatcaatggaacagaacagagccctcagaaataacgccacatatctacaactatctgatctttgacaaacctgagaaaaacaagcaatggggaaaggattccctatttaataaatggggctgggaaaactggctagccatatggagaaagctgaaactggatcccttccttacaccttatacaaaaatcaattcaagatggattaaagacttaaacgttagacctaaaaccataaaaaccctagaagaaaacctaggcattaccattcaggacataggcatgggcaaggacttcatgtctaaaacaccaaaagcaatggcaacaaaagacaaaattgacaaatgggatctaatgaaactaaagagcttctgcacagcaaaagaaactaccatcagagtgaacaggcaacctacagagaggggagaaaattttcgcaacctactcatctgacaaagggctaatatccagaatccacaatgaactcaaacaaatttacaagaaaaaaacaaacaaccccaacaaaacgtgggcgaaggacatgaacagacacttctcaaaagaagacatttatgcagccaaaaaacacatgaaaaaatgctcatcatcactggccatcagagaaatgcaaatcaaaaccacaatgagataccatctcacaccagttagaatggcagtcattaaaaagtcaggaaacaacagggacatggatgaaactggaaaccatcattctcagcaaactgtcacaaggacaaaaaaccaaacaccgcatattctcactcatacgtgggaactgaacaatgagatcacatggacacaggaaggagaatatcacactctggggactgtgacatcagaactccaggttctctggtctttggattctgggacttacagcagtgggccccttgtgttctcaggtttggggcttgagagttacacgatttgctgtcctgagtctgagaccttgggacttggactgaaccacactaccaacttccttagttctccaacttgcagacaacttaatatgggacttcttagcttctaa

SEQ ID NO: 7882 - DNA, 2911 bp, Homo sapiens
  SIMILAR (1)..(1632): 941254mologous to Homo sapiens putative p150,accession number U93563,Smith-Waterman Score=2643.
atgggagactttaacaccccactgtcaacattagacagaacaaccagacagaaagtcaaccaggatacccaggaattgaactcagctctgcaccaagcagacctaatagacatctacagaacactccactccaaatcaacagaatatacatttttttcagcaccacaccacacctattccaaaattgaccacatacttggaagtaaagctctcctcagcaaatgtaaaagaacagaaattataacaaactatctctcagaccacagtgaaatcaaactagaactcaggattaagaatctcactcaaaactgctcaactacatggaaactgaacaacctgctcctgaatgactactgggtacctaatgaaatgaaggcagaaataaagatgttctttgaaaccaatgagaacaaagacacaacatacccaaatctctgggacgcattcaaagcagcgtgtagagggaaatttatagcactaaatgcccacaagagaaagcaggaaagatccaaaattgacaccctagtatcacaattaaaagaactagaaaagcaagagcaaacacattcaaaagctagcagaaggcaagaaataactaaaatcagagcagaactgaaggaaatagagacacaaaaaacccttcaaaaaattaatgaatccaggagctggttttttgaaaggatcaaaaaaattgatagaccgctagcaagactaataaaggaaaaaagagagaagaatcaaatagacgcaataaaaaatgataaaggggatatcaccaccaatcccacagaaatacaaactaccatcagagaatactataaacacctctacacaaataaactagaaaatctagaagaaatggataaattcctcgacacatacactctcccaagactaaaccaggaagaagttgaatctctgaatagaccaataacaggatctgaaattgtggcaataatcaattgcttaccaaccaaaaagagtccaggaccagatggattcacagctgaattctaccagaggtacaaggaggaactggtaccattccttctgaaactattccaatcaatagaaaaagagggaatcctccctaactcattttatgaggccagcatcattctgataccaaagcctgacagagacacaagcaaaaaagagaattttaggccaatatccttgatgaacattgatgcaaaaatcctcaataaaatactggcaaaccgaatccagcagcacatcaaaaagcttatccaccatgatcaagtgggcttcatccctgggatgcaaggctggttcaatatacgcaaatcaataaatgtaatccagcatataaacagagccaaagacaaaaaccacctgattatctcaatagatgcagaaaagccctttgacaaaattcaacaatgcttcatgctaaaaactctcaataaattagttatcgatgggacatatttcaaaataataagagctatctatgacaaacccacagccaatatcatactgaatgggcaaaaactggaagcattccctttgaaaacgggcacaagacatggatgccctttctcaccactcctattcaacatagtgttggaagttctggccagggcaattaggcaggagaaggaaataaaggagaataaaatacctaggaatctaacttacaagggatgtgaaggacctcttcaaggagaactacaaaccactgatcaaggaaataaaagagaatacaaacaaatggaaaaacattccatgctcatgggtaggaagaatcaatatcgtgaaaatggccatactgcccaagaattggaaaaaagctactttaaagttcatatggaaccaaaaaagagcccgcatcaccaagtcaatcctaagccaaaagaacaaagctggaggcatcacgctacctgacttcaaactatactacaaggctacactaaccaaaacagcatggtactggtatcaacacagagatataaaccaatggaacagaacagagccctcagaaataataccacacatctacaaccatctgatctttgacaaacctgacaaaaacaagaaatggggaaagcattccctatttaataaatggtgctgggaaagctggctagacatatgtagaaagctgaaactggatcccttccttacaccttatacaaaaattaattcaagatggattaaagacttaaacgtaagacctaaaaccataaaaaaccctagaagaaaacctaggcaataccattcaggacataggcatgggcaaggacttcatgtctaaaacaccagaagcaatggcaacaaaagacaaaattgacaaatgggatctaattaaactccagagcttctgcacagcaaaacaaactaccatgagagtcaacaggcaacctacagattgggagaaaatttttgcaatctactcatctgacaaaggactaatatccagaatctacagtgaactcaaacaaatttacaagaaaaaaacaaacaacccccatcaagaagtgggcgaaggatatgaacagatgcttctcaaaagaagacatttatgcagccaacagacacatgaaaaaaatgctcatcatcactggccatcagagaaatgcaaatcaaaaccacaatgagataccatctcacaccagttagaatggcaatcattaaaaagtcaggaaagaacagggctggctcggcactggctccttgcagtcggcgaactgtcggggcgggaggagccgtgagcagtagctgcactcagctgcccgcgcggcaaagaggaaggcaagccaaacagagtgcgcagagtggcagtgccagcggcgacacaggcagcacaggcagcccgggctgcctgaatagcctcagaaacaacctcagcgactccggctgctctgcggactgcgagctgtggcggtag

SEQ ID NO: 7883 - DNA, 3529 bp, Homo sapiens
  SIMILAR (2714)..(3526): 961254mologous to Homo sapiens unknown protein,accession number M22334,Smith-Waterman Score=1429.
atggagctgaaaaccaaggctcgagaactacgtgaagaatgcagaagcctcaggagcccatgcaatcaactggaagaaagggtatcagcgatggaagatgaaatgaatgaaatgaagcgagaagggaagtttagagataaaagaataaaaagaaatgagcaaagcctccaagaaatatgggactttgtgaaaagaccaaatctacgtctgattggtgtacctgaaagtgatggggagaatggaaccaagttggaaaacactctgcaggatattatccaggagaacttccccaatctagcaaggcaggccaacattcagattcaggaaatacagagaacgccacaaagatactcctcgagaagagcaactccaagacacataattgtcagattcaccaaagttgaaatgaaggaaaaaatgttaagggcagccagagagaaagcaccacaccacacctattccaaaattgaccacatacttggaagtaaagttctcctcagcaaatgtaaaagaacagaaattataacaaactatctctcagaccacagtgcaatcaaactagaactcaggataaagaatctcactcaaaaccactcaactacatggaaactgaacagcctgctcctgaatgactactgggtacacaacgaaatgaaggcagaaataaagatgttctttgaaaccaacgagaacaaagacacaacataccagaatctctgggacacattcaaagcagtgtgtagagggaagtttatagcactaaatgcccacaagagaaagcaggaaagatccaaaattgacaccctaacatcacaattaaaagaactagaaaagcaagagcaaacacattcaaaagctagcagaaggcaagaaataactaagatcagaggagaactgaaggaaatagaggcacaaaaaacccttcaaaaaatcaatgaatacaggagctggttttttgaaaggatcaacaaaatagatagaccgctagcaagactaataaagaaaaaaagagagaagaatcaaatagacacaataaaaaatgataaaggggatatcaccactgatcccacagaaatacaaattaccatcagagaatactacaaacacctctacgcaaataaactagaaaatctagaagaaatggataaattcctcgacacatacactctcccaagactaaaccaggaagtagttgaatctctgaagagaccaataacaggagctgaaattgtggcaataatcaatagcttaccaaccaaaaagagtccaggaccagatggattcacagccgaattctaccagagctgggcagagacacaaccaaaaaaagagaattttagaccaatatccttgatgaacattgatgcaaaaatcctcaataaaatactggcaaaacgaatccagcagcacatcaaaaagcttatccaccatgatcaagtgggcttcatccctgggatgcaaggcttggttcaatatacgcaaatcaataaaggtaatccagcatataaacagagccaaagacaaaaaccacatgattatctcaatagatgcagaaaaagcctttgacaaaattcaacaacccttcatgctaaaaactctcaataaattaggtattgatgggacgtatttcaaaataataagagctatctatgacaaacccacagccaatatcatactgaatgggcaaaaactggaagcattccctttgaaaactggcacaagacagggatgccctctctcaccgctcctattcaacatagtgttggaagttctggccagggcaatcaggcaggagaaggaaataaaaggtattcaattaggaaaagaggaagtcaaattgtccctgtttgcagacgacatgattgtttatctagaaaaccccattgtctcagcccaaaatctccttaagctgatacgcaacttcagcaaagtctcaggatacaaaatcaatgtacaaaaatcacaagcattcttatacaccaacaacagacaaacagagagccaaatcatgagtgaactcccattcacaattgcttcaaagagaataaaatacctaggaatccaacttacaagggatgtgaaggacctcttaaaggagaactacaaaccaactgctcaaggaaataaaagaggacacaaacaaatggaagaacattccatgctcagggggaaggaagaatcaatatcgtgaaaatggccatactgcccaaggaattggaaaaaaactactttaaagttcatatggaaccaaaaaagagcctgcatcgccaagtcaatcctaagccaaaagaacaaagctggaggcatcacactacctgacttcaaactatactacaaggctacagtaaccaaaacagcatggtactggtaccaaaacagagatatagatcaatggaacagaacagagccctcagaaataatgccacttatactacaactatctgatctttgacaaacctgagaaaaacaagcaaaggggaaaggattccctatttaataaatggtgctgggaaaactggctagccatatgtagaaagctgaaactggatcccttccttacaccttatacaaaaattaattcacgatggcttaaagacttaaatgttagaactaaaaccataaaaaccctagaagaaaaactaggcataaccattcaggacataggcctgggcaaggacttcatgtctaaaataccaaaagccaatggcaacaaaagcccaaaattgacaaatgggatctaattcaactaaagagcttctgcacagcaaaagaaactaccatcagagtgaacaggcaacctacaaaatgagagaaaatattcgcaacctactcatctgacaaagggctaatatccagaatctacaatgaactcaaacaaatttacaagaaaaaaacaaacaaccccatcaaaaagtgggcaaaggacatgaacagacacttctcaaaagaagacatttatgcagccaaaaaacacatgaaaaaatgctcatcatcactggccatcagagaaatgcaaatcaaaaccactatgagataccatctcacaccagttagaatggcaatcattaaaaagtcaggaaacaacaggtgctggagaggatgtggagaaacaggaacgcttttacactgttggtgggactgtaaactagctcaaccattgtggaagtcagtgtggcgattcctcagggatctagaactagaaataccatttgacccagccatcccattactgggtatatacccaaatgactataaatcatgctgctataaagacacatgcacacgtatgtttattgcggcattattcacaatagcaaagacttggaaccaacccaaatgtccaacaattatagactggattaagaaaatgtggcacatatacaccatggaatactatgcagccataaaaaatgatgagttcgtgtcctttgtagggacatggatgaaattggaaatcatcattctcagtaaactatcacaagaacaaaaaaccacacaccgcatattctcactcataggtgggaattga

SEQ ID NO: 7884 - DNA, 5637 bp, Homo sapiens
  SIMILAR (3447)..(5114): 971254mologous to Homo sapiens putative p150,accession number U93574,Smith-Waterman Score=2827.
atggagaatgactttgaggagctgagagaagaaggcttcagacgatcaaattactctgagctacgggaggacattcaaaccaaaggcaaagaagttgaaaactttgaaaaaaatttagaagaatgtataactagaataaccaatacacagaagtgcttaaaggagctgatggagctgaaaaccaaggctcgagaactacgtgaagaatgcagaagcctcaggagccgatgcgatcaactggaagaaagggtatcagcgatggaagatgaaatgaatgaaatgaagcgagaagggaagtttagagaaaaaagaatacaaagaaatgaacaaagcctccaagaaatatgggactatgtgaaaagaccaaatctacgtctgattggtgtacctgaaaccttgcatcccagggatgaagcccacttgaagaatctaatagatgcaataaaaaatgataaaggggatatcaccaccgatcccacagaaatacaaactaccatcagagaatactacaaacacctctatgcaaataaactagaaaatctagaagaaacggataaattcctcgacacatacactctcccaagactaaaccaggaagaagttgaatctctgaatagaccaataacaggatctgaaattgtggcaataatcaatagcttaccaaccaaaaagagtccaggaccagatggattcacagctgaattctaccagaggtacaaggaggaactgctgataagcaacttcagcaaagtctcaggatacaaaatcaatgtacaaaaatcacaagcattcttatacaccagcaacagacaaacagagagccaaatcatgagtgaactcccattcacaattgcttcaaagagaataaaatacctaggaatccaacttacaagggatgtgaaggacctcttcaaggagaactacaaaccaccgctcaaggaaataaaagaggatacaaacaaatggaagaacattccatgctcatgggtaggaagaatcaatatcatgaaaatggccatactgcccaaggtaatttacagattcaatgccatccccattaagctaccaatgcctttcttcacagaattggaaaaaactactttaaagttcatatggaaccaaaaaagagcccgcatcgccaagtcaatcctaagccaaaagaacaaagctggaggcatcacactacctgacttcaaactatactacaaggctacagtaaccaaaacagcatggtactggtaccaaaacagagatatagatcaatggaacagaacagagctctcagaaataacgccgcatatctacaactatctgatctttgacaaacctgagaaaaacaagaaatggggaaaggattcccatatttaataaatggtgctaggaaaactggctaaccatatgtaaaaggctgaaactggatcccttccttacaccttataccaaaatcaattcaagatggattaaagacttaaacgttagacctaaaaccataaaaaccctagaagaaaacctaggcattaccattcaggacataggcattggcaaggacttcatgtgtaaaacaccgaaagcaatggcaacaaaagccaaaattgacaaatgggatctaattaaactaaagagcttctgcacagcaaaaaaaaaaaaaactactaacagactgaacaggcaacctgcaaaatgggagaaaattttcacaacctactcatctgacaaagggctaatatccagaatctacaatgaactcaaaacacttttacaagaaaaaaaacaaacaaccccatcaaaaagtgggcgaaggatatgaacagacacttctcaaaagaagacatttatgcagccaaaaaaacacatgaaaaaatggtcaccatcactggccatcagagaaatgcaaatcaaaaccacaatgagatatcatctcataccagttagaatggcgatcattaaaaagtcaggaaacaacagaccaaaagtagataaaaccacaaagatggggaaaaaacagagcagagaaactggaaactctaaaaagcagagtgcctctcctcctccaaaggaacgctgttcctcaccagcaacggaacaaagctggatggagaatgactttgatgagctgagagaagaaggcttcagacgatcaaattactctgagctacgggaggacattcaaaccaaaggcaaagaagttgaaaactttgaaaaaaatttagaagaatgtataactagaataactgatatagagaagtgcttaaaggagctgatggagctgaaaaccaaggctcgagaactacatgaagaatgcagaagcctcaggagccgatgtgatcaactggaagaaagggtatcagcaatggaagatgaaatgaatgaaatgaaaaacacacataggctcaaaataaaaggagcaccaagattcataaagcaagtcctgagtgacctacaaagagacttagactcccacacattaataatgggagactttaacaccccactgtcaacattagacagatcaacaagacaaaaaatcaacaaggatacccaggaattgaactcagctctgcaccaagcagacctaatagacatctacagaactctccactccaaatcaacagaatatacatttttttcagcaccacaccacacctattccaaaattgaccacatacttggaagtaaagctctcctcagcaaatgtaaaagaacagaaattataacaaactatctctcagaccacagtgcaatcaaactagaactcaggattaagaatctcactcaaaaccgctcaactacatggaaactgaacaacctgctcctgaatgactactgggtacataacgaaatgaaggcagaaataaagatgttctttgaaaccaacgagaacaaagacacaacataccagaatatctgggacgcattcaaagcagtgtgtagagggaaatttatagcactaaatgcccacaagagaaaacaggaaagatccaaaattgacaccctaacatcacaattaaaagaactagaaaagcaagagcaaacacattcaaaagctagcagaaggcaagaaataactaaaatcagagcagaactgaaggaaatagagacacaaaaaacccttcaaaaaattaatgaatccaggagctggttttttgaagggatcaacaaaattgatagaccgctagcaagaataataaagaaaaaaagagagaagaatcaaatagacgcaataaaaaatgataaaggggatatcaccaccgatcccacagaaatacaaactaccatcagggaatactacaaacacctctacgcaaataaactagaaaatctagaagaaatggataaattcctcgacacatacaccctcccaagactaaaccaggaagaagttgaatctctgaatacaccaataacaggctctgaaattgtggcaataatcaatagcttaccaactaaaaaagagtccaggatcagaaggcttcacagccgaattctaccagaggtacaaggaggaactggtaccattccttctgaaattattccaatcaatagaaaaagagggaatcctccctaactctttttatgaggccagcatcattctgataccaaagccaggcagagacacaacaaaaaaagagaattttagaccaatatccttgatgaacattgatgcaaaaatcctcaataaaatactggcaaaacgaatccagcagcacatcaaaaagcttatccaccatgatcaagtgggcttcatccctgggatgcaaggctggttcaatatacacaaatcaataaatgtaatccagcatataaacagacccaaagacaaaaaccacatgattatctcaatagatgcagaaaaagcctttgacaaaattcaacaacccttcatgctaaaaactctcaataaattaggtattgatgggacgtatttcaaaataataagtgctatctatgacaaacccacagccaatatcatactgaatgggcaaaaagtggaagcattccctttgaaaactggcacaagacagggatgccctctctcaccactcctattcaacatagtgttggaagttctggccagggcaattaggcaggagaaggaaataaagggtattcaattaggaaaagaggaagttaaattgtccctgtttgcagacgacatgattgtatatctagaaaaccccatcgtctcagcccaaaatctccttaagctgataagcaacttcagcaaagtctcaggatacaaaatcaatgtacaaaaatcacaagcattcttatacaccaacaacagacaaacagagagccaaatcatgagtgaactcccattcacaattgcttcaaagagaataaaatacctaggaatccaacttacaagggatgtgaaggacctcttcaaggagaactacaaaccactgctcaaggaaataaaagaggatacaaacaaatggaagaacattccatgctcatgggtaggaagaatcaatatcgtgaaaatggccatactgcccaaggtaatttacagattcaatgccatccccatcaagctaccaatgactttcttcacagaattggaaaaaactactttaaagttcatatggaaccaaaaaagagcccgcatcaccaagtcaatcctaagccaaaagaacaaagctggaggcatcacactacctgacttcaaactatactacaaggctacagtaaccaaaacagcatggtactggtaccaaaacagagatatagatcaatggaacagaacagagccctcagaaataacgccgcatatctacaactatctgatctttgacaaacctgagaaaaacaagcaatggggaaaggattccctatttaataaatggtgctgggaaaactggctagctatatgtagaaagctgaaactggatcccttccttacaccttatacaaaaatcaattcaagatggattaaagacttaaacgttagacctaaaaccataaaaaccctagaagaaaacctaggcaataccattcaggacataggcatgggcaaggacttcatgtctaaaacaccaaaagcaatggcaacaaaagccaaaattgacaaatgggatctaattaaactaaagagcttcctgcacagcaaaagaaactaccatcagagtgaacaggcaacctacaaaatgggagaaaatttttggaacctactcatctgacaaagggctaatatccagaatctacaatgaactcaaacaaatttacaagaaaaaaacaaacaaccccatcaaaaagtgggtgaaggacatgaacagacacttctcaaaagaagacatttatgcagccaaaaaacacatgaaaaaatgctcatcatcactggccatcagagaaatgcaaatcaaaaccacaatgagataccatctcacaccagttagagtggcaatcattaaaaagtcaggaaacaacagaacttgggaatataacatactttgttctcttgtgcctctcctgtgttccctcttgtggctgcacctgactgaccatcacctaaaagaggacagaacaaaacacttgacagctagtgataaccttgaaaaaacagaactcagcagatggaaggagagagccctactgtatgagcatcgtgtgctgagacctgctattgactcccag

SEQ ID NO: 7885 - DNA, 4511 bp, Homo sapiens
  SIMILAR (3889)..(4509): 921254mologous to Homo sapiens putative p150,accession number U93568,Smith-Waterman Score=1032.
atggagaatgactttgacgagctgagagaagaaggcttcagacgatcaaattactctgagctatgggaggacattcaaaccaaaggcaaagaagttgaaaactttgaaaaaaatttagaagaatgtataactagaataaccaatacagagaagtgcttaaaggagctgatggagctgaaaaccaaggctcgagaactacatgaagaatgcagaagcctcaggagccgatgtgatcaactggaagaaagggtatcagcaatggaagatgaaatgaatgaaatgaagggagaagggaagtttagagaaaaaagaataaaaagaaacgagcaaagcctccaagaaatatgggactatgtgaaaagaccaaatctacatctgattggtgtacctgaaagtgatggggagaatggaaccaagttggaaaacactctgcaggatattatccaggagaacttccccaatctagcaaggcaggccaacgttcagattcaggaaatacagagaatgccacaaagatactcctcgagaagagcaactccaagacacataattgtcagattcaccaaagttgaaatgaaggaaaaaatattaaaggcagccagagagaaagacagatcaacgagacagaaagtcaacaaggatacccaggaattgaactcagctctgcaccaagcggacctaatagacctaatagacctaatctacagaactctccaccccaaatcaacagcaatatacatttttttcagcaccacaccacacctattccaaaattgacaacatacttggaagtaaagctctcctcagcaaatgtaaaagaacagaaattataacaaactatctctcagaccacagtgcaatcaaactagaactcaggattaagaatctcactcaaaaccgctcaactacatggaaactgaacaacctgctcctgaatgactactgggtacataacaaaatgaaggcagaaataaagatgttctttgaaaccaacgagaacaaagatacaacacaccagaatctctgggacacattcaaagcagacaacataccagaatctctgggacacattcaaagcagtgtgtagagggaaatttatagcactaaatgcccaaaagagaaagcaggaaagatctaaaattgacacccctaacatcacaattaaaagaagtagaaaagcaagagcaaacacattcaaaagttagcagaaggcaagaaataacttaaaatcagagcagaactgaaggaaatagagacaaaaaaaaacacttcaaaaaaatcagtgaatccaggagctggttttttgaaaggatcaacaaaattgatagaccgctagcaagactaataaagaaaaaaagagagaagaatcaaatagacacaataaaaaatgataaaggggatatcaccaccaatcccacagaaatacaaactaccatcagagaatattacaaacacctctacgcaaataaactagaaaatctagaagaaatggataaattcctcgacacaaacaccctcccaagactaaaccaggaagaagttgaatctctgaatagaccaataacaggatctgaaattgtggcaataatcaatagtttactaaccaaaaagagtccaggaccagatggattcacagccgaattctaccagaggtacaaggaggaactgcatcatcctgataccaaagcctggcagagacacaaccaaaaaaagagaattttagaccaatatccttgatgaacattgatgcaaaaatcctcaataaaatactggcaaaccgaatcccagcagcacatccaaaaagcttatccacccatgatccaagtgggcttcatccctgggatgcaaggctggttcaatatacgcaaatcaataaatgtaatccagcatataaacagagccaaagacaaaaaccacatgactatctcaatagatgcagaaaaagcctttgacaaaattcaacaacccttcatgctaaaaactctcaataaattaggtattgatgggacgtatttcaaaataataagagctatctatgacaaacccacagccaatatcatactgaatggggccaaaaactggaagcattcccctttgaaaaactggcacaagaacagggatgcccctctctcacccactccctattcaacatagtgttggaagttctggcccgggcaattaggcaggataaggaaataaagggtattcaattaggaaaagaggaagtcaaattgtccctgtttgcagacgacatgactgtatgtatagaaaaccccattgtctcagcccaaaatctccttaagctgataagcaacttcagcaaagtctcaggatacaaaatcaatgtacaaaaatcacaagcattcttatacaccgataacagacaaacagagagccaaatcatgagtgaattcccattcacaattgcttcaaagagaataaaatacctaggaatccaacttacaagggacctgaaggacctcttcaaggagaactacaagccactgctcaaggaaataaaagaggatacaaacaaatggaagaacattccatggtcatgggtaggaagaatcaatatcatgaaaatggccatactgtccaaggtaattgacagattcaatgccatccccatcaagctaccaatgactttcttcacagaattggaaaaaactactttaaagttcatatggaaccaaaaaagagcccacatcgccaagtcaatcctaagcccaaaagaacaaagttggaggcatcacgctacctgacttcaaactatactacaagggctacagtaaccaaaacagcatggtactggtaccaaaacagagatatagatcaatggaacagaacagggccctcagaaataatgccacattatctacaactatctgatctttgacaaacctgagaaaaacaggcaatggggagaggattccctatttaataaatggtgctgggaaacctggctagccatatggagaaagctgaaactggatcccttccttacactttatgcaaaaattaactgaagatggattaaagacttaaacgttagacctaaaaccattaaaaaccctagaagaaaacctaggcaataccattcaggacataggcatgggcaaggatttcatgtctaataaaacaccaaaagcaatggcaaccaaaagacaaaaattgacaaatgggatctaatttaactaaagagcttctgcacagcaaaagaaactaccatcagagtgaacaggcaacctacaaaatgggagaaaattttcggaacctactcatctgacaaagggctaatatccagaatctacaatgaactcaacccaatttacaagaaaaaaacaaacaaccccatcaaaaaagaaacagagagacaaatcatgagtcaactcgcattcacaattgcttcaaagagaataaaatacctaggaatccaacttacaagggatgtgaaggacctcttcaaggagaactacaaaccactgctcaatgaaataaaagaggatacaaacaaatggaagaacatttcatgctcatgggtaggaagaatcaatatcatgaaaatggccacactgcccaaggtaatttatagattcaatgccatccccatcaagctaccaatgactttcttcatggaattggaaaaaactactttaaagttcatgtggaaccaaaatagagcccgcattgccaagtcaatcctaagccaaaagaacaaagctggaggcatcacgctacctgacttcaaactatactacaaggctacagtaaccaaaacagcatggtactggtaccaaaacagagatatagaccaatggaacagagcagagccctcagaaataatgccacatatctacaacaaactgatctttgacaaacctgacaaaaacaagcaatgggggaaaggattccctatttaataaatggtgctgggaaaactggctagccatatgtagaaaactgaaactggaccccttccttacaccttatacaaaaattaactcaagatggattaaagacttaaacgtaagacctaaaaccataaaaaccctggaagaaaacctaggcaataccattcaggacataggcatgggcaaagacttcatgactaaaacaccagaagcaatggcaacaaaagccaaaattgacaaatgggatctaattaaactaaagagcttctgcacagcaaaagaaattaccatgagagtgaacaggcaacctacaaaatgggagaaaattttcgcaacctactcatctgacaaagggctaatatccagaatctacaatgaactcaaacaaatttacaagagaaaaaccaacaaccccatcaaaaagtgggcgaaggatatgaacagacacttctcaaaagaagacatttatgcagccaaaagacacatgaaaaaatgctcatcatcactggccatcagagaaatgcaaatcaaaaccacaatgagataccatctcacaccagttagaatggcaatcattaaaaagtcaggaaacaacag

SEQ ID NO: 7886 - DNA, 6336 bp, Homo sapiens
  SIMILAR (3366)..(4799): 721254mologous to Homo sapiens putative p150,accession number U93568,Smith-Waterman Score=1635.
atggtgaagggatcaattcaacaagaggagctaactatcctaaatatttatgcacccaatacaggagcacccagattcataaagcaagtcctgagtgacctacaaagagacttagactcccacacattaataatgggagactttaacaccccactgtcaacattagacagatcaacgagacagaaagtcaacaaggatacccaggaattgaactcagctctgcaccaagcagacctaatagacatcaacagaactctccaccccaaatcaacagagtatacattttttttcagcaccacaccacacctattcccaaaattggaccaccatagttggaagtaaagctctcctcagcaaatgtaaaagaacagaaattataaccaaactatctctcagacccacagtgccaatcaaactgaaactcaggattaagaatctcactcaaagccgctcaactccatggaaactgaacaacctgctcctgaatgactactgggtacataacgaaatgaaggcagaaataaagatgttctttgaaacccaacgagaacaaagacaccaacataccagaatttttgggacgcattcaaagcagtgtgtagagggaaatttatagcactaaatgcctacaagagaaagcaggaaagatccaaaattgacaccctaacatcacaattaaaagaactagaaaagcaagagcaaacacattcaaaagctagaagaaggcaagaaataactaaaatcagagcagaactgaaggaaatagagacacaaaaaacccttcaaaaaatcaatgaatccaggagctggttttttgaaaggatcaacaaaattgatagaccactagcaagactaataaagaaaaaaagagagaagaatcaaatagacacaataaaaaatgataaaggggatatcaccaccgatcccacagaaatacaaactaccatcagagaatactacaaacacctctacgcaaataaactagaaaatctagaagaaatggatacattcctcgacacatacactctcccaagactaaaccaggaagaagttgaatctctgaatagaccaataacaggctctgaaattgtggcaataatcaatagtttaccaaccaaaaagagtccaggaccagatggattcacagccgaattctaccagaggtacaaggaggaactgcatataaacagagccaaagacaaaaaccacatgattatctcaatagatgcagaaaaggcctttgacaaaattcaacaacgcttcatgctaaaaactctcaataaattagtgttggaagttctggccagggcaattaggcaggagaaggaaataaagggtattcaattaggaaaagaggaagtcaaattttccctgtttgcagacgacatgattgtatatctagaaaaccccattgtctcagcccaaaatctccttaagctgataagcaacttcagcaaagtctcaggatacaaaatcaatgtacaaaaatcacaagcattcttatacaccaacaacagacaaacagagagccaaatcatgagtgaactcccattcataattgcttcaaagagaataaaatacctaggaatccaacttacaagggatgtgaaggacctcttcaaggagaactacaaaccactgctcaaggaaataaaagaggatacaaacaaatgcaagaacattccatgctcatgggtaggaagaatcaatatcgtgaaaatggccatacttgcccaaggtaatttacagattcaatgccatccccatcaagctaccaatgactttcttcacagaattggaaaaaactactttaaagttcatatggaaccaaaaaagagcccgcatcgccaagtcaatcctaagccaaaagaacaaagctggaggcatcacactacctgacttcaaactatactacaaggctacagtaaccaaaacagcatcggtactggtaccaaaacagagatatagatcagtggaacagaacagagccctcagaaataacgccgcatatctacactattctgatcctttggacaaacctgagaaaaacaagcatgggggaaaggcatccctaatttataaaatggctgctggggaaaactggctagcccatatgtaggaagctgaaactggatcccttccttacacattatacaaaaattaattcaagttggattaaagacttaaacgttagacctaaacccataaaaaccctagaagaaaacctaggcattaccattcaggacataggcatgggcaaggatttcatgtctaaaacaccaaaagcaatggcaacaaaagccaacattgacaaatgggatctaattaaactaaagagcttctgcacagcaaaagaaactaccatcagagtgaaaaggcaacttacaaaatgggagaaaattttcgcaacctactcatctgacaaagggctaatatccagaatctacaatgaactcaaacagatttacaagaaaaaaacaaacaaccccatcaaaaagtgggcaaaggatatgaacagacacttctcaaaagaagacatttatgcagccaaaagacacatgaaaaaatgctcatcatcactggccatcagagaaatgcaaatcaaaaccacaatgagataccatctcacaccagttagaatggcaatcattaaaaagtcaggaaacaacaggagagacagaacagctgaggaaacagcagaacggtggaaaatttttgaaagtgttttgagcccacccaacctgaggagagcattcaaagaaaaacaggaagaagaagtcggcttcagaaggtgggttataacaaactcctccaagctaaaacagcatgttttaacccaatgcaaggaagctaagaaccttgaaaaaaggttagaggaatttctaactagaataaccagtttagagaagaacataaatgacctaatggacctgaaaaacacagcacgagaacttcttgacgcctacacaagtatcaatagccaaattaatcaagcggaagaaaggttatcagagactgaagatcaacttaatcaaataaagcatgaggacaagattagagggaaaaaaatgaaaaggaacaaacaaagcctccaagaaatatgggactatgtgaaaaggccaaatctacgtctgattggtgtagctgaaagtgacagggagaatggagccaagttagaaaacactcttcagtatattatccaggagaacttccccaacctagcaagacaggccaacactcaaattcaggaaacacagagaccaccacaaagatactccttgagaaaagcaaccccaagacacataattgtcagattcaccaaagttgaaatgaaggaaaaaatgttaagggcagccagagagaaagacagatcaacgagacagaaagtcaacaaggatacccaggaattgaactcagctctgcaccaagcggacctaatagacatctacagaactctccacctcaaatcaacagaatatacatttttttcagcaccacaccacacttattccaaaattgaccacatacttggaagtaaagctctcctcagcaaatgtaaaagaacagaaattataacaaactatctctcagaccacagtgcaatcaaactggaactcaggattaagaatctcactcaaaaccgctcaactacatggaaactgaacaacctgctcctgaatgactactgggtacataacaaaatgaaggcagaaataaaaatgttctttgaaaccaacgagaacataagacacaacataccagaatctctgggatgcattcaaagcagtgtgtagagggaaatttatagcactatatgcccactggagaaagcagggaaagatccaaaatggacaccctaacatcacaattagaagaactagaaaagctagagcaaacacattcaaaagctagcagaaggcatgaaatagctaaaatcagagcagaactgaaggaaatagagacacaaaaaactgttgaaaaaattaatgaatccaggagctggttttttgaaaggatcaacaaaattgatagaccgctagcaagactaataaagaaaaaaagagagaagaatcaagtagatgcaataaaaaacgataaaggggatatcaccaccgatcccacagaaatacaaactaccatcaggagaatactacaaacacctctacgcaaataaactagaaaatctagaagaaatggataaattcctcgacacatacactctcccaagactaaaccaggaagaagttgaatctctgaatagaccaataacaggctctgaaattgtggcaataatcaatagtttaccaaccaaaaagagtccaggaccagatggattcacagccgaattctaccagaggtacaaggaggaactggtaccattccttctgaaactattccagtcaatagaaaaagagggaatcctccctaactcattttatgaggccagcatcattctgatagcaaagccaggtagagacacaacaaaaaaagagaattttagaccaatatccttgatgaacattgatgcaaaaatcctcaataaaatactggcaaaacgaatccagcagcacatcaaaaagcttatccaccatgatcaagtgggcttcatccctgggatgcaaggctggttcaatatatgcaaatcaataaatgtaatccagcatataaacagagccaaagacaaaaaacacatgattatctcaatagatgcagaaaaagcctttgacaaaattcaacaacccttcatgctaaaatctctcaataaattagaattggaaaaaactactttaaagttcatatggaaccaaaaaagagcccgcatcgccaaggcaatcctaagccaaaagaacaaagctggaggcatcacactacctgacttcaaactatactacaaggctacagtaaccaaaacagcatggtactggtaccaaaacagagatatagatcaatggaacagaacagagccctcagaaataacgccgcatatctacaactatctgatctttgacaaacctgagaaaaacaagcaatggggaaaggattccctatttaataaatggtgctgggaaaactggctagccatatgtagaaagctgaaactggatcccttccttacaccttatacaaaaatcaattcaagatggattaaagacttaaatgttagacctaaaaccataaaaaccctagaagaaaacctaggcattaccattcaggacataggcatgggcaaggacttcatgtccaaaacaccaaaagcaatggccaacaaaagacaaaattgacaaatgggatctaattaaactaaagagcttctgcacagcaaaagaaactaccatcagagtaaacaggccaacctacaaaatggaagaaaattttcacaacctactcatctgacaaagggctaatatccagaatctacaatgaactcaaacaaatttacaagaaaaaaacaaacaaccccatccaaaaagtgggcgaaggacatgaacagacacttctcaaaagaaggacatttatgcagcccaaaaaacacatgaaaaaatgctcaaccatcactggccatcagagtaatgcaaaatcaaaaccacaaatgagataccatctcacaccagttagaatggcaatcattaaaaagtcaggaaacaacaggtgcttggagaggatgtggagaaataggaacacttttacactgtttggtgggactgtaaactagttccaacctttgtggaagtcagtgtggcgattcctcagggatctagaattagaaataccatttgacccagccaatcccattactgggtatatacccaaaggactataaatcatgctgctataaagacacatgcacacgtatgtttattgtggcacttattcacaatagtaaagacttggaaccaacccaaatgtccaacaacggatagactggattaagaaaatgtggcacatatacaccatggaatactatgcagccataaaaaattgatgagttcatgtcctttgtagggacatggatgatattggaaatcatcattctcagtaaactatcgcaagaaccaaaaaacccaaacaccgcatgttctcactcataggtgggaactggaacaatgagatcacatggacacaggaaggggaatatcacactctggggactgttgtggggtggggggagggggggagggatagcattaggagatatacctaatgctaaatgacgagttaatgggtgcagcacaccagcatggcacatgtatacatatgtaactaacctgcgcattgtgcacatgtaccctaaaacttaaaagtataattaaaaaaaaataaaataaaaataaaaaa

SEQ ID NO: 7887 - DNA, 3136 bp, Homo sapiens
  SIMILAR (1683)..(1949): 801254mologous to Homo sapiens putative p150,accession number U93563,Smith-Waterman Score=332.
atggaggaagatctaccaagcaaatggaaaacaaaaaaaggcaggggttgcaatcctagtctctgataaaacagactttaaaccaacaaagatcaaaagagacaaagaaggccattacataatggtaaagggatcaattcaacaagaagagctaactatcctaaatatatatgcacccaatacaggagcacccacattcatacagcaagtcctgagtgatctacaaagagacttagactcccacacattaataataggagactttaacaccccactgtcaacatcagacagatcaacgagacagaaagtcaacaaggatacccaggaattgaactcagctctgcaccaagcagacctaatagacatctacagaaccctccaccccaaatcaacagaatatacatttttttcagcaccacaccacacctattccaaaattgaccacatacttggaagtaaagcactcctcagcaaatgtaaaagaacagaaattataacaaactatctctcagaccacagtgcaatcaaactagaactcatgattaagaatctcactcaaaaccactcaaccatatggaaactgaacaacctgctcctgaatgactactgggtacataaggaaatgaaggcagaaataaagatgttctttgaaaccaacgagaacaaagacacaacataccagaatctctgggacacattcaaagcagtgtgtagagggaaattcatagcaaaaaaatgcccacaaaagaaagcaggaaagatctaaaattgacaccctaacatcacaattaaaagaactagagaagcaaagagcaaacacattcaaaagctagcagaaggcaagaaataactaagatcagagcagaactgaaggaaatagagacacaaaaaaacccttcaaaaaaaccaatgaatccaggagctggttttttgaaaggatcaacaaaattgatagatagatcactagcaagagtaataaagaagaaaggagagaagaatcaaatagacgcaataaaaaacgataaattgggatatcaccactgatcccacagaaatacaaactaccatcagagaatactataaacacctctatgcaaataaactagaaaatctagaagaaatggataaattcctggacacatacaccctcccaagactaaaccaggaagaagttgaatctctgaatagaccaataacaggctctgaaattgaggcaataactaatagcctaaccaaccaaaaaaagtccaggaccagacggatttcacagccaaattctagcagaggtacaaggaggagctggtaccattccttctgaaattattccaatcaatagaaaaagagggaatcctccctaactcattttatgagggcaagtatcatcctggataccaaagtctagcagagacacaacaaaaaaaagagaattttagaccaatatctttgatgaacatcgatgcaaaaatcctcaataaaatactggcaaaccaaatccagcagcacatcaaaaagcttatccaccatgatcaagtgggcttcatccctgggatgcaaggctggttcaatatacgcaaatcaataaatgtaatccagcatataaacagaaccaaagacaaaaaccacatgattatctcaatagatgcagaaaaggcctttgaaaactggcacaagacagggatgccctctctcaccgctcctattccatagtgttggaagttctggccagggcaatcaggcagaagaaggaaataaagggtattcaattaggaaaagaggaagtcaaattgtccctgtttgcagacgacatgattgtttatctagaaaaccccattgtctcagcccaaaatctccttaagctgataagcaacttcagcaaagtctcaggatacaaaatcaatgtacaaaaatcaccaagcattcctatacaccaacaacagacaaacagagagccaaatcatgagtgaactcccattcacacttactacaacaagaataaaatacctaggaatccaacttacaagggatgtgaaggacctcttcacggagaactacaaactactcactgatcaaggaaataagagaggacacaaacaaatggaaaaacattccatgctcatggataggaagaatgaatatcatgaaaatggccatactgcccaaagtaatttacagattcaatgctatcctcatcaagctaccattgacttccttcacaaaattggaaaaaaactactttaaagttcatatggaaccaaaaaagagcccgcattgccaagtcaatcctaagacaaaagaacaaagctggaggcatcacactacctgacttcaaactatactacaaggctacagtaaccaaaacagcatggtactggtaccaaaacagatatatagacgaatagaacagaacagagcccctcagaaataaggcccacataccctacaactatctgatctttgacaaacctgacaaaaacaagcaatgggggaaaggattcccttatttaataaatggtgctgggaaaactggcttagccatatgtagaaagctgaaacttggatcccttccttacaccttatacaaaaattaattcaagatggattaaagacttaaatgttagacctaaaaccataaaaaactctagaagaaaacctaagcaataccattcagaccataggggtgggcaaggactccatgactaaatcagcaaaaaggaatggcaacaaaagccaaaattgataaatgggatctaattcaactaaagagcttctgcacagcaaaagagaaactaccatcagagtgaacaggcaacctacagaatgggagaaaatctttgcaatctactcatttgacaaagggctaatatccagaatctacaaagaactcaaacaaatttacaagaaaaaaacaaacaaccccatgaaaaagtgggcaaaggacatgaacagacacttctcaaaagaagacatttatgcagccaaaaaacacatgaaaaaatgctcatcatcactggccatcacagaaatgcaaatcaaaaccacaatgagataccatctcacaccagttagaatggcaatcattaaaaagtcaggaaacaacagggacatggatgaaattggaaatcatcattctcagtaa

SEQ ID NO: 7888 - DNA, 4458 bp, Homo sapiens
  SIMILAR (2190)..(2309): 501254mologous to Homo sapiens ORF2 contains a reverse transcriptase domain.; ORF2,accession number M80341,Smith-Waterman Score=82.
atggagctgaaaaccaaggctcgagaactacgtgaagaatgcagaagcctcaggagccgacgcaatcaactggaagaaagggtatcagcaatggaagatgaaatgaatgaaatgaagcgagaagggaagtttagagaaaaaagaataaaaagaaatgagcaaagcctccaagaaatatgggactatgtgaaaagaccaaatctacgtctgattggtgtacctgaaagtgatgcggagaatggaaccaagttggaaaacactctgcaggatattatccaggaggacttccccaatctagcaaggcaggccaacgttcagattcaggaaatacagagaacgccacaaagatactcctcgagaagagcaactccaagacacataattgtcagattcaccaaagttgaaatgaagcaaaaaatgttaagggcagccagagagaaagactttaaaccaacaaagatcaaaagagacaaagaaggccattacataatggtaaagggatcaattcaacaagaggagctaactatcctaaatatatatgcacccaatacaggagcacccagattcataaagcaagtcctgagtgacctacaaagagacttagactcccacacattaataatgggagactttaacaccccactgtcaacattagacagatcaacaagacagaaagtcaacaaggatacccaggaattgaactcagctctgcaccaagcggaccttaatagacatctacagaactctccacccccaaatcaacagaatatacatttttttcagcaccgcaccacacctattccaaaattgaccacatagttggaagtaaagctctcctcagcaaatgtaaaagaacagaaattataacaaactgtctctcagaccacagtgcaatcaaactagaactcaggactaagaaactcactcaaaaccgctcaactaccatggaaactgaacaacctgctcctgaatgactactgggtatataacgaaatgaaggcagaaataaagatgttctttgaaaccaacgagaacaaagacacaacataccagaatctctgggatgcattcaaagcagtgtgtagagggaaatttatagcactaattgcccacaagaggaagcaggaaagatccaaaattgacaccctaacatcacaattaaaagaaccagaaaagcaagagcaaacaaacacattcaaaagctagcagaaggcaagaaataactaaaatcagagcagaactgaaggaaatagagacacaaaaaaacctccttcaacccttcaaaaaaattaatgaatcccaggagctgggttttttgaaaggatcaacaaaattgatagaccgcttagcaaggacttaataaagaaaaaaagagagaagaaatcaaatagacacaataaaaaatgataaaggggatatcaccaccaatcccacaggaaatacaaacttccatcagagaatactacaaacacctctacgccaaataaacttgaaaatctagaaggaatggataaattcctcgacacatacactctcccaagactaaaccaggaagaagttgaatctctgaatagaccaataacagggctctgaaattgtggcagtaatcaatagcttaccaaccaaaaagagtccaggaccagatggattcacagccaaattctaccagaggtacaaggaggaactggtaccattccttctgaaactattccaatcaatagaaaaagagggaatcctccctaactcattttatgaggccagcatcattctgataccaaagccgggcagagacacaaccaaaaaagagaattttagaccaatatccttgatgaacattgatgcaaaaatccttcaataaaatactggcaaaccggaatccagcagcacattcaaaaagcttatccaccatgatcaagtgggttttatccctgtgatgcaacggctggttcaatatacggtaaatcaataaacggtaatccagcatacaaacagaaccaaagacagaaaccacatgtttatctcaatagatgcagaaaaggcctttgacaaaattcaacagcccttcatgctaaaaactatcaataaaataggtattgatagaatgtatctcaaaataataagagctatctatgacaagcccacagccaatatcatactgaaaggacaaaaactggaagcattccctttgaaaactggcacaaggacagggatgccctctctcaccactcctattcaacataggtgtttgggaagttctgggccagggcaatcaggcaggagaaagaaataaagggtattcaattaggaaaagaggaagtcgaattatccctgtttgcagatgacatgattgtacatgtagaaaactccatcgtctcagcccaaaatctccttaagctgataagcaacttcagcaaagtctcaggatacaaaatcaatgtgcagaaatcacaagcattcctatacatcaataacagacaaagagagagccaaatcatgagtgaactcccattcacaattgctacaaagagaataaaatacctaggaatccaacttacaagggatgtgaaggacctcttcaaggagaactacaaaccactgctcaaggaaataaaagaggacacaaacaaatggaagaacattccatgctcatgggtaggaagaatcaatatcgtgaaaatggccatactgcccaaggtaatttacagattcaatgccatccccatcaagctaccaatgactttcttcacagaattggaaaaaaactactttaaagttcatatggaaccaaaaaaagagcccgtattgccaagtcaatcctaagccaaaagaacaaagctggaggcatcacactacctgacttcaaactatactacaaggctacagtaaccaaaacagcatggtacaggtggtaccaaaacagcatggtactggtaccaaaacagagatatagatcaatggaacagaacagagccctcagaaataatgccgcatatctacaactatctgatctttgacaaacctttgcttgagaaaaacaagcaatggggaaaggattccctatttaataaatggtgctgggaaaactggctagccatatgtagaaagctgaaactggatcccttccttacaccttatacaaaaatcaattcaagatggattaaagatttaaacattagacctaaaaccataaaaaccctagaagaaaacctaggcattaccattcaggacataggcgtgggcaaggacttcatgacagcaaaagaaactaccatcagagtgaacaggcaacctacaacatgggagaaaattttcgcaacctactcatctgacaaagggctaatatccagaatctacaatgaactcaaacaaatttacaagaaaaaaacaaacaaccccatcaaaaagtgggcgaaggacatgaacagacacttctcaaaagaagacatttatgcagccaaaaaacacatgaagaaatgctcatcctcactggccatcagagaaatgcaaatcaaaaccactatgagatatcatctcacaccagttagaatggcaatcattaaaaagtcaggaaacaacagcttcctaacattccttgggaatccacgtctgcccagctttcaggctgcaggtccacaagtccaggtgaattttctcccttgccagcgcccaggattccatggggtacagtcctgtccaatcagaacattgcattctcttggccactatgattggctcagagatgaccatgtgactcgatcaaatctgaccctaagaattttgctagaaagaccaagaagaaaagcaccattttaccctctagattttccaagaagttatgatgcaggcctagagctgttggtgccatcatgtcaccacaagggacagcctgcttggaaatggagccaacgcagaggagaatctaatactgttgctgatctgacaggaggcagtgctcaggcagtcacgttcgctcacccaccactcacttcctgccatgtggcccagttcctaacaggctacgaaccagtactagtccacggcctgggggtctgggattcctgctatatacaatatattactacaactgaagttagatgtggccacgtggcagagttccacccaatggcatgtggaggaagtgacctaactctaaaggagcagctgttctttttccatattctttcccattcagcggacaggaaaaaaatgatgatgagaccccgggcttacagacatgcctgctggaaacgctttggtacattttggatgttccagggatcatatccaaatgctgaaaatggtctccaaagctctacgggtaagtcaagctatggcgaaaatggagaaatctacaaaggtaaaacattttattcttacaagtcacgtcacctatggatgagttcctatgcatgtatgaaaacacacatggatggtgaagatttggattttttcacataa

SEQ ID NO: 7889 - DNA, 8071 bp, Homo sapiens
  SIMILAR (7004)..(8068): 961254mologous to Homo sapiens putative p150,accession number U93563,Smith-Waterman Score=1817.
atgacaggatcaaattcacacataacaatattaactttaaatataaatggactaaattctgcaattaaaagacacagactggcaagttggataaagagtcaagacccatctgtcgttatgtattcaggaaacccatctcacgtgcagagacacacataggctcgaaataaaaggatggaggaatatctaccaagcaaatggaaaacaaaaaaaggcaggggttgcaatcctagtctctgataaaacagattttaaaccaacaaagatcaaaagagacaaagaaggccattacataatggcaaagggatctattcaagaagaagaactaactatactaaatatatatgcaccccaatacaggagcacccagattcataaagcaagtcctcagtgacctacaaagagacttagactcccacacattaataatgggagactttaacaccccactgtcaacattagacagatcaacgagacagaaagtcaacaaggatacccaggaattgaactcagctctgcaccaagcagacctaatagacatctacagaactctccaccccaaatcaacagaatatacatttttttcagcaccacaccacacctattccaaaattgaccacatagttggaagtaaagctctcctcagcaaatgtaaaagaacagaaattataacaaactatctctcagaccacagtgcaatcaaactagaactcaggattaagaaactcactcaaaaccgctcaactacatggaaactaaacaacctgctcctgaatgactactgggtacataacgaaatgaaggcagaaataaagatgttctttgaaaccaacgagaacaaagacacaacataccagaatctctgggacacattcaaagcagtgtgtagagggaaatttatagcactaaatgcccacaagagaaagcaaggaaggtcccaaaattgacaccctaacatcacatttaaaagaaactagaaaagcagacgcacgcacattcaaaagatagcaggaggcaagaaataactaaaatcagagccagaactgaaggaaatagagacacaaaaaaaccctttcaaaaaattaatgaattccaggagctggtttttttgaaaggatcaacaaaattgatagaccgctagcaagactaataaagaagaaaagagagaagaatcaaatagacggcaataaaaaatgataaaggggatatcacccaccgatccccacagaaatacaaactacccatccagagattactacaaacacctctacgcaaataaactagaaaatctagaagaaatggataaattccttgacacatacgctctcccaagactaaaccaggaagaagttgaatctctgaatagaccaataacaggagctgaaattgtggcaataatcaatagcttaccaaccaaaaaaaagtccaggaccagatggattcacagccaaattctaccagaggtacaaggaggagctggtaccattccttctgaaactattccaatcaatagaaaaagagggaatcctccttgactcattttatgaggccagcatcatcctgataccaaagcctggcagagacacaaccaaaaaagagaattttagaccaaggtgcgttgatgaacattgatgcaaaaatcctcaataaaatactggcaaaacgaatccagcagcacatcaaaaagcttatccaccatgatcaagtgggcttcatccctgggatgcaagggctggttcaatatacgcaaatcaataaatctaatccagcatataaacagagccaaagacaaaaaccacatgattatctcaatagatgcagaaaaggcctttgacaaaattcaacaacctttcatgctaaaaactctcaataaattaagtattgatgggacatatatttcaaaataataagagctatccatgacaaacccacagccaatatcatactgaatgggcaaaaactggaagcattccctttgaaaactggcacaagacagggatgccctctctcaccactcctattcaacatatgcaaatcaaaaaaactgttggaagccagggcaattaggcaggagaaggaaataaagggtattcaattaggaaaagaggaagtcaaatttgtcccctctttgcagatgacatgattgtatatgtagaaaacccccttccgtctcagccccaaaatcttctttaaggctggttaagcaacttcagcaaaagtcttcaggttacaaaatcaatgtgcaaaaatcacaagcattcttatacaccaataacagacaaacagagaaccaaatcatgagtgaactcccattctgttattgcttcaaagagaataaaatacctaggaatccaacttacaagggatgtgaaggacctcctcaaggagaactacaaaccactgctcaatgaaataaaagaggatacaaacaaacggaagaacattccatgctcgtaggtaggaagaatcaatatcgtgaaaaatggccatactgcccaaggtaatttatagattcaatgccatccccatcaagctaccaatgactttcttcacagaattggaaaaaaactactttaaagttcatatggaaccaaaaaagagcccccacattgccccaagtccaatccctaagcccaaaagaacaaagctgggaggcatcacggctacctgacttcaaactatacctacaaggcctacagtaacccaaaacagcataggtactggtaccaaaaacagagatatagatcaatggaacagaataaagccctcagaaataacgccgcatatctacaactatctgatctttggacaaacctgacaaaaacaagcagtggggaaaggattccctatttaataaatggtgctgggaaaactggctagccatatatagaaagctgaaactggatcccttccttacaccttatacaaaaaatcaaattcaagatggattaaagacttaaacgttagacctaaaaccataaaaaccctagaagaaaacctaggcattaccatgccaggaccataggcatgggcaaggacttcatgtccaaaacaccaaaagcaatggcaacaaaagccaaaattgacaaatgggatctaatttaaactaaagagcttctgcacagcaaaagaaactaccatcagagtgaacaggcaacctacagaacgggagaaaattttcgcaacctactcatctgacaaagggctaatatccagaatctacaatgaacacaaacaaatttacaagaaaaaaacaaacaaccccatcaaaaatgtgggcaaaggatatgaacagacacttcacaaaagaagacatttatgcagtcaacagacatatgaaaaaatgctcatccatcattggccatcagagaaatgcagatcgaaaccacaatgagataccatctcacaccaagttagaatggcgatcattaaaaaggtcaggaaacaacagagacgttggcaatgtggttgaagccatgtatggggaccttcctcctccaattatgctgattggacatagcatgggtggtgctattgcagtccacacagcatcatccaacctggtaccaagcctcttgggtctgtgcatgattgatgttgtagaaggtacagctatggatgcacttaatagcatgcagaatttcttacggggtcgtcctaaaaccttcaagtctctggagaatgctattgaatggagaaatatcaaagatctatcttgggcagatagcatcaagaatgtagctgctgccagcttggcttgtatctcaggtgccctgcctgcttccgcagtaacaacaagcccagataataagaggatggccaggaatgtcttgaaatatgaaaggctcttggcagagagccccaaccacgtggtagctgaggctgtcatccagaggcccaatataccccacctgcagaccagagacacctacgaggggctatgtcagaccctgggttcccagcccactctctaccagatccctagcctctactgttcctatgagaccaattccaacgcctacctgctgctccagcccatccggaaggaggtcatccacctggagccctacattgctctctaccatgacttcgtcagtgactcagaggctcagaaaattagagaacttgcagaaccatgggaacagagctcctcaccagcaacggaacaaagctggatggagaatgactttgatgagttgagagaagaaggcttcagacgatcaaactactccgagctacaggaggaaattcgaaccaatggcaaagaagttaaaagctttgaaaaaaaattagacgaatggataactagaataaccaatgcagagaagtccttaaaggacctgatggagctgaaaaccaaggcacgagagctacgtgacgaatgcagaagcctcagtagccgatgcaatcaactggaagaaagggtatcagtgatggaagacgaaatgaatgaaacgaagcgaggagagaagtttagagaaaaaagaataaaaagaaatgaacaaagcctccaagaaatatgggactatgtgaaaagaccaaatctacgtctgattggtgtacctgaagacagatcaatgagacagaaagttaacaaggatacccaggaattgaactcagctctgcaccaagcggacctaatagacatctacagaactctccaccccaaatcaacagaatatacatttttttcagcaccacaccacacctattccaaaattgaccacatagttggaagtaaagctctcctcagcaaatgtaaaagaacagaaattataacaaactatctctcagaccacagtgcaatcaaactagaactcaagattaagaagctcactcaaaacttctcaactacatggaaactgaacaacctgctcctgaatgactactgggtacataacaaaatgaaggcagaaataaagatgttctttgaaaccaacgagaacaaagacacaacttaccagaatctctgggacacattcaaagcagtgtgtagagggaaatttatagcactaaatgcctacaagagaaagcaggaaagatccaaaattgacaccctaacatcacaattaaaagaactagaaaagcaagagcaaacacattcaaaagctagcagaaggcaagaaataactaaaatcagagcagaactgaaggaaatagagacacaaaaaacccttcaaaaaattaatgaatccaggagctggttttttgaaaggatcaacaaaattgatagaccgctagcaagactaataaagaaaaaaagagagaagaatcaaatagacgcaataaaaaatgacaaaggggatatcaccaccgatcccacagaaatacaaactaccatcagagaatactacaaacacctctacacaaataaactagaaaatctagaagaaatggataaattcctcgacacatacaccctcccaagactaaaccaggaagaagtggaatctctgaatagaccaataacaggatctgaaattgtggcaataatccatagcttaccaaccaaaaagagtccaggaccagatggattcacagcccaattctaccagaggtacaaggaggaactgagaataaaatacctaggaatccaacttacaaaggatgtgaaggacctcttcaaggagaactacaaaccactgctcaaggaaataaaagaggataaaaacaaatggaagaacattccatgctcatgggtaggaagaatcaacatcatgaaaatggccatactgcccaaggtaatttatagattcaatgccatccccatcaagctaccaatgactttcttcatagaattggaaaaaactactttaaagttcatatggaaccaaaaaagagccctcatcgccaagtcaatcctaagccaaatgaacagagctggaggcatcatgctccctgacttcaaactatactacatggctacagtaaccaaaacagcatggtactggtaccaaaacagagatatagatcaatggaacagaacagagccctcagaaataacgccgcatatctacaactatctgatctttgacaaaccctgggaaaaaccaagcaatggggaaaggattccttatttaataaatggtgctgggaaaactggctagccatatgtagaaagctgaaactggatcccttccttacaccttatacaaaaatcaattcaagatggattaaagacttaaacattagacctaaaaccataaaaaccctagaagaaaacctaggcattaccattcaggacataggcacgggcaaggacttcatgtctaaaacaccaaaagcaatggcaacaaaagccaaaattgacaaatgggatctaattaaactaaagaacttctgcacagcaaaagaaactaccatcagagaatttgagcagtttaacaggaggctaaatgaagtttctaagagagttcgcatacccttgcctgtgtctaatatactttgggaacattgtatacgattggctaatcgaactattgtagaaggatatgccaatgtcaagaaatgcagtaatgagggtcgtgccctgatgcaattggattttcaacagtttttaatgaaacttgaaaaactaacagatattagacccattcctgataaagaatttgtagaaacttatattaaagcttattacctaactgagaatgacatggaacggtggatcaaagagcacaggttgaggggaagaagagagtctgtagagaagagagacccagaacttcatctgtgtgttctgctgtgcatccttgacagcacctggcacagaatctcagctaagatggatgaaatgcaagtactcaggccctttgaactagaatttttgcctaaactgaaagagttgaaatacctgagactgggcgatttacaaacgaaagaggcttataatggacttaccattccacgtggctggggaagcttcacaatcatggtggaaggcaaggaggagcaggtcatgtcttacatggatggcagcaggcaaaaagagaatgaggaagacactgcagatgacatgattatatatctagaaaaccccattgtctcagcccaaaatctccttaagctgataagcaatttcagcaaagtctcaggatacaaaatcaatgtacaaaaatcacaagcattcttatacaccaataacagtcaaacagagagccaaatcatgagtgaactcccattcacaattgcttcaaagagaataaaatacctaggaatccaacttacaagggacgtgaaggacctcttcaaggagaactacaaaccactgctcaatgaaataaaagaggatacaaacaaatggaagaacattccatgctcatgggtaggaaaaatcaatatcgtgaaaatggccatacttcccaaggtaatttatagattcaatgccatccccatcaagctaccaatgactttcttcacagaattggaaaaaactactttaaagttcatatggaaccaaaaaagagcccgcatcgccaagtcaatcctaagccaaaagaacaaagctggaggcatcacgctacctgacttcaaactatactacaaggctacagtaaccaaaacagcatggtactggtaccaaaacagagatatagatcaatggaacagaacagagccctcagaaataacaccacatatctacaactatctgatctttgacaaacctgagaaaaacaagcaatggggaaaggattccctatttaataaatggtgctgggaaaactggctagccatatgtagaaagctgaaactggattccttccttacaccttatacaaaaatcaattcaagatggattaaagacttaaacgttagacctcaaaccataaaaaccctagaagaaaacctaggcattaccattcaggacataggcatgggcaaggacttcatgtctaaaacaccaaaagcaatggcaacaaaagccaaaattgacacatgggatctaattaaactaaagagcttctgcacagcaaaagaaactaccatcagagtgagcaggcaacctacaaaatgggagaatatttttgcaccctactcatctgacaaagggctaatatccagaatctacaattaa

SEQ ID NO: 7890 - DNA, 1857 bp, Homo sapiens
  SIMILAR (2)..(721): 621254mologous to Homo sapiens KIAA1593 protein,accession number AB046813,Smith-Waterman Score=683.
ctgtggcttagcaatttataattgtaccattgtggacctccattttcctttggctttatataagaaactactgaaaaagaagccatccttggatgatttgaaagaactaatgcctgatgttgggagaagcatgcaacagttactggattatccagaagatgacatagaggaaacattttgtcttaattttacgatcacagttgaaaactttggtgcaacagaagtgaaagagctggttctaaatggtgcagacacagctgttaacaaacaaaatcggcaagagtttgtcgatgcttatgtggattacatattcaatacatcagtggcttccttattccgatgcttttcatgcgggctttcataaggtctgtggaggaaaaggacttctggctctttcagcctaatgaactacaagcaatggtcattggaaatacacatttttgatggaagggaaccgggaaggattaccggaatacaaaggggaatatttgggcagaacatccctacgataaaaattttttgggaagtatttcaccgaattaccattggaaaagaagaaacagtttcttgttatttttgacaggtagtgaatcgcattcctattcttggtatgaagagtctgaaacctagtcatccagtccacaggaggtggtgaaggagtatctcccagtttcccatacttgttttaatcttctgggatcttccaaaatatacagaaaaaggaaactctacgctcttaaacttgatcccaagctattgatcacaatgaaggcttcagtttaatataactttggagttataactattcagtttagtgcaaaagcattaaactatttgtgtttttcttgtggtgatgaattcagcaaggtgacagaggtactattataattcttacttgcagaatgttcaatctacgagtgttcatggaagccaaaaaaatattaaaggaaaatgaacaaactgtttaatattattgtacagaaccatggattttttttgaccatcttctaataaacatagcaagtattatgaatacatttaaagttttactaaacatgaattttaagagtttgcatatttcagaaaatgatctggtgtgagtgcatggaaatattgcttaatttttcttcaatcattgagtgaaaaacctttaactttggcctgcaatagtcatttgattattttttcattttgtaaataatgttaagttttgtaataaaatagttatgttctgataccagtacagtttctatggttgtaattgaacttgaacagacttttaaaggttaaaaattatgatttaaatcttactctgagactctataaaaaggaaaaaaaaggtagccatggtggaaacactatcttttcttttttgctagaataagtgtctttgtgcaaacctaaatccaccagataggggaatatacctacataaccctgcagttccttttcctttgtgaatccctgacacactgatagatgggggattgtcgatcagagaaccttattaatatttagtactggaagaactctgtctcccacagttgcccagtaataaaaagaaacattggctactatgagcaccaatcactgggttatagctttcaaaattattgatgctgcagtgctttagagctatttccttgaatttaagaaacaaatcttaacagttttatggtgctgatgcttagttgtctcatgccattaaattgtaaaagtgagttgatgcaatacatgtgactttctgctataatgcaaatatttattttttaaatttattttaaaatgccgtgaaaacctgtttaataaagatttattgttttaatatttaaactttcaaaaaaaaaaaaaaaaaaa

SEQ ID NO: 7891 - DNA, 1650 bp, Homo sapiens
  SIMILAR (652)..(1641): 751254mologous to Homo sapiens KIAA1099 protein,accession number AB029022,Smith-Waterman Score=1295.
atgggagaagccaaggcccaggtatctactgtgcgtttcagtcaacaatacagcttgtgttcgacaatattccttgatgacagcacagccatccagcattatcttacaatgacaataatatcagatgcagatagatctttgagcatacctgatgaacagttacactcatttgcggtttccaccgtgcacattatgaagaaaagaaatggaggtgggagtttaaataactattcctcctccattccatcgactcccagcaccagccaggaggaccctcagttcagtgttcctcccactgccaacacacccacccccgtttgcaagcggtccatgcgctggtccaacctgtttacatctgagaaagggagtgacccagacaaagagaggaaagccccggagaatcatgctgacaccatcgggagcggcagagccatccccattaaacagggcatgctcttaaagcgaagtgggaaatggctgaagacatggaaaaagaaatacgtcaccctgtgttccaatggcgtgctcacctattattcaagcttaggtgattatatgaagaatattcataaaaaagagattgaccttcagacatctaccatcaaagtcccaggaaagtggccatccctagccacatcggcctgcacacccatctccacctctaaaagcaatggcctatccaaggacatggacaccgggctgggtgactccatatgcttcagccccagtatctccagcaccaccagccccaagctcaacccgcccccctctcctcatgccaataaaaagaaacacctaaagaagaaaagcaccaacaactttatgattgtgtctgccactggccaaacgtggcactttgaagccacgacgtatgaggagcgggatgcctgggtccaagccatccagagccagatcctggccagcctgcagtcatgcgagagcagtaaaagcaagtcccagctgaccagccagagcaaggccatggccctgcagtcgatccaaaacatgcgtgggaacgcccactgtgtggactgtgagacccagaatcctaagtgggccagtttgaacttgggagtcctcatgtgtattgaatgctcaggaatccaccgcagtcttggcacccgcctttcccgtgtgcgatctctggagctggatgactggccagttgagctcaggaaggttatgtcatctattggcaatgacctagccaacagcatctgggaagggagcagccaggggcagacaaaaccctcagaaaagtccacgagggaagagaaggaacggtggatccgttccaaatatgaggagaagctctttctggccccactaccctgcactgagctgtccctgggccagcagctgctgcgggccaccgctgatgaggacctgcagacagccatcctgctgctggcacatggctcccgtgaggaggtgaacgagacctgtggggagggagacggctgcacggcgctccatctggcctgccgcaaggggaatgtggtcctggcgcagctcctgatctggtacggggtggacgtcatggcccgagatgcccacgggaacacagcgctgacctacgcccggcaggcctccagccaggagtgcatcaacgtgcttctgcagtacggctgccccgacaagtgtgtgtag

SEQ ID NO: 7892 - DNA, 789 bp, Homo sapiens
  SIMILAR (300)..(172): 331254mologous to Azorhizobium caulinodans fixG,accession number X74410,Smith-Waterman Score=71.
ctaaaatctaggtggtggaaaggctaccttcatctctagaggctctaggggatcttttttctcgccttttccacattctggagtctgcctgcattttttggctttgggctcttctccactctcaccattagcaaccttgcatcccatggacccttcttctgtggccacatgtctctgtggctctttccttcccccttctcttccactgttggctgctgctgtgatctctgcccaagaggagcttctgaccaacatccaaagggcttctggacccactggactcctctggaggtaccttggtctcccgatccatggctgtgtttttttactccctttatcgctgcctgtcgtgtgcaccctagcgtcagcctcgagtttgaccagcagcaggggtcggtgtgtccctctgaatctgagatctatgaggcaggagctggggacaggatggcaggagcgcccatggctgctgctgtacagcctgctgaggtgactgttgaagttggtgaggacctccacatgcaccacgttcgtgaccgggagatgcctgaaggtgaggaggtgataggtgccatctaccctcggtttgcctctggctgctactgtccccaaggttccctttgaggcatcccccacttcgagctcctttctgcttgtagccagctttcccgggagctggccaggaacaaaagctggctctgccttgaattcccaccccttagtatttccccaccgagtccagtcagtttcttttcgcctcccctcccaatcgcccagttcttgctctctcat

SEQ ID NO: 7893 - DNA, 1171 bp, Homo sapiens
  SIMILAR (722)..(847): 401254mologous to Homo sapiens protein-tyrosine phosphatase,accession number U27193,Smith-Waterman Score=53.
atggtcggcgcagccgagctggcgagggcagcgcgggtcccccggaacgccccccgaggcgagcgctaccgagccgctaccttcctggagtacaacagctggcatgtgctcagctccgtcaacatctgctgctccaagctggtgaagtgccggctgcagaagggcaaggtgaccattgcagagttcatctggctggccacacgcagccaaatggaggccactgagccacaggatatggtggtctatgaccagagcacacgggacgccagtgtgctggccgcagaccgcttcctctccatcctgctgagcaagctggacagctgcttcgacagcgtggccatcctcacggggggcttcgccaccttctcctcctgcttccccagcctctgccagggcaagcctgctgccctgctacccatgagcctctcccagccctgcctgcccgtgcctagcgtgagcctgaccctcatcctgcctcacctctacctgggctcgcagaaagacgttctgaacaaggatctgacgacacagaatggaataagctacgtcctcaatgccagcaactcctgccccaagcctgacttcatctgcgagagccgcttcatgcgggtccccatcaacgacaactactgtgaaaagctgctgccctggctggacaagtctatggagttcatctgtaaaggcaagctgtccagctgccaagtcatcgtccactgtctggtcggtatctcccactctgccaccatcgccatcgcctacatcatgaagaccatgggcatatcctccgacgacacctacaggtgcgacctaggagggataggctggatgtgcggcgggatgaggcgaggatcgattttgtgtgaggcggactgttgtagtcgtgaggatgcgtgttatcgaggctgcagcattgatattccgttcggtggatgggggattgtagggccggtggagagcgctgaggagtggcccggaactgggagcgtcagcctcgagtttgaccagcaacaggggtcggtgtgtccctctgaatctgagatctatgaggcaggagctggggacaggatggcaggagcgcccatggctgctgctgtgcagcctgctgaggtgaccgttgaagttggtgaggacctccacatgcaccacattcgtgaccaggagatgcctgaag

SEQ ID NO: 7894 - DNA, 3137 bp, Homo sapiens
  SIMILAR (410)..(589): 961254mologous to Homo sapiens unnamed protein product,accession number AK001686,Smith-Waterman Score=299.
atggttacccatcagcagcctgcagctagaaagccaaacatgacatctaagaaacctaaacccatgggacctaaagcccatgggatcttttcaggaactagaaaaaacaatcttgaaatttatatggaccaaacaagaaccggcatagccaaaacaaaactaagcaaaaacaacaaatctggaggcatgacattacctgatttcaaactatactataaggccatagtcgccaaaatagcatgtggtggttctatgtataattcagatacagatgaggatgaagaaactgagccttcttcttctgggcaacagataattgaaaattcaataactatgaataagatgaagctgctgaaggctaagatgaagaacatgaatctcagcaaaaagcacatcacacaagtgagtgatgaggaagaggatgatgatggctgtgacctttttgctgactctgagaaggaggagaaagatattgaggacattgaagaaaatactagacctaaaagaagcagacctacatcgtttgcagatgagctggctgcccgcatcaagggggatgccgtgggccgagtggacgaggagccgacaactgtgagttatgaggatgacagacgtggaaagaaccaggatgcgtatactgagggaggacttagtactattaaaactgtgaactgttcttcaagccttaccctcaggagaagcaaaacttcggaagacactcaagagaagaaggaaaggagaactccttcggacgatgaagaggataacttattcgcaccccccaagctgaccgacgaggacttctcgccatttggctctggaggtggcctgttcagtgggggcaaggggctctttgatgatgaggacgaggaggacatagaagaatcctctaaccctctctggagtggttacagcctgcgatgggcacgggagcccccgcagcagccagaaactcacactgttgtctccacgaatgagaaaccagaacaatggctgaaaggagagaactgggggtctgtctccactcctttacagaaaagaagcagacctacatcgtttgcagatgagctggctgcccgcatcaagggggatgccatgggtcgagtggacgaggagccgacaaatgaagaggataacttattcgcaccccccaagctgaccgacgaggacttctcgccatttggctctggaggtggcctgttcagtggcggcaaggggctatttgatgatgaggacgaggagagtgacctcttcacggaagccccccaggatcggcaagctggagcctctgttaaggagggtaagctggggctgggcagctgcgtctccgtgtgcagagttccaaaactgtctttctcactaggagatggaaccctgaggagacacggatgtgctgcctccgttccatcactgaaggagccacagaagcctgagcagcccactccaaggaaaagcccctatggtccccctcccactggcctgtttgatgatgatgatggtgatgatgataacgactttttctcgacaccccacagcaaaccttccaaaacaggcactgagaagccttttaggaaaatcgggatggattgtgaccttggagatacctcatcatatcacacaaaggtttccaccgtgcacattacgaagaacagaaatggaggtgggagtttaaataactattcctcctccattccatcgactcccagcaccagccaggaggaccctcagttcagtgttcctcccactgccaacacacccacccccgtttgcaagcggtccatgcgctggtccaacctgtttacatctgaggaaaggggagtgacccaggacaaagagagggaaagccccgggaggaatcatggttgacaccatcggggaggcgggcagagccattcccattaaacagggcatgctcttaaagcgaagtgggaaatggctgaagacatggaaaaagaaatacgtcaccctgtgttccaatggcatgctcacctattattcaagcttaggtgattattatgaagaattattcataaaaaaagagattgaccttcagacatctaccaatcaaaagtcccaggaaaagtggccatccctagccacatcggcctgcacacccatctccagctctaaaagcaatggcctatccaaggacattggacaccgggctgggtgactccatatgcttcagccccagtatctccagcaccaccagccccaagctcaacccgcccccctctcctcatgccaataaaaagaaacacctaaagaagaaaagcaccaacaactttatgattgtgtctgccactggccaaacgtggcactttgaagccacgacgtatgaggagcgggatgcctgggtccaagccatccagagccagatcctggccagcctgcagtcatgcgagagcagtaaaagcaagtcccagctgaccagccagagcaaggccatggccctgcagtcgatccaaaacatgcgtggggaacgcccactgtgtggactgttgaggacccagaatcctaagtgggccagtttgaacttgggagtcctcatgtgtattgaattgctcaggtatccaccgcagtcttgggcacccgccttttcccgtgttgcgatctttgggagctgggatggattggccagtttgagctcagggaaggttatgttcatctattgggcaatgaccctagccaacagcatcttgggaagggagcagccaggggcagacaaaaccctcagaaaagtccacgagggaagagaaggaacggtggatccgttccaaatatgaggagaagctctttgctggccccactaccctgcactgagctgtccctgggccagcagctgctgcgggccaccgctgatgaggacctgcagacagccatcctgctgctggcacattggctcccgtgaggagggtgaacgagacctgtgggggagggagacggctgcacggcgctccatctggcctgccgcaagggaaatgttggtcctggcgcagtccctgatctggtacggggtggacgtcatggcccgagatgcccacgggaacacagcgctgacctacgcccggcaggcctccagccaggagtgcatcaacgtgcttctgcagtacggctgccccgacgagtgcgtgtag

SEQ ID NO: 7895 - DNA, 2422 bp, Homo sapiens
  SIMILAR (2167)..(527): 641254mologous to Homo sapiens KIAA1099 protein,accession number AB029022,Smith-Waterman Score=1694.
  misc_feature (1)...(2422): n = a,t,c or g
tttttttttttttttttcctttctcaataagcaaattgtaccaccatcttattctgagatgctcctttttaaaagctgtacatcacattaatggaagtggttactgctgggaatattttccatgtgcaatgatctgtaaccctctttttcttttttttgagaccgagtcttgctctgttgcccaggccagagtgcagtggcaacagagcaaaacatcgtccaaaaaaataaaaataaaaataaaaatgaaaaagaggtgccatgtgtacaaaaatcaatgcacatttatgaacttcttttattcaaatatattttcacacattttatctaaatacataacacagaagcctgtgtgacttgggcaacgtggtccaggagggcctgagactaacacatccaccttggccagaaggacataaaatacgtcttatggtcagaaaaaatcaaacaattttgtgtatttacttagtttacgaaaaagtactgaaaatgctattattagctgaatttgtgatttccttttgaaaattctgaggtaatccttatttttcccattttgtttttgcaccaaggagactgcagtcaaataaaacaggatactacacacactccgtcggggcagccgtacttgcagaagcacgttggatgcactcctgggctggagggcctgccgggcgtagggtcagcgctgtgttccccgttgggcatctcgggccatgacgtccaccccgtaaccagattcaggagctgcgccaggaaccacattcctctttgcggaaggccagatggagcgccgtgcnagccgtctccctccccacaggtctcgttcacctcctcacgggagcccatgtgccagcagcaggatggctgtccgcaggtcctcatcagcggtgggcccgcagcagctgctggcccagggaacagctcagtgcagggtagtgggggccagaaagagcttctcctcatatttggaacggatccacccattccttctctttcctcgtggactttaattgagggttttgtctgcacctggcttggtccctttccagatgctgttggctagctcattgccaatagatgacataaccttcctgagctcaactggccagtcatccagctccagagatcgcacacgggaaaggcgggtgccaaaactgcggtggatacctgagcattcaatacacatgaggactcccaagttcaaactggcccacttaggattctgggtctcacagtccacgcagtgggagttcccacgcatgttttggatcgactgcagggccatggcctcactctggctggtcagctgggacttgcttttactgctctcgcatgactgcaggctggccaggatctggctctggatggcttggacccaggcatcccgctcctcatacgtcgtggctttaaagtggcacgtttggccagtgacggacacaatcataaacttttcttcttcttcctcagcagtgctggacaggccatcatcttttaagttgttggtgcttttcttctttaggtgtttctttttattggcatgaggggaggggggcaggttgagcttggggctggtggtgctggagatactggggctgaagcatatggagtcacccagcccgatgtctgaattggctgacatatgcagagcttccatgtccttggataggccattgcttttagagctggagatgggtgcgcaggccgatgtggctagggatggccactttcctgggactttgatggtagatgtccgaaggtcaatctcttttttatgaatattcttcatataatcacctaagcttgaataataggtgagcacgccattggaacacagggtgacatatttctttttccatgtcttcagccatttcccacttcgctttaagagcatgccctgtttaatggggatggctctgccgctcccgatggtgtcagcgtgactctccagggctttcctccctttgtctgggtcactccctttctcagatgtaaacaggttggaccagcccatggactgcttgcaaatgggcgtgggtgtgttggcagtgggaggaacactgaaataaaggtcctcctggctggtgctgggagtcaatggaatggaggaggaatagttatttaaactcccacctccatttcttttcttcgtaatgtgcacggtggaaaacgcaaatgagtataactgttcatcaagtatggtcaaagatctatctgcatctctttccgtgatatgatgatgtatctccaaggtcacagatattattgtcattataagataatgctggctggctgtgctgccatcaaggaatattgtcgaacacgagctgtattgttgactgaaacgctcagtagatacttgaccgatgttgagaaactcaaaggtttccatttcgaacccaaagctggcatctataagcat

SEQ ID NO: 7896 - DNA, 280 bp, Homo sapiens
  SIMILAR (191)..(244): 471254mologous to Human immunodeficiency virus type 1 envelope protein,accession number AB000078,Smith-Waterman Score=46.
caccaccaaagctgaccacccccacttcacccgacgtgttgaaagttacatcaaatgccacaaagcaaaaacagtcaagcgtgccagcatttatttcaggcctggtgactgggacactgaaacacttggtgaaacatgccagggctctctggaaccggctcctccaagaccctcgcagaagagcaggttccctgggcaagcctgtgccaccggatgggtcctccgtggcgtcagacacagccacccattcctcagggtcgttttgcagccctttcacatt

SEQ ID NO: 7897 - DNA, 1726 bp, Homo sapiens
  SIMILAR (217)..(411): 501254mologous to Canis familiaris melanoma antigen,accession number AF187325,Smith-Waterman Score=161.
ggttctatctgaaggaacttgatccagcagagcactcctatgtcttgatcagaaaaatcgatcctgccctggtttggggcctgacaggcgaccagggcacaccaaagacccggctcctgatgattactctggactcgatcttcatgcaggccagctgtgtccccgaggaggtggtctgggaggtgttgagggtgttggaagcacatttcgtctaaaaagcatttcgtctttggggagtccatgaagctcatcaccaaagctagtgtgcagcaggagtatctggtgcacaaataggtgtcccacagcaatcccacgctctatgtattcttgtgggggctctcaaaggaaacaagacagatggaagtcccggagtttgtggccaaagtgaatgacacccaccccagttccttttccgtgggcagtaaatgaggcatttgagagaaggagggagggagataccccgtgcccgagatgggcagctgccgtttggtgaccgtgacaagtgccagtgtttagttgccagttccagttccagggcctatgccatggctgaagcaagcatcagcaccagcaccaatgcaagtgccagttgccagtgccagggctagagccatggctggagcaagtatcagtaccagggtccgagctgccagctgtggaaaactcaccattgattggccacagcccatcgccaccaggacccaggaacaagcagcgctgccaccaccaaagctgaccacccccacttcacccgacgtgttgaaagttacatcaaatgccacaaagcaaaaacagtcaagcgtgccagcatttatttcaggcctggtgactgggacactgcggcgagcaggggcatggagcagcagaaggggcttggtcaccgttcatggctctgtgtctgtggctccggtggtctcagattccgagtgcccggtatcctcccctgaaacacttggtgaaacatgccagggctctctggaaccggctcctccaagaccctcgcagaagagcaggttccctagggcaagcctgtgccaccggatgggtcctccgtggcgtcagacacagccacccattcctcagggtcgttttgcagccctttcacattctgaaagacagacaggtcagcaggtggaaggaagggagtgaagatcatgcttccaggagtgtgtgatgtgccggtagggaccgacaggacttcgttgaagacaccggcgaagctcgtcactacgaagatgtccttcccaccagccaggccatcgctggctttgtaaggtaatgagattagcaacattagaggtgctgaaacacagcctgagcggtcacttgtaccgtatgctagcggtttttcaaagaaaggagtcccgggctggcccaggaggccaggctgctcagtccccgaagcctgatggcaggtgaggtggacaaccctgttgtcccgcccagtaacatttccttttttttttctgaatctcctttgagaaaataagctgcctctgtgcaactgcagaatctgtgaaggtccagggctggtcatgcctgcaagcccatactcagatgtcgcctccagtgggctgggtggggagaggtcatgtgattgttggcaggctctagtgggtcgctggcctgagggcctcagttcctctatggctgttggccagagactttcatcagctcctcgccagctggccttctccatctgggcaaacacgcgtgcaggaagagc

SEQ ID NO: 7898 - DNA, 351 bp, Homo sapiens
  SIMILAR (17)..(349): 581254mologous to Drosophila melanogaster CG11757 gene product,accession number AE003485,Smith-Waterman Score=327.
ggcacgagtattactggatgtgttttgtgctctacatggaccaagagaaagatgtgttgaaattctgaggagtggccacttgttagctatctcaccaggtggagttcgagaagccctaattagtgatgaaacttataacatcgtatggggtcatcgcagaggctttgctcaggttgcaattgatgcaaaagtgcccattattcctatgtttacacaaaatattcgagaaggatttagatcacttggaggaacaaggttatttaggtggctttatgaaaaattccgctatccatttgctccaatgtatggaggttttccagtgaagttacggacctatttaggcgaccccat

SEQ ID NO: 7899 - DNA, 534 bp, Homo sapiens
  SIMILAR (224)..(397): 911254mologous to Homo sapiens Human secreted protein, SEQ ID NO: 7164,accession number G03083,Smith-Waterman Score=272.
cgaaaagggggaaaggccccactggagcaataagccaagcaacctgaagaggacccatgaactggacattgatgaaaacccagcttcagactttgatgacagtggttcccttctaggattcaagtatggctcaggacaaaaatatggtggaatcccttatttcagtcatcgccaggtcaggtagtgagagaagaatgtgaaacttaaggctaagtacctaaacatgcgcggacaaataaagatgaaaaacaaacacatcttctttaccaaagagacagaaaaaccatttttcaagaaaagcaaaattctgagtaaggtagaaaaattcctcacatgggttaataaaccaatggatgaagaagcatcacaggaatcatcttctcatgacaatgggcacgacgcttccacaagttgtgattcagaggaacaagacatgtctgttaaaaaaggtgatgacctactggagactaataatccagaacctgaaaagtgtcagagcgtatcttcagctggtgaacttgaaacataaaacta

SEQ ID NO: 7900 - DNA, 1588 bp, Homo sapiens
  SIMILAR (1208)..(1336): 501254mologous to Arabidopsis thaliana Contains similarity to,accession number AC009917,Smith-Waterman Score=114.
atgcccgtgggaacaagtaacttcctcctcctggggctgcttgaaaaccctaatcttcctctcaccaggccaagtcccttcccttctcagcgggaggccagctggggcatccaaaaagccacaacgggccctggggagggagaatgcacccgtctggggtttagtttattactggatgtgttttgtgctctacatggaccaagagaaaaatgtgttgaaattctgaggagtggccacttgttagctatctcaccaggtggagttcgagaagccctaattagtgatgaaacttataacatcgtatggggtcatcgcagaggctttgctcaggttgcaattgatgcaaaagtggtagaaaaattcctcacatgggttaataaaccaatggatgaagaagcatcacaggaatcatcttctcatgacaatgtgcacgacgcttccacaagtagtgattcagaggaacaagacatgtctgttaaaaaaggtgatgacctactggagactaataatccagaacctgaaaagtgtcagagcgtatcttcagctggtgaacttgaaacagaaaactatgaaagagacagcttgctagcaactgttccagatgagcaggattgtgttactcaagaagtgccagactcccgccaggcagaaactgaagctgaagtgaaaaagaagaagaacaagaagaagaacaaaaaggtgaatggtctgcctcctgaaatagctgctgttcctgagctggcaaaatactgggcccagaggtacaggctcttctcccgttttgatgatgggattaagttggacagagagggctggttttcagttacacccgagaagattgctgaacacattgctggccgtgttagtcagtccttcaagtgtgacgttgtagtagacgcattctgtggagttggaggaaataccattcagtttgccttaacaggaatgagagtgattgccattgatatcgatcctgttaagattgcccttgctcgcaataatgcagaagtttatgggatagcagataagatagagttcatctgtggtgatttcttgctgctggcttctttttaaaaggctgatgttgtgttcctcagcccaccttggggagggccagactatgccactgcagagacctttgacattagaacaatgatgtctcctgatggctttgaaattttcagactttctaagaagatcactaaataatattgtttattttcttccaagaaatgctgatattgaccaggtggcatccttagctgggcctggagggcaagtggaaatagaacagaacttccttaacaacaaattgaagacaatcactgcatattttggtgacctaattcgaagaccagcctctgaaacctaactatgcagcagtgcgaggacaaaagatcatggagtggtcaaaatattcagatgagacatttggcatgtcttcctttattcactgatattttctacccatggtcttatatcaccgtatgaaatggaaacttacaggacttaaatatcagtgaaatattttgagatctttgaataattcctttagaggaattatacaaaattaatatatatgagtcct

SEQ ID NO: 7901 - DNA, 2730 bp, Homo sapiens
  SIMILAR (3)..(554): 601254mologous to Homo sapiens gonadotropin inducible transcription repressor-1,accession number AB021641,Smith-Waterman Score=591.
agagaattcacacgggtgagaaaccttatgactgtaaggactgtgggaaggcctttggtcgtacatcagaacttattctacatcagagacttcatactggtgtcaaaccttatgaatgtaaagaatgtgggaagacctttaggcagcattcacagctgattctgcatcaaagaactcacacaggcgagaaaccctacgtatgtaaagactgtggcaaggctttcattcgtgggctcccaactcactgtgcatcggagaatccacacaggggccagaccctatggagtgttaaaggaatgcggggaaagccttttagacagcactcacagctgactgttacaccaggcgaatccacactggttgaggagccctacgagtgtaaggaatgcggaaagggctttattcacagctcagaagttactcgacatcaaagaattcattctggggagaaaccctatgagtgtaaggaatgtgggaaggccttcagacagcacgcacagctcacacgacatcagagagtccatactggcgacagaccctatgaatcggctgaagactgacgcgcccgattgcctcggaagccccgtagaccatcacagatgccgagctttagtaactctcacagtggagggcagtcaagcacagcacagcgaaaagccagaggatagaacgacaatgacacaagctaaacgacaacaacacaggagcacaataactgtccggcacacaacgttgacaacaaaccagcgcaagccaagccaccgtactcacaacatgcgatcgaagagattgagcttaagagagagcccaagccacatacacacccacgaagatccaaagcgacatagccaccattcacacgacaaacaaacccacagcctgagcccagaaaaacacgaacgagtccctaaaccaaaacgacagacacaaaagagcgaaagcgacaaatacaaactgcacgaacggagacaccctagactgaccaccgaccggcacaacacagagaacacaggccaccccccacacaggacccaccagacaagtccgaccccaccacaagctaagaacaaaaggaccgccaagacggcaagggaccgcacacgcgcgaccggaacagtacaagccaagacgcaagcgcaggcagcccgtagtgccataagaacatcaccaacggatcgggccataagacgccagaactacgaaagcacagacagactaaacacaacaccagcacacaatacaatggccaccaacgacccgcgaaccggaacacaacaccacatcaccacgcccaaaacaaggaacgcacacagaaacaacaagcaacaccggcaggaacgacaccaggacgcacagaaaagagcaaacaacacagcagcccagaaactggatagcatacacagccgcaggcacgccccagcgacccccggcggacacaacacgcgcaccagagggcacagccgccccaccggacacacgcgccacggccccaaacacacacaggcggaggtgccaccgcgaagcgcacaccgggagcgcgcccaacggtgcatgccgcccgcatcatcaattgacactcagaacgaacgaaagccgtatacggcacacgagcaccaaccacccatatacaagacccccgcgaagagtaactggatagcatcctatgcgcacccacacgcaggccgccagcatccccatgcccgcagcgaccgaaccacagcagccctacgcgcaccacccgccaaacaccgccacggggttagcaacgcctttgcgggtaagcggtacatcggcggcacgcgaggcgggattacagcatatcctgtaagacataggtgcacaggcaacgttcacatgctgctgcccccccccccccccccccccctattagtaactggtagcagccacgaaccgaccacaacaccccagcccaacccgcgctacaacacccccacgcaacccaagcagaagtacacaaagacccccccccaccccaacaccccaccacaccccagccccccacccccccccccaccccgccacacccggcccgacgcacgcaaaccactcgaccccaggcaacacagccaccacgccacacagaagacccgccatccacactggctacgacaaccacacggaggacaggcagcagcaaggacaacccaacggcaccgacataacccccccacggacgagcacatacacatccgcgtacggaacattcactccggtccgagtaacgccgaatgcgtagcgccagcctgcacgcatgagcgggaccagctcacgaccaaaaccacagacaagccagaaccaacaacgaccaaagcgaagaacagacacagagcaaccacaacgcacccatcgacggccgcaccaaacatcgacaatacaaggaaacgacgcgcagacctccaccacgaaaagcagacggaaaaaagatatcccaagcagcagacacatcacaagagcgactgcacccgagaacgctcaacacccactacacccagcaaacccacaggacaacggacacaccacatagggaagcgaaaatggggaccgcgaagcagggacctcgggtggctggtgtacgaactcactccccccgtgagtatgcctccattctcagtgtatcaatgttcgctcagtgaaatggaccaagtgtgggcacttcgggtagtgcccaattatggtactaacaatcgttccataacgaataccgatttg

SEQ ID NO: 7902 - DNA, 1891 bp, Homo sapiens
  SIMILAR (215)..(568): 261254mologous to Mus musculus plenty-of-prolines-101; POP101; SH3-philo-protein,accession number AF062655,Smith-Waterman Score=97.
atgaaacatgggatgcctttgcatatggtggtgttgaaagccacaggacagtacggggtctcaggggattctgcagtccccgagggttgccctacgataccgacactcgcggcagccctgcgaggcgagtatgatcgtacatataacggagtagcacactacggcttcacagactactatgtcccaggcggtcaggctcgacggtccgattacctctcctccgccagacgacacgcgaccctgcgcgaagcaaaccaacccaagggggaccgccacccaaccctccacccacccgacaaggccgccccacagccctcaccaaccccagccagccacgcccacgacaccgcgcgcacccacaccaacacgccaccccaaagccaaggacaaacgaagaacaagagggacgccgacacacgaaacagcccaacccaacacgaacagaaccacgaccaccaaacagaagaggcagaccaaacccccagacgcgacgcaccaaacaacaaaacacaacaccgcaagcccacacaagcacacgcaagaacgcacgcacgccaggtctttgcccataatgtgtcaagggcaaaacagagggtggatatgatgcacgtgcctcagcccggggcccgtacatggctggcgtcagctggccaggggagcatgaagaccctggagcaccggaagccagaagaggccgccgggcgctaccaggttgggtcggctttccccgagatgagcacacacaccgaaagcaccccaaaaacgacagcgcacaccagcaacgaccgacggaacagagaacagcgagtgaaaaagaaaacctacaagacaacacgaagtcgaggcgctaatcgcaacagcacagaacgacacgaagacgggtatttctatggcagtctgaccactggaccactgccatggcacagtgcaatacacagtgtatctgcgggccagccctggtctctcaagtttgttacaggtctgcaacaagccagtgaggggtacttcagtcaatcacaggagaggagtttgcccaatcggaagagctctgtgccaaggctccgcctcctgtttctacaacaagcctccaggctctctgagctgcccctggggactgagggtccaggaagtttgctgcttaggcccagagaggagctggcctgcactggaaagaggagaaagacaggtggggccatcatgggggaagtgagtgtttgtgagctcagtctgcctgccccagccttccagtctccagtacagctgtgtggttgtcagccggaaaaggcctgaccccagggacacagctgaggctgggagtaccttggtagcctacactgaggagcccagggcaggaagtgggacttacacaaggactgataacatcagggcctggaggggtgttgtctacaacaccccattttctcctaaaagcagagctctggtggcctattgccaagccacacaacccctgttgccccacatcctgctcaacacaggcctgccccacccaccccagcagcatccgtgtggccaaagcgagttattcatcactgggggcagcggggaccaggcaccgtacgaggtgattatctggcgcttaccaaagggggatgaggatctggtcccccccggaactggtgatcaaaggatccagtttcctcggagtgcctggacccaccccctctacagcgtttctccctggttttcgcgttcgatgcgcggcgagtcgctgcgacaccatgcgatgggctgcctgccatcgtcacggtgggacattcgtcgccgcttcgcccccccccgccgtgatactcgacgacttgtcctgaccgcgccgaggagaatgcgagacgctaccttctcgcgacagtctaccaccttggttcctcgttga

SEQ ID NO: 7903 - DNA, 2556 bp, Homo sapiens
  SIMILAR (98)..(1885): 991254mologous to Homo sapiens drebrin E2,accession number U00802,Smith-Waterman Score=3073.
cgggaggcggcggcggcgactccctctttccctccctcctcctccgtccgcccgtccgtccgcgcgtctgtccgttcggcccggtccggcccgaagcatggccggcgtcagcttcagcggccaccgcctggagctgctggcggcttacgaggaggtgatccgagaggagagcgcggccgactgggctctgtacacatatgaagatggctccgatgacctcaagcttgcagcatcaggagaagggggcttgcaggagctttcgggacactttgagaaccagaaggtgatgtacggcttctgcagtgtcaaggactcccaagctgctctgccaaaatacgtgctcatcaactgggtgggcgaagatgtgcctgatgcccgcaagtgcgcttgtgccagccacgtggctaaggtggcagagttcttccagggtgtcgacgtgatcgtgaacgccagcagcgtggaagacatagacgcgggtgccatcgggcagcggctctctaacgggctggcgcgactctccagccctgtgctgcaccgactgcggctgcgagaggatgagaacgcagagcccgtgggcaccacctaccagaagacggatgcagctgtggaaatgaagcggattaaccgagagcagttctgggagcaggccaagaaggaagaagagctgcggaaggaggaggagcggaagaaggccctggatgagaggctcaggttcgagcaggagcggatggagcaggagcggcaggagcaagaggagcgcgagcggcgctaccgggagcgggagcagcagatcgaggagcacaggaggaaacagcagactttagaagcggaagaggccaagaggcggttgaaggagcagtctatctttggtgaccatcgggatgaggaggaagagacccacatgaagaagtcagagtcggaggtggaggaggcagcagctattattgcccagcggcctgacaacccaagggagttcttcaagcagcaggaaagagtcgcatcggcctctgcgggcagctgtgatgtaccctcgcccttcaaccatcgaccaggcagccacctggacagccaccggaggatggcgcccactcccatccccacgcggagcccgtctgactccagcaccgcctccacccctgtcgctgagcagatagagcgggccctggatgaggtcacctcctcgcagcctccaccactgccaccgccacccccaccagcccaagagacccaggagcccagccccatcctagacagtgaggagaccagagcagcagcccctcaggcctgggccggccccatggaggagccccctcaggcacaggcgcctccccgggggccaggcagccctgcagaggacttgatgttcatggagtctgcagagcaggctgtcctggctgctcccgtggagcctgccacagctgacgccacggaggtccacgatgcagctgacaccattgaaactgacactgccactgctgacaccactgttgccaacaacgtaccccccgccgccaccagcctcattgacctatggcctggcaacggggaaggggcctccacactccagggtgagcccagggcccccacgccaccctcgggtactgaggtcaccctggcagaggtgcccctgctggatgaggtggctccggagccactgctgccagcaggcgaaggctgtgccacccttctcaactttgatgagctgcctgagccgccagccaccttctgtgacccagaggaagtggaaggggagcccctggctgccccccagaccccaactctgccctcagcccttgaggagctggagcaagagcaggagccggagccccacctgctaaccaatggcgagaccacccagaaggaggggacccaggcccagtgaggggtacttcagtcaatcacaggaggaggagtttgcccaatcggaagagctctgtgccaaggctccgcctcctgtgttctacaacaaggcctcagagaatgtcattcacatgctgggatgcagacccagttccagaagaggaggagggcttcgagggtggtgattagcggtggcgccagccctaggctacccttgccaaggccgcccacctgcatcagcctctggccagacggcccgccgtgcctgcattcgcagcagctccgcctggcacccactccggattccggccctggctggggacttggccgcttccctacccacagggcctgacttttacagcttttctcttttttttaaaaagttgataggagacttgtacagttgactggctttcctctcgttggtagttgagacgctgttgcaaattccacccctccttccctggtccagattgtagctcttagtcctccctgctcagctggccgggttggaggcctcaccctgcttggggcctggcgtggggggagctctggtgggaaaatgtcccccacctcttttcctagttttatgtttcttgggaaaatatcactttgtattctctgtccagggcttcagatattttgcacgaattttaaaacatggcaataaatggctcgtgggctctggctccctgg

SEQ ID NO: 7904 - DNA, 178 bp, Homo sapiens
  SIMILAR (3)..(170): 1001254mologous to Homo sapiens MHC HLA-A24 cell surface glycoprotein,accession number M12758,Smith-Waterman Score=296.
ctgtggtggtaccttctggagaggagcagagatacacctgccatgtgcagcatgagggtctgcccaagcccctcaccctgagatgggatagaaaaggagggagctactctcaggctgcaagcagtgacagtgcccagggctctgatgtgtctctcacagcttgtaaagtgtgagacag

SEQ ID NO: 7905 - DNA, 1225 bp, Homo sapiens
  SIMILAR (6)..(188): 831254mologous to Homo sapiens lymphocyte antigen,accession number M84375,Smith-Waterman Score=265.
atggggtcatggcgtcccgaaccctcctcctgctgctcttgggggccctggccctgaccgagacctgggcgggtacccactccataaggtatttcagcaccgccgtgtcccggccgggtcgcggggagccccggtacatcgcagtgggctacgtggacgacacgcagttccgacgcggcgactccgaggatgtagccgcagtcgccgtggttggagcaggagggaccggagtattgggaccggagcacacggaacatcaggcccgcgcacagactgacaagagtgaacctgcccatgccgcgccgctactaccaccagagctaggccgggactggaattttccacggaattcggagattatcccagatacctgtgtccagacacatatgatccaccattccgtctctgactataaggccaccctgaggtgctgggccctgggcttctaccctgtggagatcacactggcctggcagccaggatgaagaggaccagacaagggaccatgaagcttgtagagaccaggcctgcaggggatggaaccttccagaagtgggcggctgtggtggtgccttctggacaggagcagagatacacctgccatgtgcagcatgagggtttgcccaagcccctcaccctgagatgggagccgtcttcccagcccaccatccccatcgtgggcatcattgctggcctggttctctttggagctgtgatcactggagctgtggtcgctgctgtgatgtgcaggaagaagaactcaggacattttcttcccacagatagagtgagcttacttctgaaagggcaagcagcgaccatgcgcagggttctgatgtgtctctcacggcttgtaaagtgtgagacagctgccttgtgtgggactgataggcaagatttgttcacgccttccctttgtgacttcaaaaaccctgactctctttctgcaaaggcacctgaatgtgcctgtgttcctgtaggcataatatgaggaggtggggagaccaacccacccccatgtccaccatgaccctcttccctcatgctgacctgtgttccgtctccaataattaatcattcctgctccatagacgtgaggctgagatgtctccatctctgtctcaactttatgtgcactgagctgtaacttcttacttccctattaaaattagaatctgagtataaatttactttttcaaattcttgccatgagagggtgatgggg

SEQ ID NO: 7906 - DNA, 591 bp, Homo sapiens
  SIMILAR (266)..(421): 781254mologous to Homo sapiens acetylcholine receptor beta- subunit preprotein,accession number X14830,Smith-Waterman Score= 234.
atggtcactgattatgccatagagcttttccttcaggcaagtctaatccttctctcttccactctgccctacaacgagagagagatggggctctcaatctttgcactgctgacccttactgtgttcctgctgctgctggctgacaaagtacctgagacctcactatcagtacccattattatcaagtacctcatgtttaccatggtcctcgtcaccttctcagtcatccttagtgtcgtggttctcaccctgcaccaccgctcaccccacacccaccaaatgccccttttggtgccgtcagatcttcattcacaaacttccgctgtacctgcgtctaaaaaggcccaaacccgagagagacctgatgccggagccccctcactgttcttctccaggaagtggctgggctacatcgctcgacagctgcaggaacaggaggaccacgatgcgctgaaggaggactggcagtttgtggccatggtagtggaccgcctcttcctgtggactttcatcatcttcaccagcgttgggaccctagtcatcttcctggacgccacgtaccacttgccccctccagacccctttccttga

SEQ ID NO: 7907 - DNA, 4494 bp, Homo sapiens
  SIMILAR (4243)..(3281): 531254mologous to Mus musculus homolog of human SYT,accession number X93357,Smith-Waterman Score=870.
gatttttgaagaaccagtttattaagagattacaccaaaagcataaacaatttatacgtcaaactccgactgaaaaaaaaataaccgataaggatgttttttaaatgtactgtactcacaaataacaagacaaatttgacctgttcaataaatagaaatgaagtggctaaaaatgtttaaatggaaatggaaaacagtcgtcttctttgtacagttttgaaggggtgccccctattcacgcctacacgtagaaaaaccctgacaaaatcagaggttcacttaacactccaaccatatgagcgtattaaggtttcttttcagatcttaggagatcttgtccaccttaatcccattcacagatcttaggagatcttgtccaccttaatcccatcataaagactgttggcatgagttctgatgtactgttttaatatgctgagtactgttgattcaacaacaaaccttaatgggtgatgagcttttgcataccaatatgaatttgtcagcacttctgaaaactggccatcatttttcaaattcacaatttgctggatgtcagggaacaataggaagaagaatgagcgtcaattttcatgtcttcctttgcttcttcactggccttccatagaagtagtcagaaaaaaacaaagcaccatcaaccacacttcacaaacaattcatgttggcctaagctttgctcaacattcatatgacagaagatagaataatgaaaaggaactgctggcatcactttccccataatattacataaaaatggacagcacattaaataaacattctgttattaatcattaaatatattaacaccaaaaatcatgtataaattaggaaataaatgtacaaactattttgcaaagtgctttttaaaatatatacacaacattcaagatattcttaatgtaagacatttcagattgaagttttggggtaagtgtccttttctttcagaaagtattattaatacagcacttaaaaaaacacacaaacacacaaaaaaggcatattcccagattggcaaggaataaaaataaactatcttcacagttatctaaaatgtttaacattttcagtgggaaattttagtccccgattgagtttgcaaattaggtctatgaaaattgacaggaaaagaacacaatcaagggagatgactccctaactgaaattgctaacgcgtttgtcaattagcaattaagaactctcatttcggtgatcgaatatgaacacatacgtttatttttgagcccttaccagtgttaagggttttagaaacccttagtgcctacaaaataaacacttctctccccatttgtgcgtgacatccgtctcctaggagaggggagaatgtcctagaacaggactggtattcaacacaggcaagtcctttaatctgtgcctcagttcttcatctctaaaatgggaactgttacctgcctccagatttcctcataggggctgtcagaattaattcaagcaaaacacataagtgacttataaattctaaagcacccgactctggataaagaattaattttaacttatttatttatttatttatttatttttttgagacggaatttcactcttgttgcctaggctcgggtgcaatggtgcgatcttgccccaccacaacctctgtctcctgggttcaagccattctcctgcctcaggttcccgagtagctgggattacaggtatgcaccaccatacctggctaattttgtatttttagtagggacggggtttctccatgttggtcaggctggtctcgaactcccgacctcaggtgatccgcccgcttcggcctcccaaagtgctgggattacaggcgtgaaccaccacgccaagaattacttttaacttttaaaacaaaacatcaattaaagagaaatatcgttattactaggcctcatatatcaagcattggatatctcttgtattttcttggtagttcttggaaatctgtcagcatttatccaaagattttttttaaaaggattcatagcaaatatgaatattattattccaactaaaggttgatcaaatgtccatgctacttgttaattgaaatgtgggatttttttcctttgaccatacttttgcaagtgtgctgtctttaatgttcacacagaatttaaatgggatttaatgtcttagaaatgtaaaaattactcaagtttctctatataaaacctttacttttcattagaaagaacacagtaatgtaactggatgtgactttcagacatccctaaaagaaaagaaatgcttgcttggagatctgagcaagtaggtcctggaagaaataatataaaataaacaacttgccaactgttgggaagatttggtttgaatatttaaaattacctatcaacttagaattgggcttattaaatattccaatcccagaaatgaccatcagctaaacaagggtcaaagccagagtaatctctgagggcccacttcccagagagctgcccctttccttcagcaataccgctggccctgggttaggcaatttgtccacggcccttagggattcatatttatttggaatacagtcactgatccctgtttactttttaatacaaaaacatgtacctttttggataaacggaattggcgagagacaggcaatgggcaagctctggaagtggccatctgtggcctctcccgtgggagatgtttatccttttcgttacgtaacagaaactgacccaacgcacagaagatgccctcccacccaccccatcgaggcacaggaagaggctgccctccaggggctgcatgtgtgtccagctgtggcgtagccagttaaagaaaagttgacaacccacactacaacactgcatgaggaggaaaatgagacctaacgtctgttgacgggaacaggtggactgtggtgtcctcgagatctgtcctgtccctgggcacagaatgctctgatgacaaaatgacccccaaagctagctagaaacattgagaagggggcgggggacaaaaaaaggatacctctccgtgtaccgacatacaatactatacacagcaccaaaagtatcacaccaccaagcgctgtctcacgccagtggtgtgcgctcggcgtcatacccagcatgaaatgagcacgcttcacatgcagacgtggcactgggcgaacaggtaaccaacatgtcacaattcaccagagctgccgccagcccatccggcccctggatgaacacgctaccacaagggctccagccagaatgtgtgtcccttactgctggtaatttccatactggccctgttcatagccgtagggccgctgctgctgggcagacggcgctgtctgcggtgctcggtagcttccgtactgctggccttggccttgctggtagccggggtactgtgacggggctccctgggcagacccgtagccctgctgctgcccggggtagctctgctggctggggtactgctgctgggagtacgtctgctgctgcgcggcaccctgctggtacccggcctgctgctggctgtactgggagtttcccccctcatagtagtgctgcgtggactcctcgaaggaccggtcgtagctctgctccgtgtaggatgactgctggtaggcgtaatcgccatggccgtcggggtagtactgctggcccatgggctccgcggcgccctggctgtggctgtactgctcgccatagtactcctcctggcccaggtactgctgggaagagccttgctgggagggccggtagggcgccatgggccgctgccccatcatgctgctcccctggctgccctgccccatcatggcgatggacgactggccctggtagtgctggctgccgccctgcgccgagctgtagtgcgacgtggccgcctgctgctgcatcatggagactgggttggactgcatgttgatgttggtccgagacacgtagttgccgatggtgccttgcccctgcatggggacgccctgcgaggcgggtcccgcgtggctgtagccgggcccagagatgctcatggaggtggtgggcagcgtgttaggcgccgtctgctgcatggacacgtggctcggcccgttgccaatctggccctgcaggagggaggagggtggcaggcccgtgctgatggcgtcactcaggctgccctgagagtgcaggccctggctggagccgctctgagtcagggctccagggcccaggttcatgttctgcgtgggcggggcaggaagcagggactgcatgttctggttggagtctgcgatcgtggccaggtataccaggttccggtgcaggatctgctggtactgcgtgcactcggccgtcttgcccttgctctggtactccaggatgcactggatcaggtggtggttctcgtccagcatcttctggatggtttgctgcgtaacctcccctttgcctcttggccgggcagacgcgaaggccacggacatggtggcggcgcggggctcagcccgtg

SEQ ID NO: 7908 - DNA, 3168 bp, Homo sapiens
  SIMILAR (280)..(885): 1001254mologous to Homo sapiens dJ508I15.2 (KIAA0063),accession number AL021707,Smith-Waterman Score=1093.
gtcttacattttatgtgtttttttaaattctgcactttgacagtggtagcaaaataaaagtaatccaaaagttatttttctattgagaagagagaagaggtgggttttatttttttccttttgattccaatcttttctcccagtgacaaagcataaatcatggacaccagagaataaggtggacctcaggaatccggaaaagactgagaagcttacattcttcctctagagggaagagtggggtgtttatagccatctctggaacctaaaacaaaaaacatgagttgtgtgccatggaaaggagacaaggccaaatctgaatcattggagctgccccaggcagcacccccacaaatctaccatgagaaacagcgcagggagctttgtgccctccacgccctcaataacgtcttccaggacagcaatgccttcacccgggatacgctgcaagagattttccagaggttgtctccaaacaccatggtgacacctcacaagaagagcatgctgggaaatggcaactacgatgtgaatgtcattatggcagcacttcagaccaaaggctatgaagctgtttggtgggacaagcgcagggatgtcggtgtcattgccctcactaacgtcatgggcttcatcatgaatctgccctccagcctatgctggggtccactgaaactgcccctcaaaaggcagcactggatctgtgttcgagaggtgggaggggcctactacaacctcgactccaaactcaagatgcccgagtggattggaggcgagagcgagctcaggaagtttctaaaacatcatttgcgaggaaagaactgtgaactcctgctggtggtaccagaagaggtagaggctcatcagagttggaggaccgatgtgtaacagttctgcccaacctccctctcgcctcagccccttcagtcctctgtgacgtgctgtggcctctacagtgggtctgcccttgccacttccccaaacatctcatcaagtttttccccttcagatctgacagtgcaataggacagacgtgtggactgttataagaactactcagtgttttgttcctgggcaaggaaggtaggagttctgtgcacttaaggccagtggtcacaaacccttgttttatttaagagacagaggagaaagtggagcggggagggaatcctagcttattttcccttttctatgaggacttgacacaggttctgctgagttgtcactgctgctccagactcacctagagatgctgcctccactttccatcctgtctgggtctgaaaacagtgggtctgcagatagtgcccacaaaccccatgtgactggtttgaaggacccagagcataaaggtctctcaggaaaccatgtccaaaaccctagcagcggtacagcatgctgtctccaacccttatccccaggtttaagggtggtttatggccatacgtggaggttttttgttgttgtttttgagactgagtttcactcttgttgcccaggctggagtgcaatggcaccatctcggctcactgcaacctccacctcctggttcaagcgattctcaggcctcagcttcccaagtagttgggattacaggcgcctgccaccacacctggctaattttgtatttttagtagagatggggtttctccatgttggtcaggctggtctcaaactcccgacctcaagtgatctgcccgccttggcctcccaaagtgctgggattacaggcgtgagccaccgcacccggcagagttttataatgaaaaattaactaatattctagtatgaagtgaggaggatactgaacaggatgtggctaaagccaacctgggacagccatggggtggcttggtttcttcactccagtgttgtccctaccatttcgcagcattgatttaggaggctctgggacaaaagagaagccaaagagcagttttcccagttcactcactctggcaaaatcaggaaaaaaaagtctgcttttgacatcaaattccactaatttggggcagcgttgggtgaggaaagtattgtgaagacaggcttcttggagtaggggcagccacaattcagtagacactctaggctcggaggctgccactgtagttgccaagctcaggttgggtggttctgtgctgtatggatggaataggacctgggctggtcatcttcatgtcgtttcctctctgtatcaatggaagttcaacccgcccctacctcttcagatagttgtaggccacttttctcttgtaactttggaaaacaaaagaggagaaataagtatcataccatatgcgtgtctccaaagtggatgtggttgcctcaaggcaggtggcaggcaggggtgacctgctggccctcagatcaatggtcgtggcaggtctgagagctgtcccactggccagacttctctccagcagcaaagccagcctggggcttgcatgttgatcctgagcaagcttaacggggtgaagctgggctttctcccccctgtgactggagtgcatgttgacaccagcactttttctgcacatgtatcttcaatccaacaaggccgtttttttaatgctgagtaacaggccaccaagcggctactgcgttatatcttctcagcaactggccgcagtctcttctgcaccattttctacaccagacctgcttggcaccacagggagctcttttcctgccctgcacaatgacattccaaccaccaccagccagacattacagccaaccttgctgattgtcacaagcaggaccttggggccactggcactgtcagatagtaagccatttcttgggtagaggaggaaactcctctccacaaatccacttgggcctgtgcaaatggcacttgaaagagtccccatgcacttggagtccatgagccaatgggatatgcaaagacgcttaaacatttcagggctggtttctctgttcatatccaattctggtgcttaggaacagggacccatgctgatgcccaagggcaaaaagccccacttcctttaaggaagtgaacaggcctgaccctgatgcccaataacgggcaaccctaggctttttgtttttcttgcttttattcctttttgttgttggccttgtgctgcgtttgtttacaaaagatgtattttgtttaaccaaatattaaaaatggaaaactcc

SEQ ID NO: 7909 - DNA, 1651 bp, Homo sapiens
  SIMILAR (1455)..(1520): 771254mologous to Homo sapiens acetylcholine receptor beta- subunit preprotein,accession number X14830,Smith-Waterman Score= 101.
agcgagccgccacggtatgaccccaggggctctgctgatgctgctgggggcgctggggccgccgctcgccccaggcgtccgcggctcggaggcggagggtcgactccgggagaaacttttctctggctatgatagctccgtgcggccagcgcgggaggtgggagaccgtgtcagggtcagcgttggtctcatcctggcgcaactcatcagcctgaacgagaaggatgaagagatgagcacaaaggtgtacttagacctggagtggactgactacaggctgagctgggaccctgcggagcacgacggcatcgattcgctccgcatcacggcggaatccgtgtggctccctgacgtggtgctactgaacaacaatgatgggaattttgacgtggctctggacattagcgtcgtggtgtcctccgacggctccgtgcgttggcaacccccgggcatctatcgcagcagctgcagcatccaggtcacctacttccccttcgactggcagaattgcactatggtgttcagctcctacagctacgacagctcggaggtcagcctgcagacaggcctgggtcctgacgggcaagggcatcaggaaatccacattcatgaagggactttcattgagaatggccagtgggagaatatccacaagccctctcggctaatccagcctccaggcgatcctaggggagggagggaaggacagcgccaggaagtcatcttctacctcatcatccgccgcaagcctctcttctacctggtcaacgtcattgccccatgcatcctcatcactcttctggccatcttcgtcttctacctgccaccagatgcaggagagaagatggggctctcaatctttgccctgctgacccttactgtgttcctgctgctgctggctgacaaagtacctgagacctcactatcagtacccattattatcaagtacctcatgtttaccatggtcctcgtcaccttctcagtcatccttagtgtcgtggttctcaacctgcaccaccgctcaccccacacccaccaaatgcccctttgggtccgtcagatcttcattcacaaacttccgctgtacctgcgtctaaaaaggcccaaacccgagagagacctgatgccggagccccctcactgttcttctccaggaagtggctggggtcggggaacagatgaatatttcatccggaagccgccaagtgattttctcttccccaaacccaataggttccagcctgaactgtctgcccctgatctgcggcgatttatcgatggtccaaaccgggctgtggccctgcttccggagctacgggaggtcgtctcctctatcagctacatcgctcgacagctgcaggaacaggaggaccacgatgcgctgaaggaggactggcagtttgtggccatggtagtggaccgcctcttcctgtggactttcatcatcttcaccagcgttgggaccctagatcatcttcctggacgccacgtaccacttgccccctccagacccctttccttgaagactggagggttgagaccaggccccctgccagttgaagtgagagagtttggtgatactgtcaagccctatccttctctgcctcttaactccttcacgaggaatctgggcctcttatttcgttctggg

SEQ ID NO: 7910 - DNA, 882 bp, Homo sapiens
tttttttgagatgaagtctcgctctgttgccaggctggagtgcagttgcacgatgtcggctcactgcaaactgcctcccaggttcaagcgattctcctgcctcagcctcccgaagtagctgagatttcaggcgcctgccaccacgcctgcctaatttttgtatttttagtagagatggggtttcaccatattggccaggctggtctcaaactcccgacctcaggtgatctgcccgcctcggcctcccaaagtgctgggattacaggagtgagccaccgcgcccggcctgcatccagctatttattttttttttgagatggagactcaccatcgcccaggctggagtgtagtagtgcaatctcagctcactgcaacctccaactcctgggttcaagtgggtctcttgcctcagcctcccaagtagctgggattacaggagcctgccaccactcccggctaatttttgtatttttagtagagatggtgtttcactatgttcgctaagctggtctcgaactcctgacttcaagtgatccgcctgcctcggcctccccaaagtgctgggattacaggcgtgagccaccatgcccggctaatttttgtgtttttagtagagacggggtttcaccatgttggccaggctggtctcgaactcctgacctcaggtgatccgcccgcctcggcctcccaaagtgctgggattacaggcgtgagccactgcgcccggcctccccaaggagcacttttacagccaaacccacctctctcagctctcactcctgcttatatccctgcaacccaggagactgttttctatttgtaaaattttgccatttcaagacagttgtattaatgaaatcactgtgtgtgtcaaaaaaaaaa

SEQ ID NO: 7911 - DNA, 859 bp, Homo sapiens
  SIMILAR (231)..(464): 801254mologous to Homo sapiens Human secreted protein, SEQ ID NO: 6065,accession number G01984,Smith-Waterman Score=319.
caatagggcttgagcacctgagccctgctgagcacgtctgtgcagccccagccctcagcatctcttccactcgcttccagctatatcttttccctttccttcttaattcaggaggcagctttgcaaccacagggcccaacgatagagactgtgaggtggcatttttttttttttttttttgagacggagttttgctgttgttgcccaggccggagtgcaatggcacgatgctcaactcaccgcaacctccgcctcctgggttcaagcaattctcctgcctcagcctcccaagtagctgagattataggcgcatgccaccacgcccggctaattttgtatttttagtagagatggggtttctccatgttggtcaggctggtctcaaactcccgacctccggtgatccgcccgcctcggcctcccaaagtgctgggattacaggtgtgagccaccgcgcccagccttgaggtggcatgttttcaaagaacatggtgcctcagttttggacacacaggaactcaaatacaatcattttcctgctgctaagtaatgcttgggtgggctgctctggttgcagatatgtgaagttaggtagcctttcctgttaacccatggttccaagcactctctcttaacaatcattcctactgtgaattttctacccggaaaagccaggggtgggcaataacaattaagatcatttgggtttctaaaagttcttcctctctgggaaagcagaactatacagtgggtggcatcctgcagattctagtctacatttgggaaaggtgtacgcctcttgcactttcagaggaacaagtcaaaaagtaattgcttaaaaaaaaaaagtgctagcaat

SEQ ID NO: 7912 - DNA, 1516 bp, Homo sapiens
ttctaagcatgttaattttacctgggatagacaggactttattttttatttttattttgtttgagacggagtctcgctgtgttgcccagcctggagtgcagtggcgcgatctcggctcactgcaacctgcgcctcccgggctcaggcgattctccttcctcagcctccagagtagctgggagtacaggtgcccgctgccacgcccggctgattttttgtatttttagtcgagacggggtttctccacattggtcaggctggtctcgaactcccgacctcaggtgatccacccgcctcggcctcccaaagtgctgggattacaggcgtgagccactgcgcccggcctttttttttcttttgagatggagtttcgctcttgttgcccaggctggagtgcaatggcgtgatcttgactcactgcaacctctgcctcccgggttcgacgtgattctcctgcctcagcctcccgaggctgggagcagccgggattacaggcgtgtgccaccatgcccggctattttttgtatttctttttttttagtagagacagggtttctccatgttggtcaggctggtctcaaactcccgaccctcaggtgatccgcccgcctaggccctcccaaagtgctgggattacaggcgtgagccaccgcgcccggccaagtcacatttcttgacctcataaggcttataatctagttcctgttctgtgttctatttcacgggcgacctaggtgttgatacccaaaagagcttcttcaagatcccaaagtagtaaatcagatgaatcctgcttttcaggggggcccaaagccacctgcctacccagccctcagtccaatgcagtccccagaaacgaaataagaggcccagattcctcgtgaaggagttaagaggcagagaaggatggggcttgccagtatcaccaaactctcacttcaactggcagggggcctggaactcaacacatccagtcttcaaggaaaggggtctggagggggcaagtggtaacgtggcgtccaggaagatgactaaggtccccaacgctggtgaaagatgatgaaagttccacaggaaaaaggcggtcccactaccatggcccacaaactgccagtcctccttcagcgcatcgtggtcctcctgttcctgcagctgtcgagcgatgtagctgatagaggagacgacctcccgtagctccggaaagcaagggccacagccggggttggacccatggataaatcgccgcagatcaggggcagacagttcaggctggaacctggaagaggagtgactggccacgcccaaacgcaaagacagccagtgccggcgacccaggccccgctccagctgcctccaacaacttgccagttctcaaaacccgagagcccatcatgcttttccctacagcagtgatctctaaagccttgtgcaacttcttccaccgcctctgttttagtttccaccctcgtgccaagctaggggtattcattgtccgacggtttcaaaggggaggccg

SEQ ID NO: 7913 - DNA, 517 bp, Homo sapiens; identical to SEQ ID NO: 1500
  SIMILAR (49)..(20): 601254mologous to Homo sapiens Fragment of human secreted protein encoded by gene 89,accession number Y02883,Smith-Waterman Score=37.

SEQ ID NO: 7914 - DNA, 1242 bp, Homo sapiens
  SIMILAR (187)..(1008): 841254mologous to Mus musculus neural cell adhesion molecule NCAM-180,accession number X15052,Smith-Waterman Score=1136.
atgcacaatggatttagtatcatcagtgacaacgaggtcataagaaggtgtttttccacagcaggaaatgatgcagttgaagaaatggtcctggccatccggcggcagagctttgccctgctgctgcatctggcccagactgagagcggacggagcctgatcatcaaccaccttgacctgaccaggctgcctgccgacactacggccactgtcgaggacatgctgccttctgtcaccagcgtcaccactaactctgacactatcaccgaaacctttgccactgctcagtatatcctcaccagtgagaccaccaccctgacctccagtattgccccgccggccacggccacgcctgactcaaactctgtaccggctggccaggccaccccttccaaggggcccagcgcctctgccccctccccggccccagcttcagcccccaaggtcgcccccctcgttgacctgagcgacaccccgacctcaacccctgccgctagcaatttgtcttctagtgtcctggctaaccaaggggctgtcctcagcccaagcgcccctgctggtgtcggggaggcctctaaggctcctccggccagcaagcccacccctgcaccagtccccaccccgactggggcagccagtcctctagcagcagcggctgcccctgccacagaagcccctcaggccaagcaggaggctcccagcaccaaaggcccggacccggagcccacccagcccggagccgcgaagagcccggccgaggcagccacagcccttgctagcccgaagagcgaggctgcctccgtcagcaccacaaacccttcccagggcgaggactttaaaatggacgaagggaacttcaagaccccagatattgaccttgcaaaggatgtttttgcagccctgggctctcctgctcccgccgctggggccagtggacaagcccctgagcttgctccttccactgcagacagctctgtttcgcctgcgccagcaaagaccgagtacggcctctctttgtctgctgtcatcgggttgtgtcctgtggtgagtggctgggaagactcggggctccccagcatcaaatggctgctgggtctcaaagttcaagagaaaggccttaacctttcaggtaaaaacacagcctctggcatcaacttagggctggaagaggaaaggactcgttcttctgactcagtgcttctcaactatggctgcacattagagtcacttgggtgcttttaa

SEQ ID NO: 7915 - DNA, 610 bp, Homo sapiens
  SIMILAR (257)..(87): 381254mologous to Homo sapiens Similar to CAAX box 1,accession number BC000393,Smith-Waterman Score=80.
ccgccaggcaggccatgaaaagctgcctccatcagtgttttctcaccctacccaggcaggccctagaggcatcatcctgcaacagcacagggtggggtggggaagggacaggcaagagtgggttgcaaaggggcccctgaaatcagtgctgggagcccagcccagcccagcaggctgcatttacatccagctgagctgttgccactgcagctggtcagggtgaggaggagctgcctctgctgcccccttccaccaccccaggtaaaaacacagcctctggcatcaacttatggctggaagaagaaaggactcgttcttctgactcagtgcttctcaactatggctgcacattaaagtcacttgcgtgcttttaaaagtcacttgtgtccgaccaaataaatcatgatttgcgcgcacacagctcgggcttgggtgatttttagtgctcccaggtgatttgacgggcagaggttggagccgggtgctgtcactggagaacccctcctcctccctgctgtccccaaggcctgaatacagaggcgagatgtctgcagaccgtggtctcagtggttctgtttggctgattctctcaaaaaggccgccgggtcgc

SEQ ID NO: 7916 - DNA, 3187 bp, Homo sapiens
  SIMILAR (1590)..(2168): 321254mologous to Mus musculus DBCCR1,accession number AF202896,Smith-Waterman Score=200.
  misc_feature (1)...(3187): n = a,t,c or g
atgtttgaagctagcgtaggttggttcatgagattggaggaaagaacccgtctccatgatatacaagcacaagatgaagcagtaactgctgatttagaagctgcagcaggttatccagatctagcgaagatcattgatgagggtggctacactaaacaacagattttcagtgtagatgacactgccttctcctggaagaagatgacattgaggactttcatagctaaggagggaaccaacacagatggtgcctcttctgctacttcctctcttgtttccctttgtttagagctgtgcttccttagagctcatcatgatgtgggcttctactgtgacttggatgtctatcagtcagctgtgtatgcacctacctgccccacaggatactcactgcctcaggccaaggaagaaagtgactttatacctctggagtacgaaaagggacgtatcacttctacagctggtcaaggacaggatgtggaacctgagatggagcagctggagaagggaagtataaagggagtcaccgagaccaggaccggtcctctgggctgcagcaactatgacaatctggactcagtcagttctgtcttggtacagagtccagagaacaaagtacagttacttggccttcaggtgctgctgcctgagtatctgcgtgagcgctttgtagctgcagcactcagctacatcacatgcagctctgagggtgagctcgtctgcaaggagaatgactgctggtgcaagtgcagccccaccttccctgaatgcaactgccctgatgctgacatccaggccatggaggacagcctgctgcagatccaggactcctgggccactcacaaccggcagtttgaagagtcagaagagttccaggccctgctgaaaaggctgcccgatgaccggttcctgaactccacagctatctcccagttctgggccatggacaccagccttcagcaccgctaccagcagctggggagctggctttgaaaagtgctgtttcaaaaagacccatcggatcctacgccggctcttcaacctctgcaagcgctgccatcgccagcctcgcttccgcctgcccaaggagaggtccttgtcctactggtggaaccgaatccagtccctcctctactgtggggaaagcacctttcctggcactttcctggaacagagccacagctgcacctgcccctatgaccaatcttcctgccagggccccatcccatgtgccttgggcgaagggcccgcgtgtgcccactgtgctccagacaatagcacacgctgtgggagctgcaacccgggctatgtgctggcccaggggctgtgccggccagaggtggccgagtccctggaaaactttcttgggctggagacagacttgcaggacctggagctaaagtacctgctgcagaagcaggatagccgcattgaggtacactccatcttcatcagcaatgacatgcggctgggcagctggtttgacccttcctggaggaagcgcatgctgctcaccctgaagagcaacaagtacaagcctgggctggtgcacgtgatgttggccttgtccttgcagatctgtctcaccaagaacagcaccctgggagcctgtcatggccatctacgtcaacccctttggggggcagccactctgagagcttggttcatgcctgtgaaatgaggggcagttttccttgacttggggaaaggactaacgtggatgcagctgccccagtggccaaaactggactatgcaccttgggggaataaggtggaagactttctttggagacagtttcatgtttacctacggagccgaatcaagtccctggatgacagctccaatgagacaaatctactatgagcccctggaggatgactggatccctctaaggaatttggggttacatgaaaattaacaccttggcaggtctttggctacagcctgccctttgacccagattgctatccgggacttaattctccagttggactacccatatactcaaggttcccaggactctgcactcttgcagctcattgagctcagggaccgggtgaaccagctttctccacctggcaaagtccgacttgaccttttctcctgcttgctccggcatcggcttaagctggccaacaatgaggtgggcaggatccagtcctccctgagggcgtttcaattctaagctgccaaaccctgtggaatatgagaccggcaaactctgtagctaatggggcggcccactttcagcactggggcaaggaggggatccatgaatttgggggttacaaagattattttaaggccctcaccttagtgccaacaggggttgttgctcccacgagactttcagcatccagtagatgggacctcgaggctcgagctgaagcaggcgagagagaaacagctactgcgtgcgtgcgcgcacgcatacacacacacacacacacactggcacaggggaggctaccaactaagcaccctcaagatcctgtaaagttgattggtgctttctaaaatgaatgcaattgaaagaaaggagccaaggaagagattaagaaaaagaaccagctgaaccatgaaacaaacaaaaatcctaaaagtgattcttgtcattcaagaaagcaagaggggacaacaatgggaggggtcggagctcttcccttcccctctgtggagtcacttttgtattctttttaacccagatttccttaaaaatgttgttgttttgtgaaatccctgacattggttcctttacttttgtaatgctgacctcctctgtgcccctccccagacgctgactggggaaacacaaggaaggtacaacccaacagggaaccagtcgccaagggcagggcagccggcctccttggcttcccctccctttactcctccctctggtggcctccttccccccaccaagttttcaggggccnggggattgtttcccagtttcccattgtgggtcccttcaggaggttcctttccaacagcatctctctgtcgaagaaagaagctctgtcaagttagagagagacaatgtgtaggaaatgttcttttttaaaaaaaaataacaaaaacaaaacaaaactatttattttgtgattgttttccttgttaatctgctccaaccacctgaacatctaagtaaacatttatctggtttaatataaaaaaaaaaaaaaa

SEQ ID NO: 7917 - DNA, 503 bp, Homo sapiens
  SIMILAR (338)..(499): 981254mologous to Rattus norvegicus CDC10,accession number AF142759,Smith-Waterman Score=262.
gcgcctttggagaatcggcgggctgcgctccgctggggctggtcgcggagggggggaggggatgtcggtcagtgcgagatccgctgctgctgaggagaggagcgtcaacagcagcaccatggtagctcaacagaagaaccttgaaggctatgtgggatttgccaatctcccaaatcaagtatacagaaaatcggtgaagagaggttttgaattcacgcttatggtagtggaggtgatgtttcaccatgttgcccgtggctaatcttgaactcctgggctcaagcgatccatccgccttggcctcccaaagtgctaggattacaggtgaatcttggatttggggaagtcgacattaatcaactcattattcctcacagatttgtattctccagagtatccaggtccttctcatagaattaaaaagactgtacaggtggracaatccaaagttttaatcaaagaaggtggtgttcagttgctgctcacaatagttgatacccagg

SEQ ID NO: 7918 - DNA, 1219 bp, Homo sapiens
  SIMILAR (12)..(86): 601254mologous to Nicotiana tabacum Pistil extensin like protein, partial CDS only,accession number Z14014,Smith-Waterman Score=89.
tcaaactgtcaccgccgccgcctcccctccccccgagcccgccgctgccgcgccccgggcccgcagtggcccccatcccggctcccctcgccgctgcctccgcctcgcctcagggcgttccctagctcggtccagcggccgcagagcttcccggcattcggagccgctgaccccaagtcgcggcacccgaagctgagactcacccatggtgctgctgttgacgctcctctcctcagcagcagcggatctcgcactgaccgacatcccctccccccctccgcgaccagccccagcggagcgcagcccgccgattctccaaaggcgcctacgccgattccgcagcgtagccgcccggcgtagctgccttgccgacggctttgtgagtgaaagtgaagagacacttcgaggcaggtgtctgtgctccccattcatccctgtttccgtggctatcttgactttccggggtgaaaagtgaggttaggccctgtttccccgacccttccctcgcgccatcacactctagtggcctggcacagccccagaggtcggccgctgtagcccccattgcggactcgcccacattcatattggctcaccttgtcggtgcccgggttccggtccctcttgggagctcacactcccagttgaggaaatgaatggacacaggaactactggggtaacaaaatactaataaagggctgcggattgtgtgagttttctactgtagcgatgaatggtcctggtatttggaacgtttccccaagtgccttctaatgaaaagccttactttactcggaaaaaacctgtggtcttttcttgaacgtgatggctctcttggttgtattcttcatgcacatgtgttacttttcctgtttaactacatgttaaagaaatgtgtatgttcctgtttaactgcatgttttaaaaaagtatgtgtatttttaagttataggcacgtgcaagaaagttcagagcaaaacagcttatattagtgaaacaataaatgtctactaataggagaatggatgaataagtgtcattgttgaacaaattgacatacaacaccgaaccaaaaaatcagtgaactaaagctacccatttttcatatggatagagtcattaacctaatattggaggaaagaaatgaaaaagaccgggttgggggaaagatattttattgacatacccataaataaaaggttttaataatttaccaaa

SEQ ID NO: 7919 - DNA, 1095 bp, Homo sapiens
  SIMILAR (881)..(1045): 1001254mologous to Homo sapiens rhabdoid tumor deletion region protein 1,accession number AF133587,Smith-Waterman Score= 269.
atggcccattcccagaactccttggagcttcccattaacatcaatgccacccagattaccactgcctatggccatcgggccctgcccaagctgaaggaggagctgcagtcagaggacctccagacgaggcagaaagccctcatggccctgtgtgacctcatgcatgaccccgagtgtatctacaaggccatgaacataggctgtatggagaacctgaaagctttgctgaaggatagcaacagtatggtgcgcataaagaccaccgaggtgctccacatcacggcaagccatagcgtgggcagatacgcctttctagagcacgacatcgtccttgccctgtccttcctgctgaatgaccccagcccagtctgccgggggaacctgtacaaggcatacatgcagctggtccaggtgcctagaggggcccaagagatcatcagcaaaggtctgatttcctcactggtatggaagctgcaggtggaggtggaggaggaggagttccaggagttcatcctggacacactggtcctctgcctgcaggaggatgccaccgaggccctgggcagcaatgtggtgcttgtcctgaagcagaagctcctcagcgccaaccagaacatccgcagcaaggccgcccgtgcgctccttaatgtcagcatatctcgagagggcaagaaacaggtgtgtcattttgacgtcatccccatcctggtccatctgctgaaagacccagtggagcatgtgaagtctaacgctgccggtgccctgatgttcgccacagtgatcactgaagggaagtatgcggccctggaggcacaagccatcggcctgctcctggagctgctgcactcccccatgaccatagcgcgcctgaatgccaccaaaggcccttaccatgctggcagaggcccccgagggccgcaaggccctgcagacgcacgtgcccactttccgtgccatggaggtggagacttacgaaaagcctcaagtggccgaagccttacagcgggcagcccggatcgccatcagtgtcatcgagttcaaaccctgagcccttcattcacctctgtgagtgaataaatgtgctaagtctcttta

SEQ ID NO: 7920 - DNA, 847 bp, Homo sapiens
  SIMILAR (148)..(531): 821254mologous to Homo sapiens rhabdoid tumor deletion region protein 1,accession number AF133587,Smith-Waterman Score=452.
  misc_feature (1)...(847): n = a,t,c or g
atggctgtcactgcagctgcctgctggtcgctcaggcccctggccaggcgggacgtgtgtgtgggggtggcacttgcaagtccttttgtcaaacccacccactggttctgcaagaccctccttgagccctgcaggccaactggcatgggggcccaagagatcatcagcaaaggtctgatttcctcactggtatggaagctgcaggtggaggtggaggaggaggagttccaggagttcatcctggacacactggtcctctgcctgcaggaggatgccaccgaggccctgggcagcaatgtggtgcttgtcctgaagcagaagctcctcagcgccaaccagaacatccgcagcaaggccgcccgtgcgctccttaatgtcagcatatctcgagagggcaagaaacaggtgtgtcaattttgacgtcatccccaatccctggtcccatctgctgaaagaccccagtggagcatgtgaaagtctaacgctgccggntgcccctgatgttcgcccacagtgatcactgaaggggaagtatgcggccctggaggcacaagccatcggcctgctcctggagctgctgcactcccccatgaccatagcgcgcctgaatgccaccaaggcccttaccatgctggcagaggcccccgagggccgcaaggccctgcagacgcacgtgcccactttccgtgccatggaggtggagacttacgaaaagcctcaagttgccgaagccttacagcgggcagcccggatcgccatcagtgtcatcgagttcaaaccctgagcccttcattcacctctgtgagtgaataaatgtgctaagtctctttaaaaaaaaaaaaaaaaa

SEQ ID NO: 7921 - DNA, 532 bp, Homo sapiens
  SIMILAR (1)..(24): 1001254mologous to Homo sapiens CLPP,accession number Z50853,Smith-Waterman Score=41.
  misc_feature (1)...(532): n = a,t,c or g
gtggagcagacgggtcgcggcgagncgcctatgacatctactcgcggctgctgcgggangcattcttgtgcgtcatgggcccgatcgatgacagcgttgccagccttgttattgcacagctcctcttcctgcaatccgagagcaacaagaagcccatccacatgtacatcaacagccctggtggtgtggtgaccgcgggcctggccatctacgacacgatgcagtacatcctcaacccgatctgcaccctccccaggacggtgaggatgagcccacgctggtgcagaaggagcctgtagaagcagcgccggcagcagaacctgtcccagctagcacctgagagctgggcctcctctccagaatcatgtggatgggcagaggcctgccagacccccagctgggccctgctcaccccttgttgctgggcttggaggggcctcttgaggaacttttaatttgcaggggtgcccgctatggacggggcattccagctgagacactgtgattttaaattaaatctttgtggtctttg

SEQ ID NO: 7922 - DNA, 470 bp, Homo sapiens
  SIMILAR (259)..(468): 971254mologous to Homo sapiens CLPP,accession number Z50853,Smith-Waterman Score=335.
gcgaccgccgcagcggacactccagaacggcctggccctgcagcggtgcctgcacgcgacggcgacccgggctctcccgctcattcccatcgtggtggagcagacgggtcgcggcgaggcgtcctatgacatctactcgcggctgctgcgggagcgcatcgtgtgcgtcatgggcccgatcgatgacagcgttgccagccttgttatcgcacagctcctcttcctgcaatccgagagcaacaagaagcccatccacatgtacatcaacagccctcaggaggcgcccggggccaagccacagacattgccatccaggcagaggagatcatgaagctcaagaagcagctctataacatctacgccaagcacaccaaacagagcctgcaggtgatcgagtccgccatggagagggaccgctacatgagccccatggaggcccaggagtttggcatcttagacaaggttctggt

SEQ ID NO: 7923 - DNA, 1077 bp, Homo sapiens
  SIMILAR (3)..(557): 371254mologous to Homo sapiens CLPP,accession number Z50853,Smith-Waterman Score=179.
cgtcatgcaggtaccccgcgctggggcctcgcctcgccgctcactttccagcgcagcggccgccgcagcgacgacctccgagaacggcctgttccctgcagcggtgcctgcacgcgaacggcgacccgggctctcccgctcattcccatcgtggtggagcagacgggtcgcggcgagcgcgcctatagacatctactcgcggctgctgcgggagcgcatcgctgtgcgtcatgggcccgatcgatgacaagcgttgccaagccttgttatcgcacagctcctcttccctgcaatctcgttagcaacatgaagcccatccacatgtacatcaacaagccctgggtgggtgtgggtgaccgccggcctggggcatcttacggacacgattgcagtaacattccttcaacccgatttttgcacctgggttcgttggggccaggggccgccagcatgggctccctggctttcttcgccgccggaaccccaggcatgcgccacttcgctccccaacttcccgtattcatgattcaaccagcccttcaggaaggcgccgggggccaaagcccaccagacattggccatccaggcagaagaaaatccatgaaagctccaagaagcagcttctataacatctaacggcaaagaacaacccaaacaagaagcctgcaaggtgatcgagtcccgcccatggcagaagggaccgcctaacatgaagcccccatggaaggcccccaggaatttggcaatccttaaaacaaggttcctggtcccaccctccccccaggacggtgaaggatgaagccccacgcttggtgcagaaggagccttgtagaagcagcgccggcagcagaacctgtctccagctaagcacctgagagctgggcctcctctcccagaatcatgtggaggggccagaggcctgccagaacccccagctgggccctgctcaccccttgttgctgggcttggaggggcctcttgaggaacttttaatttgcaggggtgcccgctatggacggggcattccaggtgagacactgtggattttaaattaaatcttttgtggtctttgctctg

SEQ ID NO: 7924 - DNA, 2088 bp, Homo sapiens
  SIMILAR (1166)..(1246): 921254mologous to Homo sapiens dJ12G14.1 (novel cyclophilin type peptidyl-prolyl cis-trans isomerase),accession number AL078581,Smith-Waterman Score=119.
atgcccactggggacataagtgtcttcctaagaataaaggtaatagacagctggtttaaaatacgtctgagcgaaatatacagttatgcatacaagaaactggcatcagaagcacctgcaggactctccaacccggactgctgggccccgcccccagaggccgggctgagtccccaggggatgcggacaccgccgatcgcgccccgccgtgagaacttctcctccaacatccgacaaaaacattacgtcgcgcgagggccaggccgagcaggcacaagtggcctggaaatgcgcgaagtgggcaacttccacacttcccgagcacacaaacattccttgcccaagcgctggctctaccccgggaaggcgccattacgaaggcctgatcaccggcaaccgcgcgcttcgacggcaaagccccgtcaggtcgcgcgccggcttgggccgccggagagtcggtgtggagtggctcgaggctcactcacagcgacgcagccccagtgggtccctttcctcttacctcggcctcccacgccgcccccatttcctggggtgcttctccccacacctccttcgggggcccggacccccgcccctgcccgccggtgggatgtgggaagcgtcactgtggacagcccgggcctcccggagagtcggagtcgtaaagcggccagccaggcccgccctgccctacctgtggggctccggacagcggcggcggctcgggggcgcccgtcgtcagccagccggaggcgggtagcgccacgaacagcaggagccggagggcgagcgaccccggtggagcgccctccatcttggacaacccgggcagagggcagccgcggccgggagtgtgggaaggctccatcagaggaattaaacctcagtactcccctacagaagcagaatgggccacttcttgagggtatacatttcggccctcaggatggtgacagtcggaggatggcaagctccacttgccagcctctagccaatggaaaaataggaggttatccaggagaagactgccaaatagacttcacccacatgccgaagacaaagggcatccaatacctgctggtatggtcagacaccttcactaactgggtagaggcattcccatgccgtacagaaaaagcctctgagcggaggaggagcgggcgccatggcggttctactggagaccactttaggcgacgtcgtcatcgacttgtacaccgaagaacggccgcgtgccaactgtatggtgatcaagcaagcttttttgaggcagaaaaagtcccaagaattaagcacaagaagaaaggcacagtgtccatggtgaataatggcagtgatcaacatggatctcagtttcttatcaccacaggagaaaatctagattatcttgatggtgtccatacggtgtttggtgaggtgacagaaggcatggacataattaagaaaattaatgagacctttgttgacaaggactttgtaccatatcaggatatcaggataaatcatacggtgattttagatgatccatttgatgaccctcctgatttattaatccctgatcgatcaccagaacctacaagggaacaattagatagtggtcgaataggagcagatgaagaaattgatgatttcaaaggaagatcagctgaggaagtagaagaaataaaggcagaaaaagaggctaaaactcaggctatacttttggagatggtgggagacctacctgatgcagatattaaacctccagaaaatgtactgtttgtgtgtaaattgaacccagtgaccacagatgaggatctggaaataatattctctagatttgggccaataagaagttgtgaagttatccgagactggaagacaggagagtccctctgttacgcttttattgaatttgaaaaggggggcggagcctatggaaaaacgccagcaacgcggcctttttacggttcctggccttttgctggccttttgctcacatgttctttcctgcgttatcccctgattctgtggataaccgtattaccgcctttgagtgagctgataccgctcgccgcagccgaacgaccgagcgcagcgagtcagtga

SEQ ID NO: 7925 - DNA, 2144 bp, Homo sapiens
  SIMILAR (1785)..(985): 471254mologous to Homo sapiens Human osterocarcinoma cell line U-2 OS clone HP10304 protein,accession number W64555,Smith- Waterman Score=398.
  misc_feature (1)...(2144): n = a,t,c or g
tccccaaaaaannnnnnnnnnnccccaaagcccattttttttnnnnnnnnnnnncccccaaagggccccccccaaaaaaaggggttttttccaaaaaacccgcgggggtttttttattgccccccttnnnnnnnnnnnnnnntttttttctcccccgggaaaattgggccccccccaaaaattttttaaaaagggcccccccccnnnnnnnnnnnnnnnnnnnnnnnnnnnnnnnnnnnnnnnnnnnnnnnnnnnnnnnnnnngaccttttaaattagaattttataaagtgcttttcataaagtcttatatattatagtaattaagtggatataatttccttaacaaaggcaccttgaaaagttattggcacatgagattttgtctggtcttttttttttcttttgataatttcaaagtctcttcacatgtgttctcttccactttaagttttccttaacaattcatcatatgaatagccagcccttttagagaataaggtcaacttttttttttttgaaacagagtctcgctctgtcacccaggctggagtgcagtggcgtgatcttggctcactgcagcctccgcctcccgggttcaagcaattctcctgcctcagcctcccaagtagctgggactacaggcgtgcaccgccacacccagctaattttttttattttttttagtaacagaccgggttgcacccatgttggcaggatggtcccgatctgacctcgtgatccgcccgcattggcctcccaaagtcctgggattacaggcatgagccactgcacccggccgagaataaggtaaactttaaacttgcgactgtaaagagtcaattttcagggcagtcttaggagtttaggcaatttctctagtgtataaaactgattcttaacgatttaaagaaaattatattcaagtggcaaatttggaggcaacaggctacttcggagtccatgatatgagatggcgttttcaaatacatgttttatcttcaaggttttcaagctcttttctctgggaccatctgggatataagttggataggctgtcacagggtatgacgtccactttatcccaactggaaggaattccctttggtattcaggaaactgggggaaaaacaccctttagatgggtattaccaacagctgctcctgtaattccaaccgccatgatgttcaaaaactgaaagaatactggggaaaacgttgctccagaacctacacagatcttttcttaaacttttccatccactgacaccattaccttatatgcaagatggcgggctctgcttctgaggagggagttccaggtaacttgccccaggtaaaacatccttcatcctacagtggtttcccacattccctgaataagatactggcctagtgggtttgcagtgaactaacactttctttttttggagaggttaggaagggtaaataaaatgtcactgtctcgagaaatagagtagagcatgctttcttccaaaggtagggtatagttagaatgtctgagtactccccggttcgttaactaaaatatcaatttcagtgacatccttttgctgaacttgttttcccatcaatctcctactacctcctccttgaatgaacaattagttgcaaactggaaccagatgtccataggcccactccatgaaactaaaatccttacactgaacaattcccaaaatattctttttcctccaaattttcaagattttcattcttcactatcaaagtctgacagcttcattcgggttacaccactatttaacaggtaaagtcatttacatacacctgtccactctcataggttatgttaagaacaacctgctgtttagatatgtccccatcatctttcagtgtagttacattaattctgatgccgtcctgtggggctccggacagcggcggcggctcgggggcgcccgtcgtcagccagacggagagcgggtagcgccacgaacagcaggagccggagggcgagcgaccccggtggagcgccctccatcttggacaacccgggcagagggcagccgcggccgggaggtgagggcggagccggcccgcgggcgggacggagcttcggcgggagggacggggaggggcggggagagacggggagagggcggg

SEQ ID NO: 7926 - DNA, 411 bp, Homo sapiens
  SIMILAR (2)..(175): 1001254mologous to Homo sapiens put. LLRep3 protein (AA 1- 221),accession number X17206,Smith-Waterman Score=302.
  misc_feature (1)...(411): n = a,t,c or g
cttcgccaaggccacctttgatgccatttctaagacctacagctacctgacccccgacctctggaaggagactgtattcaccaagtctccctatcaggagttcactgaccacctcgtcaagacccacaccagagtctccgtgcagcggactcaggctccagctgtggctacaacatagggtttttatacaagaaaaataaagtgaattaagcgtgnnnnnnnnnnnnnnnnnnnnnnnnnnnnnnnnnnnnnnnnnnnnnnnnnnnnnnnnnnnnnnnnnnnnannnnnnnnnnnnnnnnnnnccnaatttttgagtaaagtttaaaagagggtnnnnnnnnnnnnnnnnnnnnnnnnnngggggnnnnnnnnnnnncctccgcgcctccctttaaattttgggggggagc

SEQ ID NO: 7927 - DNA, 322 bp, Homo sapiens
  SIMILAR (322)..(161): 981254mologous to Homo sapiens ribosomal protein S2,accession number AB007147,Smith-Waterman Score=277.
  misc_feature (1)...(322): n = a,t,c or g
tggggcccccttaaaaaaaatattcccttgcccgcccggggccgtaaacttggttcctttaaaacgggcgccccnnnnnnnnnnnnnnnnncccgcttaatccactttatttttctgtattaaaacccctatgttgtagcccaagctgaagcctgagtccctgcccggagactctggtgtgggtcttgacgaggtggtcagtgaactcctgatagggagacttggtgaatacagtctccttccagaggtcgggggtcaggtagctgtaggtcttagaaatggcatcaaaggtggccttggcgaagttgcccagggtggcagt

SEQ ID NO: 7928 - DNA, 897 bp, Homo sapiens
  SIMILAR (3)..(203): 521254mologous to Homo sapiens Similar to ribosomal protein S2,accession number BC001795,Smith-Waterman Score=142.
tggggtgcggaggtcgggtggaggccgggcggaggccgggcggaggcccccgcaaagctcgcagaggcaaggccgaggataaggagtagatgcccgtcaccaagctgggccacctggtcaaggacatgaagatcaagtacctggaggatgtctcttctccctgcccatcaaggaatctgagaccattgacttttttctggggtcctctctcaaggaagagggtttgaagattatgccggtgcagaagcagacccgcgcgggccagcgcaccaggttcaaggcgtttgttgccaccggggactacaatggccacgtcggtctgtgcgttaagtgctccaaggaggtggctactgccatccgcgggtccgtcatcctgaccaagcactccattgtccccgtgcgcagaggctacgggggaacaagatggacaagcccacaccgtcccttgcaaggtgacaggccgctgcggctctgtgctggtgcacctcatcgtctccgcacctgtgcccaagaagctcctcatgatggctggtattgatgactgccacacctcagccaggggctgcactgccaccctggcaacttcgccaaggccacctttgacaccatctctaagacctacagctacctgaccctcgacctctggaaggagactatattcaccaagtctccctatcaggaattcactgaccacctcgtcaagacccacactagagtctccgtacagaggacccgggctccagctgtggctacaacatagggtttttacacaagaaaaataaagtgaattaagcctggaaaaaaaacaacaacaaataaaaacctggtcatttatgctatatttaaagcatttaaatcactttcagaattaccactgggaatgttgtattaaaaatt

SEQ ID NO: 7929 - DNA, 862 bp, Homo sapiens
  SIMILAR (663)..(424): 671254mologous to Rattus norvegicus ribosomal protein S2,accession number U92697,Smith-Waterman Score=245.
caatttttctttaatccacatccgttagcaaagtttttaaacaacaaacgtttacgaagtagttttaccccttattcgctttaaaattttaatattaccctaaaacttttaatctccgaaagtaatttggcccaatttttcccccccccaaaattagggtcctttccaaaaattcccaggtaggttttaatacggccccctttaaggaaaaaggttttgccttgcaagcccgggtaaacttggggcccctcagggatcccttaaaaacggcggcccctttttagttgtctttttttttcacgcttaattcactttatttttcttgtataaaaaccctatgttgtagccacagctggagcctgagtccgctgcacggagactctggtgtgggtcttgacgaggtggtcagtgagttcctgttgagggagacttggtgaatacagtctccttccagaggtcgggggtcaggtagctgtaggtcttagaaatggcatcaaaggtggccttggcgaagttgccccagggttgcagtgcagccccgttgctgagggtgtagcagtcatcgataccagccatcatgagcaagctttcttaggcacaggtgcggagaccgatgccaattggcccctgggttgcaaggggatgaaggcgtaccagcacagaagccgcaagcggcccttggtcacctttgccaaggtgacagtgtggggggcttgccgaattcttggttccccccagtagcctctgcgcacggggacgatggagagcttggccaggatgatggccccacgctgtcaccttgcaagggacagtgtggggcttgccgatcttgttccccgtgcgcagaggctactgggggaac

SEQ ID NO: 7930 - DNA, 439 bp, Homo sapiens
  SIMILAR (439)..(371): 1001254mologous to Homo sapiens nucleoside-diphosphate kinase,accession number Y07604,Smith-Waterman Score=116.
gtgcaaaacttcctctttactgttcaactccttacaacttgcataaaggcgtcatttctacctcagagctgggggaagtcataattagtgtaccacccatgtgctgggcacagtgaattttaatgcctcccctttagaggagaggttatgataatgtgaagacccccccccaccacaaaggttgtccggcactttggtgcaaaaaggattggtccaatcttgtgctggcttggggtacagaaaggcactgaagttggtggctcaaactcctctgggctggggtggggcagaggtgaacagggaagtaagtggtttgggacaggcaggtttggatgtgggcttgggttcttgctgacggaggtagttggtccagctcactgctctggaaccacagctggatctcccgctgggccccctccacggagtcgctggcgtggat

SEQ ID NO: 7931 - DNA, 269 bp, Homo sapiens
  SIMILAR (2)..(130): 971254mologous to Homo sapiens nucleoside-diphosphate kinase,accession number Y07604,Smith-Waterman Score=212.
  misc_feature (1)...(269): n = a,t,c or g
ngctgaggctgccccaggaaccataaggggtgacttcagcgtccacatcagcaggaatgtcatccacgccagcgactccgtggagggggcccagcggagaatccagctgtggttccagagcagtgagctgggacaaagtggccttcatcacaggaggcggctctgggattnggttccngattgctgagattttcatgcggcacggctgccatacggtgattgccagtaggagcctgccgcgagtgcttgacggccnccaggaagctggc

SEQ ID NO: 7932 - DNA, 1113 bp, Homo sapiens
  SIMILAR (178)..(639): 421254mologous to Homo sapiens nucleoside-diphosphate kinase,accession number Y07604,Smith-Waterman Score=224.
atgggcggcctcttctggcgctccgcgctgcgggggctgcgctgcggcccgcgggccccgggcccgagcctgctagtgcgccacggctcggggactatcatgggggtgtttgtggctgtgggcaccatccctgtcccttccagagtgccctgcatagaggcagacaccctgaagcctggagggccctcctggacccgggagcggaccctggtggcggtgaagcccgatggcgtgcaacggcggctcgttggggacgtgatccagcgctttgagaggcggggcttcacgctgggtggggatgaagatgctgcaggcaccagagagcgtccttgccgagcactaccagtgacctgcggaggaagccctttccaccctgcccttcatcccgctacatgagctctgggcctgtggtggccatggtctgggaagggtacaatgtcgtccgcgcctcaagggccatgattggacacaccgactcgggctgaggctgccccagggaaccattaagggggttgacttcagcgtccacatcagcaggaatgtcatccacgccagcgactccgtgggagggggcccagcggagaatccaagctgtggttccaagagcagtgaagctgggtgagctgggcaagaccgggggccagcacagcagcatccacccagcctgaaggtccaagctgcccttaccaccccatcccccacgcaggacccaacctaccctccgtcagcaagaaccccaagccccacatcccaaacctgccctgtccccaaacccacttacttcccctgtttcaccttttgccccaccccaggcccagagggagttttgagcccacccaacttcagtgccctttctgtacccccaagcccaggcacaagatttggaccaatccttttttgcaccaaagtgccgggacaaccttttgtggtgggggggggtcttcacaattatcataacctctcctctaaaggggaggcattaaaattccactgtgccccagcacatgggtggtacactaattatgacttcccccgagctctgaggtagaaatgacgcctttatgcaagttgtaaggagttgaacagtaaagaggaagttttgcacacccaaag

SEQ ID NO: 7933 - DNA, 900 bp, Homo sapiens
  SIMILAR (640)..(897): 661254mologous to Homo sapiens PRO2221,accession number AF116695,Smith-Waterman Score=280.
atggaatactatgcagccatgaaaagggatgagctcatgtcctttgcagggacatggatgaagctggaaaccatcattctcagcaaactaacacaggaacagaacaccaaacaccacatgttctcactcataaagtggcagttgaacaatgagaacacatggacaaagggaggggaacatcacacactggggcctgttgcaggtggagctgcctggcagtcccgtgccgtgtgcccgcactcctcagcccttgggtggtcgatgggactgggcgccagggagcagggggcggcgctcgtctgggaggctccgcttgccgcacaggagcccacggagggggtgggaggctcaggcatggcgggctgcaggtcccgagccctgccccgcgggaaggcagctaaggccgggcgagaaatcgagcgcaacgccggtgggctggcactgctggggaacccagtacaccctccgcagccactggccgggccggccagctgctccgaatgccgggtctgccgaggccacgcccacccggaactcgcgctagcccgcaagcgccacgggcagcccaggttcccgccagcgcctgcctccacacctctttgcaagctgagggagccggctccggccttggctagcccagaaagtggctcccacagtgcagtggatcacagctcctcgccagcagtggaacaaaactggacagagaatgactttgatgagttgacagaagtagacttcagaaggtcagtaataacaaacttctcggagctaaaggagcatgttctaacccatcgcaaggaagttaaaacccttgaaaaaagattagatgaatggctaactagaataaacagtgtagagaagaccataagtgacctgatggagctgaaaaccacagcatga

SEQ ID NO: 7934 - DNA, 648 bp, Homo sapiens
  SIMILAR (639)..(310): 1001254mologous to Escherichia coli fructose 1,6-biphosphate aldolase (AA 1-359),accession number X14436,Smith-Waterman Score= 589.
atggaatactatgcagccacaaaaaatgatgaggtcatgtcctttgtaggacatgatgaagctggaaaccatcattctcagcaaactaacacaagaacagaaaaccaaacaccacatgttctcactcataagtgggagttgagcaatgataggtcatatccctacgattatcgaagaaatcacaccgtgctcgatttacggaaatctcagccgatccccgccttgaaatcatccgctcgatgtcaaaccaacgatgatgatcgcgagtctcgccacgatgtttactgcataacttatcaacagcgcctgaacgtcgatcgcgttcagttcctggaatgctttctccagacgagcgatcatcgaagtctgaccggcacgcagccatacgcgcggatcgtagtatttcttgttcggctgatcttcgcctttcgggttacccagctgaccctgcagataagcttcgttcgctttgtagtagttcagaacgccttcccaggttgcccattgggtatcggtatcgatgttcatttttactacgccgtagcttacggagtctttgatttcctgagcagtagaaccggaaccaccgtggaatacgaagttcaggctgttgtgcggcagattgtgtttcttggaaacaattcctga

SEQ ID NO: 7935 - DNA, 1089 bp, Homo sapiens
  SIMILAR (338)..(418): 851254mologous to Homo sapiens PRO1546,accession number AF116638,Smith-Waterman Score=134.
atgtggaagaagatcagaaagtctctgcagaacctctgccaagttgctagagtcagagactcttcccacactctcctgggtctcgtcaattcttatcaaagatgcaggggtggcagcagccacttttcagcttcagagaaggaagcaaatggtttacaggaaaagaaagccaacacggggaagcacaagactgctgtcaagtgtcatttatcctgtctctggccatcgaagaggcttaggcttgtgtggaaatgggtgtcgaggccagcacctctcagcaaaatgagagccatggagagaaatgtttatttctgtgtatactttgcaaaagttgggtgcactgttcacaatagcaaagacttggaaccaacccaaatgtccatcaatgatcgactggataaagaaaatgtggcacattacaccatggaatactatgcagccatcaaaaaggatgagttcatgtcctttgaaaggacatggatgaagctggaaaccatcattctcagcaatctaacacaggaacagaaaaccaaacaccgcatgttctcactgataagtgggagtcgaacaatgagaatacatggacacagggaggggaacatcacatgccagggcctgttggggggagaatgtgtgcacacggtggccaccagagggagcccttcagcgacagaggatgagagctgcaggatgaatgtgaatgattatggtggaaattcaccttcaaccttgcaggtgaaaacaagtccccagggaagagcagaaaaaggaaacaacgttaggacatggttatattccaaccttgtctgctggccttctttgggctctctgatggggaaactaagggacagagtaattaagcgggttatctatactcacacagcaggtgatgtatccatgcacgaagaaggttttcaatttcccctgaagcaggtatctttgctgctctgtgccatagcctttcagccttccctggttgtagctgcagctctggtgcacattacaatggaagcttatacttacctggaggtgacccttcttcaaatacactctcctctcttctgcttcctgcccaagtgccatttctga

SEQ ID NO: 7936 - DNA, 2849 bp, Homo sapiens
  SIMILAR (2217)..(2840): 841254mologous to Homo sapiens putative p150,accession number U93563,Smith-Waterman Score=886.
atgattatctcaatagatgcagaaaaggcctttgacaaaattcaacaacccttcatgctaaaaactctcaataaattaggtattgatgggacgtatttcaaaataataagagctatctatgacaaacccacagccaatatcacactgaatgggcaaaaactggaagcattccctttgaaaactggcacaagacagggatgccctctctcaccactcctattcaacaaagtgttggaagttctggccagggcaattaggcaggagaaggaaataaagggtaatcaattaggaaaagaggaagtcaaattgtccctctttgcagatgacatgattgtatatctagaaaaccccattgtctcagcccaaaatctccttaagctggtaagcaacttcagcaaagtctcaggatacaaaatcaatgtacaaaaatcacaagcattcttatacaccaacaacagacaaacagagagccaaatcatgagtgaactcccactcacaatcgcttctaagagaataaaatacctaggaatccaacttacaagggatgtgaaggacctcttcaaggagaactacaaaccactgctcaaggaaataaaagaggatgcaaacaaatggaagaacattccctgctcatgggtaggaagaatcagtatcgtgaaaatggccatactgcccaaggtaatttacagattcaatgccatccccatcaagctaccaatgcctttcttcacagaattggaaaaaactactttaaagttcatatggaaccaaaaaagagcccgcatcaccaagtcaatcctaagccaaaagaacaaagctggaggcatcacactacctgacttcaaactatactacaaggctacagtaaccaaaacagcatggtactggtaccaaaacagagatatagatcaatggaacagaacagagccctcagaaataacgctgcatatctacaactatctgatctttgacaaacctgagaaaaacaagcaatggggaaaggattccctatttaatagatggtggtgggaaaattggctagccatatgtagaaagctgaaactggatcccttccttacaccttatacaaaaatcaattcaagatggattaaagacttacatgttagacctaaaatcataaaaaccctagaagaaaacctaggcattaccattcaggacataggcctgggcaaggacttcatgtctaaaacaccaaaagaaatgggaacaaaagccaaaattgacaaaggggatctaattaaactaaagagcttctgcacagcaaaagaaactaccatcagagtgaacaggcaacctacaaaatgggagaaaattttcacaacctactcatctgacaaagggctaatatccagaatctacaatgaactcaaacaaatgtacaagaaaaaaacaaacaaccccatcaaaaagtgggcaaaggacatgaacagacacttctcaaaagaagacatttatgcagccaaaacacacatgaaaaaatgctcaccatcactggccatcacagaaatgcaaatcaaaaccacaatgagataccatctcacaccagttagaatggcaatcattaaaaagtcaggaaacaacagcactgttgacaatagcaaagacttggaaccaacccaaatgcccatcaatgataggctggataaagaaaaatgtggcacatacacaccatggaatactatgcagccataaaaaggaatgagttcatgtcctttgcagggacatggatgaagctggaaaccatcatcctcagcaagctaacacaggaacagaaaaccaaaccaccacatgttctcactcatacgtgggagttgaacaatgagaacacatggacacagggaggggaacatcatacactggggcctgttgtgggaatagttactccaaagcctctgcttgttctcatccttggacaattctggcaatttaattgccaaggaagaagcatgtctgccttaacacaagctttggcccaatgtgtccatcagactgtagaagattgtcgttgggattcacactataacaggtgtccccaactgcagggccacggagcagtagtggtccctggcccattaggaaccaggccacacagcaggagttcatatccaatgcactctggacactttctttccagcattctagacacgctttcttcaacccacaggaacagaatgaacaaaaggaaggaagaacatcaaatacaaactactttcagagaatactataaacacctctacttaaataaactggaaaatctagcagaaattgataaattcctggacacaaacaccctcccaagactaaaccaggaagaagtagaatccctgaataaaccacaaacaagttctgaaattgaggcaataattaatagcctaccaaccaaaaaaagtccaggaccagagagattcacagccaaattcaaccagaggtacaacgaggaactggtaccattccttctgaaactatgccgaacattagaaaaagaaggactcctccctaactcattttatgaggccagcatcatcctgataccaaaacctggcagagacacaacaaaaaaagaaaatttcaggccaatatccctgatgaacatcaatgcgaaaatcctctataaaatactagcaaaccgaatccagcagcacatcaaaaagcttatccaccatgatcaagttggcttcatccctgggatgcaaggctggttcaacatacacaacatacacaaattaataaacgtaatccatcacataaacagaaccaacgacaaaaaccacattatctcaatagatgcagaaaaggcctttgacaaaattcaacacccttcatgctaa

SEQ ID NO: 7937 - DNA, 647 bp, Homo sapiens
  SIMILAR (125)..(466): 751254mologous to Homo sapiens MLEL1 protein,accession number AF217190,Smith-Waterman Score=409.
  misc_feature (1)...(647): n = a,t,c or g
tttttaaggnaaggngnaatggcntattttctgaggnagattaaatggaccccccccatccaaataagccagnggtncctntcccataanaccnccntnatnagttgaacgcctttggataacccaagaagaattgccnccntcttggagtcccccttggnacgatttacccgttgagccccatattggaaaaatgattctttttgaagcacttgttctgcttgcttagacccagtactcactattgctgctagtctcagtttcaaagatcccatttgtcattccactgggaaaagaaaagattgcagatgcaagaagaaaggaattggcaaaggatactagaagtgatcacttaacagttgtgaatgcgtttgagggctgggaagaggctaggcgacgtggtttcagatacgaaaaggactattgctgggaatattttctgtcttcaaacacactgcagataatgagaagataattaaagctgtcatctgtgctggtttatatcccaaagttgctaaaattcgactaaatttgggtaaaaaaaagaaaaatggtaaaagtttacacaaaaaccgatggcctggttgctgttcatcctaaatctgttaatgtggagcaaacagactttcactacaactggcttatcc

SEQ ID NO: 7938 - DNA, 709 bp, Homo sapiens
  SIMILAR (87)..(338): 891254mologous to Homo sapiens Homo sapiens B115 sequence,accession number W54098,Smith-Waterman Score=426.
tcggactgatgaccgtagtacagagcggtggaattccagcggttgctggttctgacgggttgtagtctgccaggacaattagttatgactactatcagaactggggccgtgatgggggtccccgcagctccggtgggggctatggaggggggccagcagggggtcatggaggtaaccgaggctccggaagaggcggcggcggcggagggggtggtcgaggcggcaggggccggcatcccgggcacctgaaaggccgcgaaatcggcatgtggtacgcgaaaaaacaggggcagaagaacaaggaagctggagaggcaagagagagctgtagtacacatggatgaacgacgagaagaacaaattgtacaggtactggattctggtcaagccgaaaatggataaagagtcagaaccacagatttcctggtttgctcctgaggatcatggatacggtactgaagtttctactaagaacacaccatgctcagagaacaaacttgacatccaggaaaagaagttgataaatcaagaaaaaaaaatgtttagaatcaggaacagatcatatattgacccgagattctgagtatctcttgcaagaaaatgaaccagatggaactttagaccaaaaattattggaagatttacaaaagaaaaaaaatgaccttcggtatattgaaatgcagcatttcagagaaaagctgccttcgta

SEQ ID NO: 7939 - DNA, 2370 bp, Homo sapiens
  SIMILAR (1)..(312): 661254mologous to Homo sapiens MLEL1 protein,accession number AF217190,Smith-Waterman Score=324.
cacagggtaacagtaataagtggtgaaactggttgtggcaaaaccactcaagttactcagttcattttggataactacattgaaagaggaaaaggatctgcttgcagaatagtttgtactcagccaagaagaattagtgcccattccagttgcggaaagagtagctgcagaaagggccagaatcttgtggccagtggtaatagtactggatatccaaattcgtctcccagagtcggttgcccaaggaaacagggttctatcttatactgtaccaaccaggaatcatccttccagtggctcccagtcagacccgtatttgtccagtgttagtcatatcgtacttgatgaaatccatgaaagaaatctgcagtcagatgttttaatgactgttgttaaagaccttctcaattttcgatctgacttgaaagtaatattgatgagtgcaacattgaatgcagaaaagttttcagaatattttggtaactgtccaatgatacatatacctggttttacctttccggttgtggaatatcttttggaagatgtaattgaaaaaataaggtatgttccagaacaaaaagaacacagatgccagtttaagaggggtttcatgcaagggcatgtaaatagccaagaaaaagaagaaaaagaagcaatatataaagaacgttggccagattatgtaagggaactgcgaagaaggtattctgcaagtactgtagatgttatagaaatgatggaggatgataaagttgatctgaatttgattgttgccctcatccgatacattgttttggaagaagaggatggtgcgatactggtctttctgccaggctgggacaatatcagcactttacatgatctcttgatgtcacaagtaatgtttaaatcagataaatttttaattatacctttacattcactgatgcctacagttaaccagacacaggtgtttaaaagaacccctcctggtgttcggaaaatagtaattgctaccaacattgcggagactagcattaccatagatgatgtcgtttatgtgatagatggaggaaaaataaaagagacgcattttgatactcagaacaatatcagtacaatgtccgctgagtgggttagtaaagctaatgccaaacagagaaaaggtcgagctgggaagagttcaacctgggtcattgctattcatctgtattaatgggtcttaggaggcaagtcttctaggatggactattcaactgccagaaatttttgaggaactccttttgggaaggaactttgtttacaaaataaagatttttaaggctaggtgaaattgcttattttctgagtagataaatggacccaccatcaaatgagccagtgttactctccataagacacttgatggagcttgaacgctttggataaacaagaagaattgacacctcttgggagtccacttggcacgattacccgttgagccacatattggaaaaatgattcttttttggagcactgttctgctgcttagacccagtactcactattgctgctagtctcaagtttcaaagatccatttgtcattccactgggaaaagaaaagattgcagatgcaagaagaaaggaattggcaaaggatactagaagtgatcacttaacagttgtgaatgcgtttgagggctgggaagaggctaggcgacgtggtttcagatacgaaaaggactatttgctgggaatattttctgtcttcaaacacactgcagatgctgcataacatgaaaggacagtttgctgagcatcttcttggagctggatttgtaagcagtagaaatcctaaagatccagaatctaatataaattcagataatgagaagataattaaagctgtcatctgtgctggtttatatcccaaagttgctaaaattcgactaaatttgggtaaaaaaagaaaaatggtaaaagtttacacaaaaaccgatggcctggttgctgttcatcctaaatctgttaatgtggagcaaacagactttcactacaactggcttatctatcacctaaagatgaggaacaagcagtatatacttgtatggactgcacagaggtttccccattactgtctcttgttttttgggagggtggacatttccatccagaagggataacgatcaggaaactattgctgtagatgagtggattgtatttcagtctccagcaagaattgcccatcttgttaagagagctgtagtacacatggatgaacgacgagaagaacaaattgtacagttactgaattctgttcaagcgaagaatgataaagagtcagaagcacagatatcctggtttgctcctgaggatcatgggtacgacaagaaatatttttttaaagaatag

SEQ ID NO: 7940 - DNA, 394 bp, Homo sapiens
  SIMILAR (377)..(138): 611254mologous to Homo sapiens Human secreted protein, SEQ ID NO: 7925,accession number G03844,Smith-Waterman Score=228.
actacatggcttgttttattttaatggctgatctatgtaatcacagacgccaggatgtacagacaaagggggaggtattatttcttggtctcttcctccttggataaagtcttgatgatctccttcttgttgggctggaggcgctcttcacggcgcttgcgtgctttcttggtcttacacctgcgggcctcaccctgggcacccaggagcttcgtgcggcccgtgtccgccttcagcgtggggatgtgccacatgaaaacccgcgtgtttgagaacacattccccttcactcttgggcacactgtgagatacgtggggagagagatctttatagattcacggtatcttgtgaacacgcggcgcaaaactcttattcttcatatacgtgagactt

SEQ ID NO: 7941 - DNA, 1347 bp, Homo sapiens
  SIMILAR (100)..(417): 771254mologous to Homo sapiens ribosomal protein L19,accession number X63527,Smith-Waterman Score=413.
tcagcagatccggaagttgatcaaagttgggctgatcatccacaagcctgtgattgtccattcccaggttggatgccagaaaagcacctttagcccaccagaaagggcaggcacatgggcacaggttagcgcaagagtacagccaatttccaaatgccagagaaggtcacttggatgaggagaatgaggattttgcactggttgtttggaagataccatgaatctaagaagactgatcaccacatgtatcacagcctgtacctgaaggtgcaggggaatatgttcacaaacaagcagattctcatggaacacaaccacaagctgaaggcagacaaggcccacaagaagttcctggctgaccaggctgaagcccgcagctctaagaccaataaagcaagcaagctccgtgaagagcgctaattctaattggttgacataaaaacagcattcttcctctagaaaaagacataagccaccttttccagcagttaggagatccagtccccttctattttgtaaagcaactgctgccaaggagtctgtttgagtttgtgttgtgacgatactttgggcaatgtcatccaagctttccacaaaatccttggaaagtgccctggaggattccgtaaggtcacagtcaccgcctccatcccctacttgccatgtcttcagggctaatgcataacaattatcacaatttacagcagccccacgctctgaagagcttctggaggggatactactcaagcggaggaaggcaagacagggacctcctccctcttcccggacctcttctgataaggaatatttgtaggtggttaagaaaggcagcgggagggcgtgaaggcaaagacaagctttttttctcgtaggaacacacatcttctggtctggctgtgtttccggaggcatttccagaggacctagcgaggaccaacttccggctgcgacttccgcgtcttccgagtttcgagacctgctgcttccgcccggagttgttgtgggctccagcagcgagtagccacttccgctaggagtccctagcggccagggcgtggaagcggattctgaggcggctttctggtggtgccctccgcttgccaacgcgggacccggagcatttttgacgctgctttcgttttggctgtgctggctcccagggaggtactggggggcctgtggacctgcagagggcatccacggccaagcatacactctgcaggtggaaggtgtggggccatgccctgcggtcaccatactagcaggaataccaaaccagctccccaggagaccatgaagagaggccctgagaccttgaattctttcatgggcaaagccaagaaccat

SEQ ID NO: 7942 - DNA, 324 bp, Homo sapiens
  SIMILAR (3)..(188): 1001254mologous to Homo sapiens bA555E18.1 (A novel protein similar to bacterial histidyl-tRNA synthetase, PPGPP Hydrolase.),accession number AL121780,Smith-Waterman Score=324.
gaaagaaaagaccagagctaagggaccttctgaatcaagcaaggaaagaaacactccccgaaaagaagaccgcagtgccagcagcggggctgagggcgacgtgtcctctgaacgggagccgtagctcaggaggcagaattcagtgtgttatcattgggcagaactggatcctgaaaaattcaagatgctaagcacctacactactttaagaatttggaactgaaacatgaagaggaagagaccaagaaataaaacctcccactttgtctgtacatactggcctctgtgattacatagatcagccattaaaataaaacaagcctt

SEQ ID NO: 7943 - DNA, 1500 bp, Homo sapiens
  SIMILAR (1240)..(1497): 861254mologous to Homo sapiens ribosomal protein L19,accession number X63527,Smith-Waterman Score=364.
atggtgttccggtaccctcaactgtattcgcggccgaccacaagagaatcaatacgagaaataacaaccaggagaaattctggtgcagcaaaggaaattggcacagcagatgactttggtggtctgggctgtgctgtcacaacattgcagttgccctctcccgctgcccaagaaaccaactcaaatagcaggacacgtgacacgcagggtgccaacttggctgccatggaaagcccaaagcaggtgtctgcgcaagtggttgcccagcgtggacgactggctgaaccggcggttgcagaaacgggcacacgaaggggcttgtccagcgtgtggatgcgcatgtgcgagcgcaggttgctgcgcgagttgaagccgcggtggcagatgacgcatcgcatgcggcccgcggggccagccgccgagtccgccggtagtgttgaagcccctctagtcaattcccaggtaatatttatgagagtagacagaatagacagctcatgctacacatggtgtgagcagcagcctcctggccacacgcacaagagccctgtcatccctcataacaaggtcaggaagcacatcctgacagggacctggcttctgctgcaggacgtgtgggacagcagagcttggcattcacatccagagaccactccccaggtgaataggtcctctggggccatcaagaaatgcccagggccccagagacctgcagatgtgggtccaagtctggttccagcagctactgaattactggacatgaacaacataaaaggaccagacccagacggccaatttggcagtgagaggcccaaccagctgagtccagggccaggagggcggcccaaacaaccacggcgaaacccgcagcgcgaggaaaaggggggggggaagaacccagccccactgatctcaaagaaaggctcgggaccaaagacgaaagcgaaacaaaagggcgagctcgatagcaaagcacaaggaaccaaaaaggccaattcttccttccggaaagaacagccaggaaggggtggccacccacacgaaacccctggcccaaggcaaggtctggttggacccgatgagaccaatgaaatccccaatgccaatttccgtcagcagatccggaagctgatcaaagatgggctgatcttgcgtcaccgcaagcctgtgacggtccattcccgggctcaaggctggaaaagcaccttggcccgccggaagggcaggcacttgggcatagaatcgaagaagattgatcgccacatgtatcacagcctgtacctgaagttgaaggggaatgtgttcaaacacaagcggattctcacggaacacagccacaagctgaaggcagacaaagcccgcaagaagcccctggctgaccaggctgaggcccgcgggtctaagaccaaggaagcacgcaagctccgtgaagagcacctccagaccaagaaggaagagatcatcaagactttgtcccaggaggaaaaggccaagaaataa

SEQ ID NO: 7944 - DNA, 830 bp, Homo sapiens
  SIMILAR (167)..(277): 1001254mologous to Homo sapiens Human secreted protein, SEQ ID NO: 7925,accession number G03844,Smith-Waterman Score=189.
gccgtggaattccacaaaaaagtcatggtttaggaagtaattcatgcagcaataggagaaaagaaaggaagctacaagcttagtgaccttgggtggaggaacagctcacaaggcagcctctgatccatcaccaaccagcatctcttcactccgtgtaccctgcaggtatcacagcctgtacctgaaggtgaaggggaatgtgttcaaaaacaagcggattctcatggaacacatccacaagctgaaggcagacaaggcccgcaagaagctcctggcgtaagtttcttttcagagtcttaggggaacattcttagacctttgagagttgttcttagatacttaaaatgtgccaatgcctaagtcttgacttgcacgtagtctgtcttaggaatacagctgttcccttagaggcacccactcctctgtcctgtacacacccactcttcctgtctcgtagggactagaggttagttgaagcaggagcctttggtgggcccagcaactcattccagaagctgactaggctcaaagggagaggtctggggatgtgcttctgtctccctagcatctcatctcttcccaaactgacccgtcttttctcttccctgaccagtgaccaggctgaggcccgcaggtctaagaccaaggaagcacgcaagcgccgtgaagagcgcctccaggccaagaaggaggagatcatcaagactttatccaaggaggaagagaccaagaaataaaacctcccactttgtctgtacatactggcctctgtgattacatagatcagccattaaaataaaacaagccttaatctgcaaaaaaaaaaaaaa

SEQ ID NO: 7945 - DNA, 909 bp, Homo sapiens
  SIMILAR (5)..(319): 391254mologous to Homo sapiens Human secreted protein, SEQ ID NO: 7926,accession number G03845,Smith-Waterman Score=115.
cggagctctttcctttcgctgctgcggccgcagccatgcagtatgctcagggcttcagaatgaggctcgcctctgagtgtcctccgcatgtggcagagaacgaatggtctgggttagaccccaatgagacccaatgtaatccgccaatgccaacttcccgtcagcagatcccggaagcttcttcaaagatgggctgatcatccgcaagcctggtgacgggtccattcccgggcctcgatgcccgaaaaaacacctttggcccgccggggaaggggcagggcaacatggggcattaggtaaggcgggaaggggtacaagccaaatgcccggaatgccaggagaaggtcaacatggatgacggagaatggaggattatagacgcgcggctgcttcaggaagatacccgtgaattcttaagaaagatcggatcgcccacatggtatcaccagccttgtaccttgaaggttgaagggggaatgtgttcaaaaaacaagcgggattcttcatggaacacaattccccaaggctgaaggcaagagcaaggccccgcaaagaagcttcctggcttgaccagggctgaggccccgcaggtcttaaggaccaagggaagcacggaaagcgccgttgaaggagcgccttccagggccaagaagggagggagatcaatcaaagactttattccaaggagggaaggagacccagaaataaaaacctcacactttgatctgtacaatacatgacctctgttgattacataggttcagcccattaaaataaaaacaaagccttaagcaaaaaaaaaaaaaaaaaaaaaaaaaaagtcggcgcggccgcaaatttgtaggggtagttgcgcccgggatttggtgcgggggttgcggggtgggagaaggttgtccccagggggga

SEQ ID NO: 7946 - DNA, 2697 bp, Homo sapiens
  SIMILAR (1517)..(1113): 431254mologous to Homo sapiens forkhead family transcription factor FOXL1,accession number AF315075,Smith-Waterman Score=195.
atgggaaaccaaaatggcttccaccaaaagaaagtaacatcttcatctctgcgcaccggagatgaggccccgactcagcctctgaagaaagcaaacatgtgcccttttagaatcaaagtttggactcttgaagagcttcctgtgcacagaacaggtccaggattggggcacggagatgcaaagaaatgccagtgtcctgttgcccggggatctccaaagacatctttgggtgtgtcttcatgggctgtcaggggtctggcggtttttatgtctgtgaaggggtgtggtttctcgtcacagccagattggaggagagtgccacagtccccaagtttacggcaagttgtatcagtaatggagggctacggcctgtacatacccgagctgggcacccccgagaatcctggtggcgactgggccagccgctgtgagtgcggggctccccagcctacatggaactcgcgctggcccacaagcaccatgcacagcagcagtcccgcccgcgcctctccctccacaccgcccagcaagctgagggagccggctgggccagtccagaaaggggctcccacagtgcagctgcgggatgaaggctcctcaagcacggccagagtaggcgccaaggccgaggaggcgccgagaggaccgagggctgccagcacgctgtcacctttcaagactgcttccttagatgtttctttgggtgatgttagtgcctgtctggtaacgtgcgattgcattggaacagggcgcttctcatgctgccgagcaactcccacgcttgcaggcgttcaaacggccaggaccattaaagtaaatcctgatgccccccagaaaagtgctgcttcttcgtccttgaaggtcttatctggcttgccaaaacatcaaagacctagacgtttttgccagaacacaggaagttaaagtggaccctgataaaccactggaaggcgttcggctgctggtgctgcagaaaacctgaaaacccggggtcacccccggcacctcacaacttcaagtcaggaacaaacccagctgtgaccacccaccacccagtgggctcaaaaccaaggcctgagccacacggcaacagcgaagcaggcgaggtcatacgggggtccccggtcgaaaggacctcaactgcacctgatgctgtctatgctgaagctcttggattgtcggagctcttcggagagctgcgggaggcggggcgcagaggggacccgggccgtcccctgtgcgcgctgcctggccgaccgccacggccgctgcgcctgggcagcgtcaccagcgtcctcgttcggggacgcggtccccggccatggaggggcgccggcggagaggggccgtccaggaggggcgaggggcccggggcgctgcctgcaggcgggagattgcggggcccgagccccctgccccgtccccgcctccggctgcgcctccgcgctgcgctgggctctccggaaatcggagggaaagtggactctgggagcccagtctcctggaagggaaggcctaaggcactgggggcctggggaagagctcatggtcacagctccattgaggaaggtttcaaaataaacccatttagagaaccggggcaaaacaaaatctcaccaggcattgctcatggaaatcgacaaggtggacaggaaatactcaagaacagtcccagaagctgccccctgcactcagaggaagtgtcctctgggcattttgcccccggcccagctctcagccagtgatcccgacatacctcacccagatacccatgtagagaaggaaatggatggagacacaagacagcaaatcgaaaggccgagaacagcggtggaacagcatcaccgagaaatcagaaaggtgcctgatgctggaagcagctggatggtactgcaggacatggccctgtgtatcagctgctgggtagtgcatggcctgggcatctactccaatggggaccgacaccttcccacctcaatgccagttgctgtgcgaccaccacacccttgccccttgccactgggctgggacaacacggcactgggcggtccgtctgtgaaacaggccctgtggatggagcaaacgggtgtccaggagccttgcggtgtagtggcaagtgacacaggatcagggtcagaaagtactgggtctgagtccaaattccacatcttaccgacatgtcgggagcagtcagtgaccctccctgagctcaggttctgcccccgaacaagcagagtaacaaggacagagctggggcaggagcaagcgagggtggctggggtggactgggatgcccatgtgggaagcaaggcctgccccggccggcgttcacatggtatgcctgcaaatgtggccgtggtgcttgtttgcctgcctccaagttctctcaaccagctgctgctacagacacgtgggcctgatcagcaggcgggcaggagggggcagcagaggccgacctggacatgggtgcgctgggagatcccgctaagcgaagctgaacacggaaacgtggcgggcatcctttttcaaaatgagaaaatcagaataacccgtgtgtttggggttcctgggtatccagcccatggaataagtgaccgcaggggagcggcccctcctggagctcccacgcggcacccgaagtccagcacgcacatccctgcctctaccgaaactccgccgtcccggcgcgtcttctaa

SEQ ID NO: 7947 - DNA, 691 bp, Homo sapiens
  SIMILAR (448)..(293): 301254mologous to Homo sapiens Human bcl2 proto-oncogene mutant protein fragment 51,accession number Y21203,Smith-Waterman Score=68.
gaaaagcctaaaacctaacttgcaattgccctgaattaaaaaaacatctcctaacaaggtgtaaatgaacttctcatctgcctcaaacagctcaaaattatttattgtcaaaaccatgctgtctaatgcttaggcctttaggactaactagggtccgtgggaaccctcaaagtgtattctgcttggtcccaggccttcttgggcttgatgttcatgcgtttccagacttcagctgtggtgcggtctgctttggtgacccccactgaaggtcgaacgtggtgatacgggacagggtgcacagcacatattgcctataccctttctctttcctccatggggttcccatggaagtgtcagggctacggagccgacggaaggacagccagcttattccacctcccccaggccgctggatgctgttgccgtgaagatagaggacactccaggttgaagaaagttgttaggacagggtcaatggaagtcaaggtcatttaaaaggacagggtcgatccaggccaggttctctgggtgctccaacagctgtgaagccacctggttgaagtctctcagatcattgagaacattgttattcagccacagggactgggtcagtgatttccccgactttgaacgcttcagtggtcgtagtcctgtccttggctccttcatttaccagatcttgaatgacgtg

SEQ ID NO: 7948 - DNA, 1435 bp, Homo sapiens
  SIMILAR (169)..(339): 941254mologous to Homo sapiens Human Protease and associated protein-12 (PPRG-12),accession number Y70018,Smith-Waterman Score= 265.
atgccagagagcaactgcagcctcacctggaggcactcagtagggagagcagttgcagcgcagggcggtgagcacagcagccaaggtgcaagtctagtgctcggagaacccagaggaggaagcagctggctgctggggctggagggagacacagggctctggggaggcctcctgaaggagggccggctgacagatggaaaagggaagaccattgattgcaaggacgccatcttcatcatgacctccaatgtggccagcgacgagatcgcacagcacgcgctgcagctgaggcaggaagctttggagatgagccgtaaccgtattgccgaaaaccctgggggatgtccagataagtgacaagatcaccatctcaaagaacttcaaggagaatgtgattcgccctatcctgaaagtaagaggtctttcttggcacttcctgctggagcctaaggctcacttccggagggatgagtttctgggacgaactcggtgagatcgtctacttcctccccttctgccactcggagctcatccaactcgtcaacaaggaactaaacttctgggcccaagagagccaagcaaaggcacaaccatcacgctgctctgggacccgcgaggtggcagatgtgctggtcgacggcttacaatgtgcactatggcgcccgctcccatcaaacatgaggtagaacgcccgtgtggtgaacccagctggcagcagccctatgaagcaggaccctgctgcccagggggctgtactttgcgcatcacggtggaggactcagacaagcagctactcaaaagcccagaactgccctcaccccaggctgagaagcgcctccccaagctgcgtctggagatcatcgacaaggacagcaagactcgcagactggacatccgggcaccactgcaccctgagaagggccggctgacagatggaaaagggaagaccattgattgcaaggacgccatcttcatcatgacctccaatgtggccagcgacgagatcgcacagcacgcgctgcagctgaggcaggaagctttggagatgagccgtaaccgtattgccgaaaacctgggggatgtccagataagtgacaagatcaccatctcaaagaacttcaaggagaatgtgattcgccctatcctgaaagtaagaggtctttcttggcacttcctgctggagcctaaggtcctaacaactttcttcaacctgagtgtcctctatcttcacggcaacagcatccagcgcctgggggaggtgaataagctggctgtccttcctcggctccgtagcctgacactccatgggaaccccatggaggaagagaaagggtataggagggcccggggacattctcttcaccaaggcattgagaaatatatttgtgagagtgatgatatcttcagaaagtactgtaataaccagtttctgtag

SEQ ID NO: 7949 - DNA, 792 bp, Homo sapiens
  SIMILAR (496)..(344): 561254mologous to Homo sapiens novel transcript; similar to transcription factors activation domains; linked at 5' end to AT hook motif of HMGI-C; Method: conceptual translation supplied by author,accession number U28131,Smith-Waterman Score=135.
atgacttacagaagctgtgtggctgatagagtcacacagctaatggcattagaagtggaacccaaagtagagcctcttgcaacccccagaagcaccaagagaccaagaaaaatacctaccaggcccattgtgttcattgctctcttgcagaaactggtgattgtggctctgccatctgcagacagcttaagagttaaccagctcagtgccctcttggtatccgggtccttgtctggcatccaggaagaatcaggtcacatggacaaattgaattatggtaaatgtgggggaattttatcgccagatggaggtggctctcagcaggatggacggggagctggaaaggggatggagtgggaagatgatcttcccctagagttcagccattccacggccgatctctccaaccgtccccagccaaactcctctccatgttcagatgctccttctcttctctcctctgccgtgccgctcttctgctcctctgctgttgggctcatggaacttggggaggcccatagcctgggggtgggagaaccatcaaaacagcaggaccaccctacttgctgtggtactgttaccggggggtccttgctcccagagctcccagaatggccaccagccacttccaagatggtggcaagcctcgtgttctctgacctggggttcttgtcctcatggattccaaggaatggaatcttgggccatgcggtgaatgttatagctctattagaagccgtgtgtcacagaagagaaccgtggaacccagtgactagtgttcagctcgattag

SEQ ID NO: 7950 - DNA, 726 bp, Homo sapiens
  SIMILAR (225)..(383): 531254mologous to Homo sapiens novel transcript; similar to transcription factors activation domains; linked at 5' end to AT hook motif of HMGI-C; Method: conceptual translation supplied by author,accession number U28131,Smith-Waterman Score=138.
ttacggctcgagctgagcttttgctcgagctgtttgctcgagcctccgtggagcaaactgttgtttgcctctattgcagacccgccactgacttccatccctctggatctggcagggtgtccgctgtgctcctgatccagtgaggtgcccattgccgctcctgatcaggctaaaggcttgccattgttcccacacagctaagtgcccaggttcatccccaagttccatgagcccaacagcagaggagcagaagagcggcacagcagaggagagaagagaaggagcatctgaacatggagaggagtttggctggggacggttggagagatcggccgtggaatggccgaactctaggggaagatcatcttcccactccatcccctttccagctccccgtccatcctgctgagagccacctccatctggcaataaaattcccccacatttaccataattcaatttgtccatgtgacctgattcttcctggatgccagacaaggacccggataccaagagggcactgagctggttaactcttaagctgtctgcagatggcagagccacaatcaccagtttctgcaagagagcaatgaacacaatgggcctggtaggtatttttcttggtctcttggtgcttctgggggttgcaagaggctctactttgggttccacttctaatgccattagctgtgtgactctatcagccacatagcttctgtaagtcat

SEQ ID NO: 7951 - DNA, 1830 bp, Homo sapiens
  SIMILAR (893)..(1042): 351254mologous to Molluscum contagiosum virus subtype 1 MC036R,accession number U60315,Smith-Waterman Score=94.
atgagcaagggtgaaagtagaaaatgcaatgaggaaaatgtatccaagtcttcaaaggtcgtgaaggtgtttattgtcctgaccccacagtttctgtcccgtgacaaggaccagctgaccaaggagctgcagaagcatgtaaagtcagtgacagtctcatgcaagtccccaaggaagctcctgagtcacatcacacggctacatccaccttcaaagggtcaaggggagaacctgacacacttggtggattccattaaggcgaccatatggtgtcagcctgtgtgggagactgtggaggggcagaggaggagggtagggaattgcattgacttcactaatggatgtgacctggttggcagcagcagcttgcacaacatgcttgtttgcagctcatatgacattaacagacaagacacttttcagaaagacaggacttctgagaagcaccttctggacagcgtctttactgccctccaggactcagctggtcagcaatggccagccagactccatccccagcgtggagaggaggtagctgatcccagaggcgctcctagcaggcatgtggaacccgagaacagctcgccctgccaaggcaatggagagcaggccggcaaggcaggagctcgggctctgtgtggccaggcaaggaggagccccgcaaccatgccaccaccccttactacaagaagcctctgcgagtttgccgtcttcctcctccactggctcttccctgagctcttccactaccgcaagctgggcgagcaggacagctgctacggggacggcggcaagcaggagctggacccgcagaggctgcagatcatctgcaacttcacggaggtctacttcccccacatgcaggaggaggaggcctggcggcaagcaggacctggacccgcagaggctgcagatcatctgcaacttcacggaggtctacttcccccacatgcaggaggaggaggcctggctgcagcggtgcgcccagtgcatcaacgacaagcttcagggcctggggctggacgcaggcagcgaaggcgagccccccacgcgacaactgctacaactcctccagcctgcccgatgacatctcactcttcacccatgacaacctgcacaagcagcacagctgcagcgactccctgggcaagaagcagctggacccgtcctgcatcaagctcattcgccactaagtgcacctgctctacctctgcaccaaaaacaatcgcgtctggacccttgagttcatgggcaacctgcactggaacaggaacagaggcgctcctaccagcagcagtgcaaggtccacgtgctggccccgagtgtaaagacatgaggagctatgcaatcaatcctgagaggttcagagaggagtctgagggtcccccgctgcccccgagaggagcagcaaggacttctgcaagatccccttggatgaggtggtggtccctcactgagcttcccggtgcgctctccctacctgctgtccgacaaggaggtgtgcaagatcgtgcagcagagcctctccgtgggcaactttgccgcggggctcctccaccgccgagaacctccagctgcagtacaacaattttcgggcttgcaacaagaagcagctggaccctacgcagctgcggctcatctgccactaggtggaagccgtctaccccgtggagaaggtggaggaggtgtggcactgcgaatgtatccccagcaacgacgagcagtgccactgccctaacaggaaaaaatgcaacatcctcaagaaagccaagaaagtggagaagtgaaggcccgtggcctgcccagagactcggggtcaccagagactga

SEQ ID NO: 7952 - DNA, 1518 bp, Homo sapiens
  SIMILAR (533)..(727): 261254mologous to Molluscum contagiosum virus subtype 1 MC036R,accession number U60315,Smith-Waterman Score=68.
atggcggtggatttctctcttgctgttctcatgatagtgagctcatatgacattaacagacaagacacttttcagaaagacaggacttctgagaagcaccttctggacagcgtctttactgccctccaggactcagctggtcagcaatggccagccagactccatccccagcgtggagaggaggtagctgatcccagaggcgctcctagcaggcatgtggaacccgagaacagctcgccctgccaaggcaatggagagcaggccggcaaggcaggagctcgggctctgtgtggccaggcaaggaggagccccgcaaccatgccaccaccccttactacaagaagcctctgcgagtttgccgtcttcctcctccactggctcttccctgagctcttccactaccgcaagctgggcgagcaggacagctgctacggggacggcggcaagcaggagctggacccgcagaggctgcagatcatctgcaacttcacggaggtctacttcccccacatgcaggaggaggaggcctggcggcaagcaggacctggacccgcagaggctgcagatcatctgcaacttcacggaggtctacttcccccacatgcaggaggaggaggcctgggctgcagcggtgcgcccagtgcatcaacgacaagcttcagggcctggggctggacgcaggcagcgaaggcgagccccccacgcgacaactgctacaactcctccagcctgcccgatgacatctcagtaatcagggtggaggatagcttcaagggcgagcgctcttcacccatgacaacctgcacaagcagcacagctgcagcgactccctgggcaagaagcagctggacccgtcctgcatcaagctcattcgccactaagtgcacctgctctacctctgcaccaaaaacaatcgcgtctggacccttgagttcatgggcaacctgcactggaacaggaacagaggcgctcctaccagcagcagtgcaaggtccacgtgctggccccgagtgtaaagacatgaggagctatgcaatcaatcctgagaggttcagagaggagtctgagggtcccccgctgcccccgagaggagcagcaaggacttctgcaagatccccttggatgaggtggtggtccctcactgagcttcccggtgcgctctccctacctgctgtccgacaaggaggtgtgcaagatcgtgcagcagagcctctccgtgggcaactttgccgcggggctcctccaccgccgagaacctccagctgcagtacaacaattttcgggcttgcaacaagaagcagctggaccctacgcagctgcggctcatctgccactaggtggaagccgtctaccccgtggagaaggtggaggaggtgtggcactgcgaatgtatccccagcaacgacgagcagtgccactgccctaacaggaaaaaatgcaacatcctcaagaaagccaagaaagtggagaagtgaaggcccgtggcctgcccagagactcggggtcaccagagactga

SEQ ID NO: 7953 - DNA, 3636 bp, Homo sapiens
  SIMILAR (1738)..(3147): 261254mologous to Arabidopsis thaliana extensin protein- like,accession number AP000735,Smith-Waterman Score=252.
atgtgcaacaacctaattcaccttagtttggccaacaataagatcacgacaattaatggcttaaacaagttaccaatcaaaatactttgtctgagcaataaccagattgagatgatcacaggtttggaggatctgaaagccctgcagaacctggatctgtcccacaatcagataagcagcctccaaggcttagagaatcatgacctcctggaagtgatcaacctggaggataataagattgctgagctgagagaaatagaatacattaaaaatttacccatccttcgagttctcaatcttctagaaaatccaattcaggaaaagtctgaatattggttcttcgtaatttttatgcttctgcgattaacagaattagatcagaagaagattaaagtggaagaaaaggtttcagcagtgaataaatatgatcctccccctgaagtggttgcagctcaagaccacctgacccatgttgtcaacagcgtgatgcagccgcagaggatctttgacaggtacttattagaaatccaaaggccggaattcaggctggtcctgaagcttgtgggaaacgagagcttgcccatcgcctctgcagacagtttagcacttacttcagatatggttagaaatggactaggtgatctgttttatgatttcagggcctgtcataccacaagaccaccttactttggagaaggggatcgagttgattatcattttatctctcaagacgtttttgatgaaatggtgaacatggggaaattcattctaacatttagttatggtaatcacaagtatggattaaatagggacaccgtagaaggtatcgcaagagatggtttggcaagctgtattcatatggaaatagaaggtgtaagaagtttgaaatattcctattttgagcctcgttatatcctggtggtgcccatgaacaaggaaaaatatgagggatatttgcggagaaaaggattattcagtcgtgcagaaattgaatttgctgtctccagagtggacctttatattaaaattaatcagaattttccgggatattttgatgaggtaatcaatgcagatgatctggatgttgcctaccaaaaactgagtcagctcattagagaataccttggattgactgaggaacctgccaagagtttggctacaactgcagtgggacaagaagtagagccagtgttcttcctgagtctcagggctgtgaagaaggtgccaaggaatggggaccagatgtttacaggttcagtgcacaagagtggagccaaccatagttaccttaaaacaagtgtcagtgtgtccagagttggttcctgccagtgggttcgtggtcttgctgacttcaagaatggagccgtggaccttcgtgcaggagctcccgctagcaagaagactgtctctggggtgccagcacacctggttccatctcccaggtgcttggcgaaactgcaagcagatggccagatgacagagcatctctctggaatgcaaattcatgccaagcacctagaaaatcagagcgtaactcctgcccagaaccaagagctggctcaggatggagaaacccatcaaaaagagctttctcctgacagccatctcaatcctgagctccctcaacacctcagttcatcagcactgggtcttcctcagcaggcccaggacctatccctaaacccaacggaagaggatgtccaacaatcagatcttcccctaaaacaaatagccactgagacagatgtccctgagatggaagccagtgaggttgggcagtctcccatcaccccgaccctggtgcctcctgtgcacccttcccctccctcgtcccgcagccctcagccaggccaggacaaggagtcaggggaggcccaggtaacccctactggccctcctctgtctgaacctctacagggacctggccccactcccctcagccctcagagaattcaggatgaggaaattgagtcagacaaacttccacccagcagttcccaccatgatcctccaaaagattcttcccacactgacttggtgcagaaacttgctggcgattctcagcaagctctgaaggaggaaacctccaaaccggaagccatccgagtcagtatccctcacccagaactgccacatccccaagacttagcaacagataccaagcagccccaggccaggggagccccggggaccttgcttcctagaagccggctggctcccactcggctgccccagcctcaggtgctggctcccctccagagcaggaggcccacacccaaactcctatcgcccagcagggaagaggctttaggaacaacctcccatcaaaccatgacggtctctcccaggcttccaccaacccgggaagcagacaccagtaaacttcctcccatcagccctccgcactcaaaaccaccaccaaatctgagcccccaggcagcccacagtcttcagcaagtccaggaagagaaggtcagtgaggtgaaactccctcttatcagtccccccagccaggagcaagcagaacctcgcatcctcagtcccgcccaggaggaggcggctcagaaagtgaggctccctcgcattcctgctcctcttccggagccagggctgccccagaactcggggactcagcctgatccaaggcctgcaaaggaaaggaaagctccccaagcaggcagctcctccaggaggaagattccagacatgcgggcctcaccccacaaccaggggccacttcagcagacaggggctagggaaaaaaagctccccaaccagaaagggacggctagaggactggcacctctggaagaggcaccacctgggaaccaccagccagccttgcagctagaaccccacgatcagccagctcccaccatgagggaaaaggcccctgcggagtcgctacaggatagctcggctcctgtggagcatccagggagaaagggacaggttcatcgaaagggcaggtctcagaggagagagattgcttcgcaatccccagagcaggacagtgagcccccaacccagcagcctgtcaaagacacaccagcccatcaggggagagcaaaccaaagagaagcgaacctgaaaacatggggcagtgccacaggacaaaagccccgccactccccagaaccaggtgtctactgtggagcagggcagctggaagggaagactgcgccccaggagcagtcagagcaccaaggtttaagccatccctggagccaccagctcattaaggtctgggaaccccgaggcagcactgtcacagaacgaccagctatggctgggtcctgtgagtctccacactggcttcctcctgaacccatggtcagcgtaggtggaggggctgttcagcactgtccaaaccttggattcctagaaggcagccaatctgcactcctgtgcctcttctgctgttgccgtcacagcctggaagagcagttgttgcagagggatgcagctctatcagctgctgccaccaaattgagccattctggaaggctggtgtcagcaagtagcctttgtgtccagacacgaatccaacctgagttccaactctggctgaagcagggccatattgccattaagttttcttctcttcataaggaaaattcgcttctagacttctag

SEQ ID NO: 7954 - DNA, 1038 bp, Homo sapiens
  SIMILAR (987)..(958): 1001254mologous to Homo sapiens PRO1546,accession number AF116638,Smith-Waterman Score=57.
ttacatggacagttcaaggggaatggggcataaacttcccttgaatgtagatgtagcctcttccaaaacgggtatggtgtagctatttctgcttctcccacatttttgtgagtttctctgtgccccaaactcggtggtctctgatatccttcccgttggatttggggccagtcttcccaacagcatgcaggaaggaaaggtcagagaaagcatccactggcgatgatctctccgcagtcctggctgactttctgtgaatgacaccaccatcggtccttccgtgaccgagcctttcctattgacacccagattattctctcccattcccattttcacctccagtcctttgttttccccaccctgttcaaggtctttactcagtgttatttgtgaacactgccgcggagcccagagagaaaagtgcaatggccattctgcctctttctggacatgcatgttcacatgtgtgtttgggatctcaccaaagcctcttccaaagagcatgtggtcgttgtcccagaccgctttccgggtctcttcggtctcactgtcactggctcctgatcctaggtgtgaagaaatgctcccctccggaggctggaaaggcaattcttttgaccacggacagaaccgaaacaatgaacatttcatggaaaccaaggaatccttcccacactgtgcctcatccccaccatatttgctgtcattggagaatctgaaattgatcacacgaaaatggctgatatttaagccattacgttttggataaatcttgccttttaatgagggccaacgtcttaaaagaatgcagctctcatggcagatttcaggcctcttttcaggatatggtccaaatggaggtttaaaatagtcttcacaaagatcaaaacttttccagagttcttctaaagttgtataatagtgtagaccactggtgagaggtgctggtactggacccctatgagtgagaacatgtggtgtttgatttcctgtccttgcgatagtttgctcagaatgatggtttctagcttcatccat

SEQ ID NO: 7955 - DNA, 1953 bp, Homo sapiens
  SIMILAR (175)..(1383): 231254mologous to murine herpesvirus 72 membrane virion glycoprotein 150,accession number AF294428,Smith-Waterman Score= 240.
atggagaatgaattgattgccttgggtgcctcattcagggatgtgacagcagctagtacacactgcatttgtgataaggctgatacgagggacaacagagggtgcttggcgaaactgcaagcagatggccagatgacagagcatctctctggaatgcaaattcatgccaaggacctagaaaatcagagcgtaactcctgcccagaaccaagagctggctcaggatggagaaacccatcaaaaagagctttctcctgacagccatctcaatcctgagctccctcaacacctcagttcatcagcactgggtcttcatcagcaggcccaggacctatccctaaacccaacggaagaggatgtccaacaatcagatcttcccctaaaacaaatagccactgagacagatgtccctgaggtggaagccagtgaggttgggcagtctcccatcaccccgaccctggtgcctcctgtgcacccttcccctccctcgtcccgcagccctcagccaggccaggacaaggagtcaggggagccccaggtaacccgtactggccctcctctgtctgaacctctacagggacctggccccactcccctcagccctcagagaattcaggatgaggaaattgagtcagacaaacttccacccagcagtgcccaccatgatcctccaaaagattcttcccacactgacttggtgcagaaacttgctggcgattctcagcaagctctgaaggaggaaacctccaaaccggaagccatccgagtcagtatccctcacccagaactgccacatccccaagacttagcaacagataccaagcagccccaggccaggggagccccggggaccttgcttcctagaagccggctggctcccactcggctgccccagcctcaggtgctggctcccctccagagcaggaggcccacacccaaactcctatcgcccagcagggaagaggctttaggaacaacctcccatcaaaccatgacggtctctcccaggcttccaccaacccgggaagcagacaccagtaaacttcctcccatcagccctccgcactcaaaaccaccaccaaatctgagcccccaggcagcccacagtcttcagcaagtccaggaagagaaggtcagtgaggtgaaactccctcttatcagtccccccagccaggagcaagcagaacctcgcatcctcagtcccgcccaggaggaggcggctcagaaagtgaggctccctcgcattcctgctcctcttccggagccagggctgccccagaactcggggactcagcctgatccaaggcctgcaaaggaaaggaaagctccccaagcaggcagctcctccaggaggaagattccagacatgcgggcctcaccccacaaccaggggccacttcagcagacaggggctagggaaaaaaagctccccaaccagaaagggacggctagaggactggcacctctggaagaagcaccacctgggggtccagtaccagcacctctcaccagtggtctacactattatacaactttagaagaactctggaaaagttttgatctttgtgaagactattttaaacctctatttggaccatatcctgaaaagagtattctcaacgttttcagcgaatatcgagatatgacgggatttctccgtgtatgccgagttaagccaaatatatgccaattttcgcacaattcaggatatatctcgttttttcgcaatgttcgccggatttccaggattttatcccgatattaccgtgttacggtcattttctcgcggattcgtgtgaaattcgcggagatgttccgcgatagcccggaattttgcagctatattgccaaatttcgcgtgtatacgcttattcgtggatataccggaatatgcctattattggcctttttcgcaatttctcatatattcgagtctcggtattttactatatag

SEQ ID NO: 7956 - DNA, 1134 bp, Homo sapiens
  SIMILAR (7)..(57): 941254mologous to Homo sapiens HSPC307,accession number AF161425,Smith-Waterman Score=89.
gggggttttccgggaggcgcgtggggcttgaggccgagaacggcccttgctgtcaccatacatggagactttgtaccgtgtcccgttcttagtgctcgaatgtcccaacctgaagctgaagaagccgccctggttgcacatgccgtcggccatgactgtgtatgctctggtggtggtgtcttacttcctcatcaccggaggaataatttatgatgttattgttgaacctccaagtgtcggttctatgactgatgaacatgggcatcagaggccagtagctttccttggcctacagagtaaaatggacaataatattaatgggaaaggactttgcatccaagcttcctaatttacaatgggaggttttaggttttcataaatcctggacccgatcgaatgcaccaaatatcccaaaacttcaataggattccttcttctgttccattgggatttcgtctgtggtcctattggagttttttccatgggctagaagtaattccatgaggaatggaaactgcccggggctaatctgatggggttagagtgccctttgagaagaaaatccagtggatacctggatttgctcctggtcaatgaaagttttaaaaggctgtaccaatccctctaatatgaaatgtgggaaaagaaatgaagagcagcagtaaaaggaaatatctagtgaaaaaaccaggaagcggtattgaagcttggactagaatttcttcttgggtattaaagagaccaagtttatcaccaggaattttttttcctgctggcctaattgcctatacccaatgatgtttgagtggcattttctttttagtttttcattaaaatatattcccatatcctacaacgtataatatcaaataaagtgattattttttacaacccccctcttaacattttttggagatgacatttctgattttcagaaattaaacataaaatccagaagcaagattccgtaagcttgagaactctggacagttgatcagctttacctatggtgctttgcctttaactagagtgtgtgatggtagattatttcaagatatgtatgtaaaactgtttcctgaacaataagatgtatgaacggagcagaaataaatactttttctaattaataccttt

SEQ ID NO: 7957 - DNA, 1299 bp, Homo sapiens
  SIMILAR (899)..(117): 261254mologous to Homo sapiens F-box protein Fbl3b,accession number AF129533,Smith-Waterman Score=128.
aggaattctacattaaaaaaaagctaaatgtcttcactgaagctttgcatctctctgtaaaaatgacgatttggttcagtgaagacactgagtgattcgatgtccatgactgcatgccaaggttgacccaggcccagggatacctgctcaataaggttatgcactggatctacatcctggtcggccagttcaccttggtcaaaatcaatgctttcttcggtgacttcaagcactttcagatcagagccccgaagacgagcaatggcaatgagattgtgtgcccacaccgtgtaaccatgaattgccagaagagagagctttgtgcacctccatgctaataaaaccaacggatcttcatttcggttgtcactaagatctggaaaaccagatgtgtcaatcacatcattcattaaaataaaatgagtgaggaacttgtcatattgcctggatataagatcaacaatagcccctgaaacacaagtgatatagctatcaaaatgaatcctctctagtggtatactgggtttcagaatctttaacatatcttcactcttgatatcaaaagccattatatagacccgaaagctggtgctctttcgtgacagggctttccaatgctcatcatttggcatgttgtccagagacttgtgcattacagaaacattgtgaaccagaagagacagtcgttgcaaaggcacatggttgctatcagttaagactcttgccatctcagctgtaaagtcacaaaaatccaaggcaagtgagtgcagattcacaaatcgctccagttcaactgcagtaataagagtgctgttaccaggaatattattgtccagtaaactgaggtgctccatggtgttggcaacagcattagagagagatgacagtgatgttggggttactatttccagcataaacccacaggacagccatttcagttgcctactattactcaggatttcttcaaacagttgctgaatttgtttaatttttttgccatcagggtccaccttgctgaggtatgtatttgacaaacttccttgctgttgtagaacacttatgtctccaaaaagactaaacttctgaaggttcctgttgttccggatgctgaccagcacgcaaagcaccagctccaagtaggtgcgcagcacttccagccaacgagctgagagctgcagggcctcgacttcctcccctccagtcccggtgtccgcgccacctccgtcccctgggccaccgccgctcagatagttctcggcggcgaattcaacacgcagctctcgcacgaaccagccgcac

SEQ ID NO: 7958 - DNA, 507 bp, Homo sapiens; identical to SEQ ID NO: 3565
  SIMILAR (422)..(490): 391254mologous to Felis silvestris polyprotein,accession number X51929,Smith-Waterman Score=40.
  misc_feature (1)...(507): n = a,t,c or g

SEQ ID NO: 7959 - DNA, 1216 bp, Homo sapiens
  SIMILAR (151)..(1143): 391254mologous to Fowlpox virus gag,accession number AF006065,Smith-Waterman Score=556.
gagcagtgtgtggcaggcccccgtggaggatcaacgcagtggctgaacaccgggaaggaactggcacttggagtctggacatttgaaacttgggagagaggctcaccacttttgagtccacggggcttgcacctccacaagacaaacatccctaggccacccagagtaggcaagagaggaggtgaagcctcgggagaaacccctcccttggcagctggtttaagacccaaaacggggatacaaatgcccctgagagagcagtggtatactggaatagatgaggatgggcacatggtggagaggcgtgtttttgtgtaccagcccttcttctctgccgacctcctcaactggaaaaacaataccccatcctatactgaaaagccgcaagctctaattgatttgctccaaactattatccagacccataaccccacttgggctgattgccaccagttgctcatgttcctctttaacacagatgaaaggcggagagtgctccaagcagcaactaagtggctagaggaacatgcaccggctgattaccaaaacccccaagagtatgtaaggacccagttaccgggaaccgacccccagtgggacccaaatgaaagagaggatatgcaaaggctaaaccgatacagggaagctctcttggaaggattaaagaggggagcccagaaggccacaaacgtggccattcagggaaaagaagaaagtccagcacaattctacgagaggctgtgtgaggcctattgtatgtatactccctttgatcccaatagtcctgaaaatcagcgcatgattaacatggctttagttagtcaaagtgcagaagacattagaagaaaactgcagaaacaggctgggtttgcagggatgaacacatcacagttattagaaatagctaaccaggtgtttgtaaacagggatgcagtaagccctaaggaaaaccgcagagagaatgaacatcaggtccggcgaaatgccgacctgttagctgcagcaatcacaggggtccccccaaagaggcaagggaaggggggccccgggaaagaaattcagcctggttgtcagagcttgcagcgtaatcagtgtgcttattgtaaagaaataggacattggaagaacaaatgccctcagctaaaaggaaaacaaggtgactcggagcaggaggatccagacaaggaggaaggggccctgctcaacctggcagaaa

SEQ ID NO: 7960 - DNA, 1032 bp, Homo sapiens; identical to SEQ ID NO: 3580
  SIMILAR (19)..(315): 601254mologous to Homo sapiens myosin light chain kinase isoform 3A,accession number AF069602,Smith-Waterman Score=261.

SEQ ID NO: 7961 - DNA, 1761 bp, Homo sapiens; identical to SEQ ID NO: 3581
  SIMILAR (1273)..(1698): 461254mologous to Baboon endogenous virus strain M7 gag-pol precursor polyprotein,accession number D10032,Smith-Waterman Score= 285.

SEQ ID NO: 7962 - DNA, 711 bp, Homo sapiens
  SIMILAR (1)..(183): 901254mologous to Homo sapiens NAG13,accession number AF194537,Smith-Waterman Score=288.
atggataaattcctcaacacgtacaccctcccaaggctaaaccaggaagacgttgaatctctgaatagaccaataacaggctctgaaattgaggcaataattaatagcttaccaaccaaaaaaagtccaggaccagacggattcacagccgaattctaccagaggtacaaggaggagctgctgcagaccgacactgcccaatcgatcgcctcggaagcctacaggaccatcacagacgctctaggttactctcacagtggagtccctgaaaatcaacgcatgattaacacggctttagttagtcaaagtgcagaagacattagaagaaaactgcagcaacaggctgagtttgcagggatgaacacatcagagttattacaaatagctaaccaggcgtttgtaaacagggatgcagtaagccgtaaggaaaaccacagagacaatgaacgtcaggcccagcgaaacaccgacctgttagcggcagcaatcagaggggtccccccaaagaggcaagggaaagggggccccgggaaggaaactcagcctggctgtcagagcttgcagcgtaatcagtgtgcttattgtaaagaaataggacattggaaaaacaaatgccctcagctaaaaagaaaaccaggtgactcagagcaggaggccccagacaaggatgaaggggccctgctcaacctggcagaagggttattggactga

SEQ ID NO: 7963 - DNA, 512 bp, Homo sapiens
  SIMILAR (237)..(512): 481254mologous to porcine endogenous retrovirus REVERSE TRANSCRIPTASE,accession number A66553,Smith-Waterman Score=209.
ctgtccaggtccagccctctcttgcccttagtgtggcaccaggccatggtggggagcatggatgtggagccagcggcctgggtgttgatgaccttctgctgggacaccccacggcagtcgggtgtgccacgggaacggatgccccacaccggcacctggaggactgtgggtataaggtgtccaaaaaaaaagctcagatctgccaacagcagcatgatgcgaggcaaggtccagccgttccgcccggcatacaagcttatggagcagccccctttgaagatctccaggtagacttcagagagatgccaaagtgtggaggtaacaagtatgtactagttcttgggcgtacctactctgggtgggtggaggcctatccaacacgaactgagaaaactcgtgaagtaacccctgtccttcttcgagatctgattcgtagatttcgaccgcccttatggatcggctcagacaacgggcctgcatttttggctgccttggtacagaagacggcaaag

SEQ ID NO: 7964 - DNA, 764 bp, Homo sapiens
  SIMILAR (366)..(764): 471254mologous to porcine endogenous retrovirus viral polyprotein,accession number AJ133818,Smith-Waterman Score=290.
ctaagcaggtgttggtaaacggggacgcagtaagccgcgaggaaaagcgcaaagagaatgaacgtcaggcccggcgaaacgccgacctgttggttagctgcagcaatcagagcggtccccccaaagaagcaagggaagagctatggaccaaggactacaggccgggacaggatttgcgcttgcttagtcaagctaccctgactttccatccaacagtacctagcccgtccacattgttggggttgctgccagctgaggacagctggttcacctgcttggacctgaaagacgctttctttcctatcagatcagcccctgagagccagaagctgtttgcctttcagtgggaagatccggagtcagcccttgccaaaacggtgaggcagcgttgtgtcagctgccgacagcatcatgcgaggcaaggtccagccgttccgcccggcatacaagcttatggagcagccgcctttgaagatctccaggtagacttcacagagatgccagagtgtggagggaataagtatttaccagttcttgggcgtacctactctgggtgggtggagacctatccaacaagagctgagaaagctcgtgaagtaacccgtgtgcttcttcgagatctgattcctagattggaactgcccttccggatcggctcagataacgggcctgcgtttgtggctgacttgctacagaagacggcaacggtattggggatcacacggaaactgcatgccgcctcccggcctcagagttccggaaag

SEQ ID NO: 7965 - DNA, 1548 bp, Homo sapiens
  SIMILAR (43)..(150): 301254mologous to Baboon endogenous virus strain M7 gag-pol precursor polyprotein,accession number D10032,Smith-Waterman Score= 44.
gcttggtcagcatgttgatgtatctacggagctcagctgtgtactgggccatctgctccggtgtggtattgtcccctgggtacaatggctccaacggggctccccgggcacccagcagtggctacagcaacagagccacacagggagaggggctccccacttttgattccacagtgcttgtacctccgcaagacaaacatatccttaggccacccacagtagacaagagaggaggtgaagcctcgggagaaacccctcccttggcagctcgtttaagacacaaaactgggatacaaatgcccctgagagagcagcagtatactggaatagatgagtatggtcacgtggtggagaggcgtgtttttgggtaccagcccttcacctctgcccaccttctcaactggaaaagcaataccccatcctatactgaaaagccacaagctctaattgatttgctccaaactattatccagacccataaccccactagggctgattgccaccagttgctcatgttcctctttaacacagatgaaaggcggagagtgctccaagcagcaactaagtggctagaggaacatgcaccgactgattacaaaaacccccaagaggatgtaaggacccagttactgggaacctacccccagtgggacccaaatgaaagacaggatatgcaaaggctaaaccgatacagggaagctctcttggaaggattaaagaggggagcccagaaggccacaaacattaacaaggtctctgaggtcattcagagaaaagaagaaagtccagcacaattctacgagagactgtgtgaggcctatcgtatgtatactccctttgatcccaatagccctgaaaatcagtgcatgattaacatggctttagttattcaaagcacagaagacattagaagaaaactgcagaaacaggctgggtttgcaaggatgaacacatcacagttattagaaatagctaaccaggtgtttgtaaacagggatgcagtaagccgtaaggaaaaccagaaagagaatggaggatggcccccctgtttgagggccttggcagcaactgccctgctagtacaagaagcaaataagctgactcttgggcaaaacctgaacataaaggcctcccgtgctgtggtgactttaatgaatactaaaggacatcattggctaacggatgccagactcaccaagtaccaaactttgctctgtgaaaatccccgtataaccactgaagtttgtaacaccctacaccctgccaccttgctcccggtatcagagagccctgtcgagcctgattgtgtagaagtgttggactcagttgactctagcagacctgacctccgggaccaggcttgggcatcagtagactgggaactatacgtggatgggagcagcttcttcaacccccaaggagagagaggtgcagggtatgcagtggtaaccctggacactgttgttgaagccagatcgttgccccaggccacttcagcccagaaagctgaactcgttgctttcattcgggccttagaactcagtgaag

SEQ ID NO: 7966 - DNA, 1495 bp, Homo sapiens
  SIMILAR (1202)..(1360): 471254mologous to porcine endogenous retrovirus viral polypeptide,accession number AJ133816,Smith-Waterman Score=134.
atggatggagctggaatctgttatcttcatcaaactaatgcaggaacagaaatccaaacaccacatgttctcacctataagagggagctgaataatgagaacatgtgggcacacaggggagacaacacacactggggtccagagggttcaaccaattctcctgcctcagcctctggagtagctgatgtatccagagttggttccctccagtgggttcttggtctcgctgacttcaagaatgaagccaaggaacttcgtctttataagcaggagaaaagggagaaagcaaaacgttggaaggaaacagaaaagggatttaatggagactatggggttactatgacaccagggaaatgtagaacttattttgaaatagattggtcaaaattagaagtgggttggccatcagaaggaaacctggagaggtcccttgtttctaaggtatggcacaaggtaactggtaagtcaggacactcagaccagtttccatacatagccacttggttacagctggtgctagaccccccacagtggctaagagggcaggcagcagcagtgctagtagcaaagggacagattgccaaggaaggatcctactccacccggccgagggaaatcaactcctgaagttctgtttgacccaacatcagaagatcccttgcaggagatggaaccagtgatcccagtggtgccctccccttaccagggaaagatgctccccactcttgagcccacagtccttgtgcctccacaagacaaacatatccctaggccacccggagtagacaagagaggaggtgaagcctcgagagaaacccctacattggcagctcgtttaagacccaaaactgggatacaaatgcccctgagagagcagtggtatactgggatagatgaggatggtcacatggtggagagaggacatcagcaagcttcaaccttggtgggcttggggaattcctgcactgacttagaggctcaaaaagcagcatctgacctcttccaggcctcaatcacagcccccctgttccctcaagcacctggtcttgtacctacttattctaaagaagaaaaagactttctccaggcagagggaggacaggtgataaaggaaggatgggttcggttaccagatgggagagtagctgtgccacagatgctaggagctgcagttgtactggctgttcatgaaaccacccatctagaggcttatccaacaccaactgagaaagctcgtgaagtaacccatgtgcttcttcgagatcttattcctagatttggactacccttacggatcggctcagataacgggccatcatttctgactgacttggcacagaagatagcaaagtattggggatcacaaggaaactacatgccacttacgggcctcagagttccagaaagtatacctctaaatgatgatgatgatgatgatgatgataatgatgatgatgatgatgatgatgatagtgataatagtacattttgctga

SEQ ID NO: 7967 - DNA, 1959 bp, Homo sapiens
  SIMILAR (1231)..(1749): 571254mologous to Baboon endogenous virus strain M7 gag-pol precursor polyprotein,accession number D10032,Smith-Waterman Score= 498.
atgttgaaaaattttaagaagggatttaatggcgactatggggttactatgacaccagggaaacttagaactttgtgtgaaatagattggccaacattagaagtgggttggccatcagaaggaagcctggacaggtcccttgtttctaaggtatggcacaaggtaactggtaagtcaggacactcagaccagtttccatacatagacacttggttaccacagtgggtaagagggcaggcagcagcagtgctagtagcaaagggacagatagtcaaggaaggatcccgctccacccaccgagggaaatcaactcctgaagttctgttcgacccaacatcagacgatccattgcaggagatggcaaaagtcatcccagtggtgccctccccttaccagggagagaggctccccacttttgagtccacagtgcttgtgcctccgcaagacaaacatatccctaggccacccagagtagacaagagaggaggtgaagcctcaggagaaacccctcccttggcagctcgtttaagacccaaaacggggatacaaatgcccttgagagagcagcggtatactggaatagatgaggatgggcacatggcggagaggcgtgtttttgtgtgccagcccttcacctctgccgaccttctcaactggaaaaacaataccccgtcctgtactgaaaagccacaagctctaattgatttgctccaaactattatccagacccataaccccacttgggctgattgccaccagttgctcatgttcctctttaacacagatgaaaggcggagagtgctccaagcagcaactaagtggctaggggaacatgcaccggctgattaccaaaacccccaagagtatggaaaagaagaaagtccagcacaattctacgagagactgtgtgaggcctatcacatgtatactccctttgatcccgatagccctgaaaatcaacgcatgattaacatggctttagttagtcaaagcgcagaagacattagaagaaaactgcagaaacaggctgggtttgcagggatgaacacatcacaattattagaaatagctaaccaggtgtttgtaaacagggatgcagtaagccataccggtgctgaacattcggtagtaaccggcccagtcgcccccttatccaaaaagactattgacatcatcggagccatgggagtttcagcaaaacaagctttctgcttgccccggacttgtactcctgggaccaaggactacaggctggtacaggatttgcgcttggttaatcaggctacagtgactttacatccaacagtacctaacccgtacatattgctggggttgctgccagctgaggacagctggttcacctgcttggacctgaaagacgctttctttagcatcagattagcccctgagaggcagaagctgtttgcctttcagtgggaagatccggagtcaggtgtcactactcagtacacttggacctggcttccccaagggttcaagaactcccccaccatcttcggggaggcattggctcgagacctccagaagtttcccaccagagacctaggctgcgtgttgctccagtacgttgatgaccttttgctgggacaccccacggcagtcgggtgcgccaagagaacagatgctctactccggcacctggaggactgtgggtataaggtgtccaagaaaaaaagctcagatctgccaacagcaggtacgttacttgggatttactatccgacaggcggagcgcacgctgggatcaggaagaaagcaggtcatttgcaatctgccagagcctaagaccagaaggcaggtgagagaattcttaggagctgcggggttttgcagactgtggatcccaaactttgcagtattagccaagcctttgtatgaggtcacaaagtagggggaccgggaacctttcgaatggggatcccaacaacagcaagcctt

SEQ ID NO: 7968 - DNA, 369 bp, Homo sapiens
  SIMILAR (2)..(364): 911254mologous to Homo sapiens p40,accession number U93569,Smith-Waterman Score=577.
aagagcaactccaagacacataattgtcagattcaccaaagttgaaatgaaggaaaaaatgctaagggcagccagagagaaaggtcgggttaccctcaaagggaagcccatcagactaacagcggatctctcggcagaaaccctacaagccagaagagagtgggggccaatattcaacattcttaaagaaaagaattttcaacccagcacttcatatccagccaaactaagcttcataagtgaaggagaaataaaatcctttacagacaagcaaatgctgagagattttgtcaccaccaggaaggaagcactaaacatggaaaggaacaaccagtaccagccgctgcaaaatcatgccaaaatgtaaag

SEQ ID NO: 7969 - DNA, 690 bp, Homo sapiens
  SIMILAR (151)..(687): 931254mologous to Homo sapiens p40,accession number U93564,Smith-Waterman Score=847.
atggtggaagaaggcaaaggaggagcaaagtcacgtctacatggtggcaagcaagagagagctcgtgtaggggaactctcctttataaaactatcagatcttgtgacacttattcactatcacaagaacagcatggaccaaatctacatcctgattggtgtacctgaaagtgacggacagaatggaaccaagttggaaaacactctgcaggatattatccaggagaacttccccaatctagcaaggcaggccaacattcagattcaggaaatacagagaatgccacaaagatactcctcgagaagagcaactccaagacacataattgtcagattcaccaaagttgaaatgaaggaaaaaatgttaagggcagccagagagaaaggtcgggttacccacaaagggaagcccatcagactaccagcagatctcttggtagaaactctacaagccagaagagagtgggggccaatattcaacattcttaaagaaaagaattttcaacccagaatttcatatccagccaaactaagcttcataagtgaaggagaaataaaatactttacagacaagcaaatgctgagagattttgtcaccaccaggcctgccctacaagagctcctgaaggaagcactaaacatggaaaggaacaactggtaccagccactgcaaaatcatgccaaattgtaa

SEQ ID NO: 7970 - DNA, 996 bp, Homo sapiens
  SIMILAR (373)..(993): 811254mologous to Homo sapiens p40,accession number U93567,Smith-Waterman Score=862.
atgatgatgataaaggctgtgaccatagataaactgcagggaagttctgttactgtatctaccgaagatggtttgctgaaagccaagtatctttatacagaatcatcatttctgtcttctgctgctggggatattacattaggaagtgttcatgattcgtcttctggatgtctaaaagcctcaactaatcagggtgccatagatgtttatgtcagccaactggggaaagtggaattgaaatcccataaaggcacatctgaaagcacaagagctcagtgttctagttgtgttataataatgaggtcacaagtcctgtactacgatgaggtaggagtgtgtgaaataccatggtggttaaaagcatgggctttagggtggagccaagatgctgaatacgaacagctccagtctacagctgccagcgtgagcgacgcagaagacagaccaaatctacatctgattggtgtacctgaaagtgatggggagaatggaaccaagttggaaaacactctgcaggatattatccaggagaacttccccagtctagcaaggcaggccaacattcagattgaggaaatacagagaatgccacaaagatactcctcgagaagagcaactccaagacacataattgtcagattcaccaaagttgaaatgaaggaaaaaatgttaagggcagccagagagaaaggtcgggttacccacaaagggaagcccatcagactaacagctgatctctcagcagaaactctacaagccagaagtgagtgggggccaatattcaacgttcttaaagaaaagaattttcaacccagaatttcatatccagccaaactaagcttcataagtgaagaagaaataaaatactttacagacaagcaactgctgagagattttgtcaccaacaggccgcccctaaaacagctcctgaaggaagcactaaacatggaaaggaacaaccagtaccagccactgcaaaaacatgccaaattgtga

SEQ ID NO: 7971 - DNA, 1223 bp, Homo sapiens
  SIMILAR (1158)..(1223): 681254mologous to Homo sapiens putative p150,accession number U93570,Smith-Waterman Score=78.
atggctgaacaggaacagctccagtctgcagttcccagtcctctgctggtgatacccaggcaaaaagggtctggagtggacttccagcaatctccaacagacctgcagctgagggacctgactgataggaggaaaactaacaaacaaaaaggaatagcatcaacattaacaaaaaggacatccacaccaaaaccccatctgtacgtcaccaacatcaaagaccaaagaccaaatccacgtctgattggtgtacctgaaagtgatggggagaaaggaaccaagttggaaaacactctgcaggatattatccaggagaacttccccaatctagcaaggcaggccaacattcaaattcgggaaatacaaagaacgccacaaagatactcctcgagaagagcaactccaagcacacctaattgtcagattcaccaaagttgaaatgaagggaaaaaatattaagggcagcccagagagaaaggtcggggttacccacaaagggaagcccatcagactaacaacagctgatctctcagcagaaacttctacaagccagaagacagagtgggggccaatattcaacattctctaaagaaaagaattttccaacccagaatttccatatccagccaaacctaagcttcttcataagtgaaggagaaatcaaaatactttacagacaagcaaatgctgagagatttttgtcaccaccagacctgcctgccctaaaagagcaccaggcctgccctaaaagagctcctggaaaggaagcacttaaacatgggaaagggaacaactggtaccagccactgcaaaaaccatgcccaaatttgtaaagaccattgaggctagggaagaaacttgcatcaacttaacgagcaaaataaccagctaacattataacggcaggatccaaattcacacataacaatattaactttaaatgtaaatggggctaaatgctcccatttaaaagacacagactgggcaaattggataaacagtcaagacccatcagtgtgctgtattcaggaaacccatctcatgtgcagagacacacataggctcaaaataaagggagagaggaagatctaccaaggaaatggaaaacaaaaaaaggcaggggttgcaatcctagtctctgataaaacagactttaaaccaacaaagatcaaaagagacaaggccattacataatggtaaagggatcaattcaacaagaagag

SEQ ID NO: 7972 - DNA, 433 bp, Homo sapiens
tttttttttctgagttaacaggtcctttattttgcacacttgctgctgatatatagaaccacgaagtgtttgcacagaccacgaatgcagccgctagcctagaggctggtcacagaagagaatgcgatgaacaccgtcctgccagtgtgaggacggagtgtctgatgtgtttgtgtccccccaccacccccccatatacaaaggccatctctagggcagaaatctctcaacagtatctgtgacttcagcttctctcaaaggcaagatctaatcagactacctatgtgaaattttgtggactattcagaaatatttacagatgtggtcaggtgccttgggtttgggtggcagccttttctcatctccagtatgcctaatcctatgtcaagtgcacagtgaggatcatgagaagggggatgtgaggcctagcatc

SEQ ID NO: 7973 - DNA, 388 bp, Homo sapiens
  SIMILAR (12)..(161): 981254mologous to Homo sapiens Human Rab3-GAP protein,accession number W68563,Smith-Waterman Score=250.
  misc_feature (1)...(388): n = a,t,c or g
gcacgagnaagatggctgccgacagtgagcccgaatccgaggtatttgagatcacggacttcaccactgcctcggaatgggaaaggtttatttccaaagttgaagaagtcttgaatgactggaaactgattggaaactctttggaaaagccactcgaaaaggtcagatctatttgctggtgtctctaaatgactatttactttgaaacctctattttccagccctttgctgcatttggcacatttgaattaaatgttttttaaagttacgtataatctataaacatcaaatagcatttggaagaatttggatttaaatctgtggcaaatgatatatgtaagacatttgtgaaatgtttaataaagttatatataagtgtgtgtgtaaa

SEQ ID NO: 7974 - DNA, 1539 bp, Homo sapiens
  SIMILAR (529)..(714): 831254mologous to Homo sapiens Human Rab3-GAP protein,accession number W68563,Smith-Waterman Score=254.
tttcgtaggatttgcacttctgtaagtggctgcttcatcctttgacacctgcgctgatcatttgtgtgcgctgcacctccttcaggtgctgcactatctggcaatccagaaacctgcagaccttgctcggcacctgttaccttgtgtgattcatgcagctgtactcaaggtaaaggaagaagaaagtctcgaaaacatttcttcagttaagaagatcataaagcagataatatcccattccagtaaagttttgcacttccccaatccagaagacaagaaattggaagaaatcattcaccagattactaatgtggaagctctcattgccagagctcggtcactaaaagccaagtttggaactgagaaatgtgaacaggaggaggaaaaggaagatcttgaaaggtttgtgagttgcctgctggagcagcctgaagtgttagtcaccggtgcaggaagaggacatgctggcaggatcattcacaagctgtttgtgaatgcccagaacgtggcaagctatgactccaccaagaggaggaattgaagagaatgggctccccagaggaaaggaaggcagaactcccgtgtcagacttcccaaccccctgctggccgggaattcattttgcgcaccactgtgccgcgccctgctccctactccaaagctctgcctcagcggatgtacagtgttctcaccaaagaggactttagacttgcagttaaaataatcgatggggatgtgtagcccccccgtgtgaggatgacatcaccacatttctagtttcatggagctcaagatgtcttgtgtctgtgtggctagatggcctctgcttggtaatcttatttttaggcctaaaattcccacttaaatccaaagtaaaaatggttatactgaagcataaacccttgcctgtgtaattttaaaaaattaatagagctgtgccaaaccctgttatttttgtaaaaaaaaaaaaaaaaatacatatctatatataatatgtgtgtgtgtgtgacatatgcacacgtctctgtgtatgtgaagtaggggaggccctgggggatgacctcccagcctttatgatgcttttctctatgctgctggacttcattcttactggtccacggcaggatgcagggcggcctgaggcaggtggctgttaccaagtaggaaggacggttcctaagggacagagttttgtctgttttcttaacaaaggaaaaattctacaaaggagaggttgggcgttacaaaggcattgtggaatctaattaaaagggaaagtgtccgctttctgtggcgttttctttcattttctcccgctgaggcatttcagtctaatttcatgtggttttgtgctgtctcagctctaatgtttgcagcctgctgagcctaacaaggcagtggtctcaagaacattctttgtgcctttttaaagtactccattttatttttatgatagttatgtatttatttcacagatatatttaagtacccactttgtgtcaggtacagtacaagcaatgaagataaaacagaaaccaa

SEQ ID NO: 7975 - DNA, 4509 bp, Homo sapiens
  SIMILAR (2032)..(2961): 681254mologous to Homo sapiens Human Rab3-GAP protein,accession number W68563,Smith-Waterman Score=974.
agatggctgccgacagtgagcccgaatccgaggtatttgagatcacggacttcaccactgcctcggaatgggaaaggtttatttccaaagttgaagaagtcttgaatgactggaaactgattggaaactctttgggaaagccactcgaaaagggtatatttacttctggcacatgggaagagaaatcagatgaaatttcctttgctgacttcaagttctcagtcactcatcattatcttgtacaagagtccactgataaagaaggaaaggatgagttattagaggatgttgttccacaatctatgcaagatttgctgggtatgaataatgactttcctccaagagcacattgcctggtaagatggtatgggctacgtgagttcgtggtgattgcccctgctgcacacagtgacgctgttctcagcgaatctaagtgcaaccttcttctgagttctgtttctattgccttgggaaacactggctgtcaggtgccactctttgtgcaaattcaccacaaatggcgaagaatgtatgtaggagaatgtcaaggtcctggtgtacgaactgatttcgaaatggttcatcttagaaaagtgccaaatcagtacactcacttatcaggtctgctggatatcttcaaatcaaagattggatgtcctttaactccattgcctccagttagtattgctattcgatttacctatgtacttcaagattggcagcagtatttttggcctcagcaacctccagacatagatgcccttgtaggaggagaagttggaggcttggagtttggcaagttaccatttggtgcctgcgaagatcctattagtgaactccatttagctaccatcgatggcactcagtctgaccgaagggatcattgtggataatgatgtttattctgatttggatcctattcaagctccacattggtctgttagagttcgaagagctgataatcctcagtgtttgctaggtgattttgtcactgaattttttaaaatgtgccgtcgaaaggagtcaactgatgagattcttggacgatctgcatttgaggaagaaggcaaagaaactgctgatataactcatgctttgtcaaaattgacagagccggcatcagttccaattcataaattatcagggttcaaatatggtacacactgcaaagaaaaaaatccgaaaacacagaggtgtggaggagtcaccgctaaataatgatggtcttaatactattctcctgttcttattccctgatgctgcttctgagaaaccattagatggaactacttcaacagataataataatcctccatcagagagggaagactataatctctacaatcagttcaagtctgcaccatctgacagtttaacatacaaactggctttgtggctctgtatgaacaatttttaccatggagggttgaaaggagtggcacacctctggcaggaatttgttcttgaaatgcgtttccgatgggaaaacaactttctgattccaggattagcaagtggacccccagatctgaggtgttgtttactgcatcagaaactacagatgttaaattggttgattgaaagaaagaaggcacgtgatgaggggaaaaagacaagtgcttcagatgtcactaatatatatccaggggatgctggaaaagcaggagaccagttggtgccagataatctaaaagaaacagataaggaaaagggagaggtaggaaaatcttgggattcctggagtgacagcgaagaagaattttttgaatgcctaagtgatacttatagaacttaaaggaaatggacaagagagtggcgggaaaggaggacctaaggagatggcaaatttaaggccggaaggacggctctatcagcatgggaaacttacactgctgcataatggagaacctctctacattccagtaacccaggaaccagcacctatgacagaagatctgctagaagagcagtctgaagttttagctaaattaggtacatcggcagagggggctcaccttcgagcacgcatggcaaagggcctgtctgctctcagatatggagtcttttaaggcagctaatccaggttgctccctggaagattttgtgaggtggtattcaccccgggattatattgaagaggaggtgattgatgaaaagggcaatgtggtgctgaaaggagaactgagtgcccggatgaagattccaagcaatatgtgggtagaagcctgggaaacagctaagccaattcctgctagaaggcaaaggagactctttgatgatacacgggaagcagaaaaggtgctgcactatctggcaatccagaaacctgcagaccttgctcggcacctgttaccttgtgtgattcatgcagctgtactcaaggtaaagggaagaagaaagtctcgaaaacatttcttcagtgaagaagatcataaagcagataatatcccattccagtaaagttttgcacttccccaatccagaagacaagaaattggaagaaatcattcaccagattactaatgtggaagctctcattgccagagctcgggtcactaaaagccaagtttggaaactgagaaatgtgaacaggaggaggaaaaggaagatcttgaaaggttttgtgagttgcttgctgagcaagcctgaagtgttagtcaccggtgcaggaagaggacatgctggcaggatccattcacaagctgtttgtgaatgccccagacgtggccagcttatgactccaccaggaggagggaattgaagagaatgggctccccagagaaaagaaggcagaactccgtgtcagacttcccaccccctgctggccgggaattcattttgcgcaccactgtgcggcgccctgctccctactccaaagctctgcctcagcggatgtacagtgttctcaccaaagaggactttagacttgcaggtgccttttcatcagatacttccttcttctgattcttctagcattactcgttggtggcttcagagaaagttctggctccctcctgaagggaggggaaggtaccagggagaacctgggaggtcctggagagggccctgtcccagttgggtgaatcaggaatcaaaccagcatcggaaagacttcccagccaccaggcttaagctgtgtcggtttcgtggagggggcagccgaggatgggcttgagctgttgagagatttctgcccctagagatggccctttgtatatgggggggggtggtggggggacacaaacacatcagacactccgtcctcacactgagcaggacggtgttcatcgcattctcttctgtgaccagcctctaggctagcggctgcattcgtggtctgtgcaaacacttcgtggttctatatatcaacagcaagtgtgcaaaataaaggacctgttaactcagatttctggatattttggtggtagcttctagtcccagaatctgtgtttttaaaatactacatgacgattctgtctattcaatcacctggtggtcatctttcttgtactaattaactgttgatgagcattttggatattctaggagaaagcctataatttcacatagtttctctttttcatgtaactgtaacctaaatgtattacttctgataaaactgatatatcaaatgatcaaatgatcaatagaaaaattaagattttatatcatgtcatgtgagatttgtcttacttatttttcttttggttgccatggaagttatggcccctgaaaatcgtctccctccccattctcattgctgtaccagccatgcgttctctttttgtggttgctggctgggtactgtatttaatgaagtagagaatagcacttgcaaaaatacagtcttggtacctagagactgtcatgcagatatgtataatttgggatatgtgctaatgcatttgagtaggagggttattttaacacacgtattttgcttttgtattttagttaaaataatcgatgggggatgtgtagccccccccgtgtgaggatgacatcaccacatttctagtttcatggagctcaagatgtcttgtgtctgtgtggctagatggcctctgcttggtaatcttatttttaggcctaaaattcccacttaaatccaaagtaaaaatggttatactgaagcataaaccttgcctgtgtaattttaaaaaattaatagagctgtgcaaaccctgttatttttgtaaaaaaaaaaaaaaatacatatctatatataatatgtgtgtgtgtgtgacatatgcacacgtctctgtgtatgtgaagtaggggaggccctgggggatgacctcccagcctttatgaatcttttctctatgctgctggacttcattcttactggtcacgcgatgcaggcggctgaggcagtgctgtaccaagtagaagacggttcctaaggacagagtttgtctgttttctaacaaagaaaaattctacaaaggagtggttaaagttacaaaggcattgtgaatctaataaaaggaaaggtgtcgcttaaaa

SEQ ID NO: 7976 - DNA, 1726 bp, Homo sapiens
  SIMILAR (7)..(1035): 591254mologous to Homo sapiens FLJ00032 protein,accession number AK024442,Smith-Waterman Score=1173.
atgagagaaaaaccttgccaaagtaatgagtgtggcaaagcctttaattatagctcactcttaaggagacaccacataacccattcaagagagagagaatataaatgtgatgtatgtggcaagatctttaatcagaagcaatacattgtatatcatcatagatgtcacactggtgagaaaacttacaagtgtaatgagtgtgggaagaccttcactcagatgtcatcccttgtatgccatcgtagacttcatactggagagaaaccttacaagtgtaatgagtgtggcaagaccttcagtgagaagtcatcccttagatgccatcgtagacttcatactggagagaaaccttacaagtgtaatgagtgtggcaagacttttggtcgaaattcagcccttgtaattcataaggcaattcatactggagagaaaccttacaagtgtaatgagtgtggcaagaccttcagtcagaaatcatcccttcaatgccatcatatacttcacactggagagaaaccttacaaatgtgaagaatgtgacaatgtttacattcgcagatcacaccttgaaagacataggaagattcatactggagagggatcatacaaatgtaaggtttgtgacaaggttttccggagtgattcataccttgcagaacatcagagagttcatactggagagaaaccatacaagtgtaataaatgtggcaggagtttcagtcggaagtcatcccttcaataccatcatacacttcacactggagagaaaccttacacatgtaatgaatgtggcaaggtttttagtcgaagagaaaaccttgcacgtcatcatagacttcatgctggagagaaaccttacaaatgtgaagaatgtgacaaagttttcagtcgcagatcacaccttgaaagacataggagaattcatactggggaaaaaccatacaaatgtaaggtttgtgacaaggctttccggagtgattcatgccttgcaaaccatacggagagttccatactgggagagaaaccttacaagtgttattaaatgttgcggaggttttttaatccaaaagggatccttgccacaacatcagagagttcatactggagagaaaccttacgagtgtaatgaatgtggcaaggtttttaatcaaaaagcaagccttgcaaaacatcaaagagttcatactgcaaagaaaccttacaagtgtaatgactgtggcaagcccttacctgaccagtcaacactatttcaccatcaaagcaatcccatcggtgtagggaaacgttaccaaatgtaatgattgtcacaaagtcttcagtaatgctacaaccattgcaaatcattacagaatccatattgaagagagatctacaagtgtaataaatgtggcaaatttttcagacgtcattcataacttgtagttcatcagtgaactcatactggagagaaaccttacaaatatcatgactgtgacaaggtcttcagtcaagcttcatcctatgcaaaacatagaattcatacaggagagaaacctcacaagtgtgatgattgtggcaaagcctttacttcatgttcacacctcattagacatcagagaatccatactggacagatgccttacaaatgtaagggtggcaaggtcttcactctgtggtcattccatgcagaacatcagaaaattcatttttgagataattgttccaaataaaatgaatataaaaaatca

SEQ ID NO: 7977 - DNA, 1162 bp, Homo sapiens
  SIMILAR (971)..(1090): 1001254mologous to Homo sapiens dJ753P9.2 (novel protein),accession number AL023653,Smith-Waterman Score=207.
gctgaggtatgtctctagtagtagatacacatttactctgactcatgtagtctttcactccaggattctggggacgagaaggagtttaatctggatgataacgtgagtttcagggcatccttgtgggatctggctgcaggccctgggcaggggggtgggggtgggagggaaaagtggagggcagtgatttcccgaaccatgaacaggaagatgggcaagatgatggtgaaggccctgtcagaagagatggtgaggcctgcagatataggggatggggtgtccagggggcctggggaccgctctggcagaatgtgagcagagaagatggcgctggccttttctgagcaagaggagcatgaacttccggtgctcagccgccaggcatcaacaggtgagtaggggatgcgggggacacctgccgaatctggaggaaaggactgggttacagccgtgctggtggcagggcctttctgtggccgggcacgagtccacaccgacttcactcccagcccctatgaccacgactcgctgaaactgcaggtaagatcagcatccgggcttctctggagcctggcaggctgtgcccaaaaaggaagctggactgaaccagtgggctctttcaaattcatctatgtggatgtgctgcccgaggaggccgtggggcatgcccgccccagccgccgacagagcaagggcaagaggcccaagcctaagaccctgcatgagctgctggagcgcatcggcctggaggtttgagcttggtcctcactagtatctagtatcagggaggcacaactgccccagggatggggaccaggacacctcaatgagctgaacatcatggatccacagcaccgggccaagctgctcacggccgccgagctgctgctggactatgacagtgagtggctttaggagcggcctggtgagggcgccgagagcagccaggagccagggaggggaggcttgccccaaggtggacatcccgcgcgactcaggctgctttgagggctcggagagcgggcgcgatgacgcagagctggcaggcactgaggagcagctgcaaggcctctccctggccggggcaccttgaggtggcggtggcaataggccaaggctgggacccagctgcaaaggctgtaggagtgggcccagcctcccg

SEQ ID NO: 7978 - DNA, 437 bp, Homo sapiens
  SIMILAR (239)..(436): 951254mologous to Homo sapiens Human secreted protein encoded by gene 75 clone HHGAU81,accession number W78200,Smith-Waterman Score=332.
  misc_feature (1)...(437): n = a,t,c or g
caggacaactagagctctcgcanccgcgaggnggaattcggaagctgctcaggcattcctgtgcaaaaatggggacccgcagacttctatatttgaccacctggtggccatagagcgcgccggaagagctgctgatggcaattactacaatgcaaggaagatgaacatcaagcacttggttgaccccattgacgatctttttcttgctgcgaagaagattcctggaatctcatcaactggtgtttctaactggggaggctatgccctggcctgcgcactctacatcctgtactcatgtgctgtccacagtcagtacctgaggaaagcagtcggaccctccagggcacctggagatcaggcctggactcatgccctcccgtcggtcattaaggaagaaaaaatgctgggcatcttggtgcagcacaatagccggagtg

SEQ ID NO: 7979 - DNA, 1848 bp, Homo sapiens
  SIMILAR (991)..(1383): 891254mologous to Homo sapiens Human secreted protein encoded by gene 75 clone HHGAU81,accession number W78200,Smith-Waterman Score=579.
atggctggagagctccgaccagccagcctggtggtcctgcccaggtcccttgctccagcttttgaaagattctgccaggtcaacactggtcctctacccctgctgggccagagtgagccagaaaagtggatgctgccccctcaaggtgctatctcagagaccaggatgggccatccccagttctggaaatacgagttcggtgcctgcaccggcagcctggcttcgctggagcagtactcggagcagctgaaggacatggtggccttcttcctgggctgcagcttctccctggaggaggccttggagaaagcggggctccccagaagagacccagcaggtcacagccaggcgggtgcatacaagacaacagtgccttgtgttacccatgctggcttctgctgccctctggtggtcacgatgaggcccattcccaaggacaagctggaagggctggtgcgggcctgctgctccctcggaggggtctccaggggcaaaggccctgaacaaggctcaaaggctctggcagctgtatcagggctgggcttacagatgcccctcaggtttaaagaactgttgggaatcaaagagctttccaaacctgcctacggggatgccatggtgtgtcccccaggggaggttccagtgttctggccttctccgctgaccagtctcggagctgtcagcagctgtgagaccccactggcttttgccagcatcccaggctgcacagttatgactgacctgaaggatgcaaaggctccacctggttgtctcaccccagagagaattccagaggtccatcacatttcccaagatcctctgcactacagcatcgcgtcagtctctgcttctcagaagatcagagaactagagtctatgatcggcatagacccagctaaattagaatctcaatggaaacgatttgaccacctggtggccatagagcgtgccggaagagctgctgatggcaattactacaatgcaaggaagatgaacatcaagcacttggttgaccccattgacgatctttttcttgctgcgaagaagattcctggaatctcatcaactggagtcggtgatggaggcaacgagcttgggatgggtaaagtcaaggaggctgtgaggaggcacatacggcacggggatgtcatcgcctgcgacgtggaggctgactttgccgtcattgctggtgagcactcggatggccgcccagtccggccggctacccagggtgtttctaactggggaggctatgccctggcctgcgcactctacatcctgtactcatgtgctgtccacagtcagtacctgaggaaagcagtcggaccctccagggcacctggagatcaggcctggactcaggccctcccgtcggtcattaaggtaacaaaccccagccagccgctcgcctggaagcagcttttaccctggatgagcagcaggcctgaggtcccaagccagcaagctccgcccccaacaccaattccaggctctaacccgcctcctctggggctcctcaaggagatgggacctgcccctcttggaggagaagctggtggaccagacttgcgggacattcacaatgcctcagtgcttaacgggacacctacttggggaatattcccagggcaggtactgagcacccatggtgacatggatgtggaatatgccatcagcccagggcatagcagccatgtggaagaaaaaatgctgggcatcttggtgcagcacaaagtccggagtggcgtctcgggcatcgtgggcatggaggtggatgggctgcccttccacaacacccacgccgagatgatccagaagctggtggacgtcaccacggcacaggtgtaa

SEQ ID NO: 7980 - DNA, 527 bp, Homo sapiens
  SIMILAR (4)..(183): 981254mologous to Homo sapiens Human secreted protein encoded by gene 75 clone HHGAU81,accession number W78200,Smith-Waterman Score=304.
ctcagggcacctggagatcaggcctggactcaggccctcccgtcggtcattaaggaagaaaaaatgctgggcatcttggtgcagcacaaagtccggagtggcgtctcgggcatcgtgggcatggaggtggatgggctgcccttccacaacacccacgccgagatgatccagaagctggtggacaaaggacaacatttctctggggctttttaacttttattcctaagactctaaaggcgttgatttcaaccctccttcactctggcttcttcaggcaacccacgtggtctcctgtgagaatcttctcgacagttacttatggggacacttgtgaacaattaactgccaggcagagcatgagaacaaacattcccaggccatgtaggataggatactccagactccagtcatcctcccccatccatggtttctgttactcatggtttcagttactcatagccaactgcagaccgaaaatactaaatgaaaaatttcagaaataaacaactcttaagttttaaaaaaaa

SEQ ID NO: 7981 - DNA, 935 bp, Homo sapiens
  SIMILAR (631)..(548): 1001254mologous to Homo sapiens Fragment of human secreted protein encoded by gene 75,accession number W78320,Smith-Waterman Score=148.
gaggaaagcagtcggaccctccagggcacctggagatcaggcctggactcaggccctcccgtcggtcattaaggtaacaaaccccagccagttgctcgcctggaagcagcttttaccctggatgagcagcaggcctgaggtcccaagccgtaagccgagggctggcaccctgctgcccctcaaaagccagaggcagagccagccttgaagcagaggtctcctggattgggtgccctttaagctactcgcagttctgaatcgtgtggcaggcctgatccaagtgaccattttccttctagtttgactttggcaggagagcaaagggagaaagctctatggctaaggccagaagacctagccctgccaataaaatcaacctcattttgtgaatgcctgttgtgtgccaaggaccctgctaagtgctttgcttgaagaaaaaatgctgggcatcttggtgcagcacaaagtccggagtggcgtctcgggcatcgtgggcatggaggtggatgggctgcccttccacaacacccacgccgagatgatccaaaaagctggtggacgtcaccacggcacaggtgtaaccgtccatgttccgtgtgagcagagtccctaccaacgggcaggtctgcatccggggagaatgcagctgcttctggcgacaatcctgctagtaaacactggtcttcggcaacccacgtggtctcctgtgagaatcttctcgacagttacttatggggacacttgtgaacaattaactgccaggcagagcatgagaacaaacattcccaggccatgtaggataagatactccagactccagtcatcctcccccatccatggtttctgttactcatggtttcagttactcatagccaactgcagaccgaaaatactaaatgaaaaatttcagaaataaacaactcttaagttttaaa

SEQ ID NO: 7982 - DNA, 2463 bp, Homo sapiens
  SIMILAR (1606)..(1998): 891254mologous to Homo sapiens Human secreted protein encoded by gene 75 clone HHGAU81,accession number W78200,Smith-Waterman Score=579.
atggctggagagctccgaccagccagcctggtggtcctgcccaggtcccttgctccagcttttgaaagattctgccaggtcaacactggtcctctacccctgctgggccagagtgagccagaaaagtggatgctgccccctcaaggtgctatctcagagaccaggatgggccatccccagttctggaaatacgagttcggtgcctgcaccggcagcctggcttcgctggagcagtactcggagcagctgaaggacatggtggccttcttcctgggctgcagcttctccctggaggaggccttggagaaagcggggctccccagaagagacccagcaggtcacagccaggcgggtgcatacaagacaacagtgccttgtgttacccatgctggcttctgctgccctctggtggtcacgatgaggcccattcccaaggacaagctggaagggctggtgcgggcctgctgctccctcggaggggtctccaggggcaaaggccctgaacaaggctcaaaggctctggcagctgtatcagggctgggcttacagatgcccctcaggtttaaagaactgttgggaatcaaagagctttccaaacctgcctacggggatgccatggtgtgtcccccaggggaggttccagtgttctggccttctccgctgaccagtctcggagctgtcagcagctgtgagaccccactggcttttgccagcatcccaggctgcacagttatgactgacctgaaggatgcaaaggctccacctggttgtctcaccccagagagaattccagaggtccatcacatttcccaagatcctctgcactacagcatcgcgtcagtctctgcttctcagaagatcagagaactagagtctatgatcggcatagacccagggaaccgggggattgggcacctgctctgtaaagatgagctgctgaaggcctctctctcgctgtcccatgcccgctcagtgctcatcaccactgggttccccacacatttcaatcatgagcctccagaagagacagatggcccaccaggagctgttgctctggttgccttcctgcaggccttggagaaggaggtcgccataatcgttgaccagagagcctggaacttgcaccagaagattgttgaagatgctgttgagcaagtgtggggaatgacctgccgagtattcttagcaatccggggcagccctggaccaccagagctggggagagtagtggagtatgaagtggctgaaaggctcagacagcagtcccacctggtcgtgatgggcagggctgcacctggagcacccagcctggcttggagacgcctgccagactccactcagagctgggtcttgtctcttgtcctcatgggagctcagagggtagaatttgctatattggattttacagaacttacattacatttgcatgaagaaagtgttctgaagacgcagatcccgatattaacttaccaaggtggatcagtggaagctgctcaggcattcctgtgcaaaaatggggacccgcagacacctagatttgaccacctggtggccatagagcgtgccggaagagctgctgatggcaattactacaatgcaaggaagatgaacatcaagcacttggttgaccccattgacgatctttttcttgctgcgaagaagattcctggaatctcatcaactggagtcggtgatggaggcaacgagcttgggatgggtaaagtcaaggaggctgtgaggaggcacatacggcacggggatgtcatcgcctgcgacgtggaggctgactttgccgtcattgctggtgagcactcggatggccgcccagtccggccggctacccagggtgtttctaactggggaggctatgccctggcctgcgcactctacatcctgtactcatgtgctgtccacagtcagtacctgaggaaagcagtcggaccctccagggcacctggagatcaggcctggactcaggccctcccgtcggtcattaaggtaacaaaccccagccagccgctcgcctggaagcagcttttaccctggatgagcagcaggcctgaggtcccaagccagcaagctccgcccccaacaccaattccaggctctaacccgcctcctctggggctcctcaaggagatgggacctgcccctcttggaggagaagctggtggaccagacttgcgggacattcacaatgcctcagtgcttaacgggacacctacttggggaatattcccagggcaggtactgagcacccatggtgacatggatgtggaatatgccatcagcccagggcatagcagccatgtggaagaaaaaatgctgggcatcttggtgcagcacaaagtccggagtggcgtctcgggcatcgtgggcatggaggtggatgggctgcccttccacaacacccacgccgagatgatccagaagctggtggacgtcaccacggcacaggtgtaa

SEQ ID NO: 7983 - DNA, 1531 bp, Homo sapiens
  SIMILAR (504)..(779): 641254mologous to Homo sapiens Human secreted protein encoded by gene 75 clone HHGAU81,accession number W78200,Smith-Waterman Score=265.
  misc_feature (1)...(1531): n = a,t,c or g
ctagagtctatgatcggcatagacccagggaaccgggggattgggcacctgctctgtaaagatgagctgctgaaggcctctctctcgctgtcccatgcccgctcagtgctcatcaccactgggttccccacacatttcaatcatgagcctccagaagagacagatggcccaccaggagctgttgctctggttgccttcctgcaggccttggagaaggaggtcgccataatcgttgaccagagagcctgttatcttgcaccagaagattgttgaagatgctgttgagcaaggtgttctgaagacgcagatcccgatattaacttaccaaggtggatcagtggaagctgctcaggcattcctgtgcaaaaataggggacccgcagacacttagatttgaccacctggtggccatagagcgtgccggaagagctgctgatggcaattactacaatgcaaggaagatggaacatcaagcacttggttgaccccatttgacgatctttttctttgctgcgaagaagattcctggaatctcatcaacttggagtcggtgatggaggcaacgagcttgggatgggtaaagtcaaggaggctgtgaggaggcacatacggcacggggatgtcatcgccttgcgacgtggaaggctgagtttgccgtcattgctggtgtttctaactggggaggctatgccctggcctgcgcactctacatcctgtactcatgtgctgtccacagtcagtacctgaggaaagcagtcggaccctccagggcacctgggagattcaggcctggactcaggccctcccgtcggtcattaaggaagaaaaaatgctgggcatcttggtgcagcacaaagtccggagtggcgtctcgggcatcgtgggcatggaggtggatgggctgcccttccacaacacccacgccgagatgatccagaagctggtggacgtcaccacggcacaggtgtaaccgtgccatgttcccgtgtgagcagagtccctaccaaacgggcaggtctgcatccggggagaatgcagctgccttctggcgaaaaaccctgctagtaaaacactggtccttcgggtgaagcaaacggaaaactcgccctggccctgggaaaactgcatgccccacttttctgggaggggttaagtgcaggtgcccgtggacaaaggacaacatttcctctgggggctttttaacttttattccctaagacntcctaaaggcgttgatttcaaccctccttcactctggcttcttcaggcaaccccacgtggtctcctggtgaagaatcttctcgacagttacttatggggacacttgtgaacaatttaactgccagggcagagcatgagaacaaaccattcccagggccatgtagggtagggatactccagactccagtcatcctcccccatccatgggtttctgttactcatgggttttcagttactcatagccaacttgcagaccgaaaatacctaaatgaaaaatttcagaaataaaaagattcttaagttttaacaa

SEQ ID NO: 7984 - DNA, 261 bp, Homo sapiens
  SIMILAR (1)..(129): 471254mologous to Mus musculus Pro-Pol-dUTPase polyprotein,accession number Y12713,Smith-Waterman Score=77.
tcagccagcaccactctctgggggctgttgatattcctgatccacaggcttggcactgctctccgtgcagtatcttcgtgggggacccacttgacagcgaaggaggtgcagtgtggccatgctgtgggacccactggtcctatcaccatctgcaccaaccaagggctgctggccataaagaatgttgaaaagagcttctgcccaggtctggatcagggccacggctcccgagaacagcaggaggagggttcgggactccat

SEQ ID NO: 7985 - DNA, 2581 bp, Homo sapiens
  SIMILAR (1159)..(2154): 301254mologous to Mus musculus Pro-Pol-dUTPase polyprotein,accession number Y12713,Smith-Waterman Score=267.
  misc_feature (1)...(2581): n = a,t,c or g
ttttttttttcatgtgggatccacaacactttaattcatagtttgcctcagggctattataattccccaggcctctatagtacagtcttaagagatctggagaacctggatatactatagaatattaaattcctttatttcattgacaacatcatgttgactgggatggatgagtaagaggaggacggtacactagaggctttggtaaaacatcttctctccagaggggtgaagataaataaaccttacagagattcagaagtggccactgcagtgaagttttacaggtctagtggttaggggcatccagggggtgtcccttccaatgtgaaagacaaactgttgcatctttgcatcctcatgcaagggaagggaagcacactgcctggggtgagccctgttttgagtttcttgacatcaccattcctacatgtaaggttgtatntggctttgacccacacttctaggtgacataggaagaatgcccagcttttgagtggagcctccacaggaaaggacactgcagcagatcccaggccatggcgcagtcaccatccttcaggaccccctggtgctgaaagtgccagtgggtggggtaagatttggggtggagctgaaccaagcaccagtaggagagtcacagtggaagggcctgggaatctggagtaaggccatgtcatccacagcacagaaatatgccccatccaaagcagagaaatatgttggaagcaacttttggcatgttactgtaggccctgataagatagaatgcttgaccatgggacacaaaacaaccatgtgattccaaagtgcccctacggaattagcatctgtgtaactcatgaagtcatacattggacatgccccaacagcatcccatcatgagatggaaaagtttcttgtgagttgagcctgaatccccatgttaacatcccccagaaaacacccaaacctgaaatggccctgaacaaccaagcagaagcactgaaattagccagccttccccatgggtcagcccaggccgggtaggatgggtacataaatggagcaaacacagtggcagggatgaggctacctatgggtccaacagtactgactccctcctaccaaggtagatccagacactgccacctctaaatgtcctactcatcagcatttgaacccaatgatcttccctggtagggctctatttctttaggtgaccaaccagaccctaagtgaggagttgactacattgcactctttccatcctgaaagggccagaggttcatgttcacagggataggcacctattcaatagtggggttttcgtgtcgtgttgtgatcccatcagtcagcaccactttctgggggctgttgatattcgtgatccacaggcttggcactgcttctccgtgcagtatcttcgtgggggacccacttgacagcgaaggaggtgcagtgtggccatgctgtgggacccactgggtcctatcaccatctgcaccaaccaagggctcctggaccataaagaatgttgaaaagagcttctataggcacagctcaacgccagcttgcaggaagcactcctgcgggtgggagggtgccatctttcaggacatggtgcattttaaaaatcaaagacatctctacagttctgtaatctcagtaggaagaacacgtgggtccagataccaaggggtggaagtggatgtggctccatatcccattccttcaactcacctgtcgtgggattttgcacttctctcccaaaaccaccactctgcagggtagaaggtcctggattctaaaggagggtacccttaaaaggagacaaatgagtgcccattgaactacacattacagctgccacaggggaattggacagtatgtgtccagagaccagcgggtgagaagaggagtcccctcctctccaggcacaggtaatagatcctgatccccaggaggaggcatggctgctgtcacacaatgagggtaggaggagttcgtgtggaacccagggatccccttgggggcctcctggttccccttgtcccattgtaagtgtgaggagaatcgtccagccacccaacctgagagggtttgatttccaagagcccagacccctcaggaaggaagatttcagtcgcatttccaggtaatttcccaaggcctcgttcctgtgctctgacatcctcagcagcattggtgcaagaggccctacttctctcaggctgttcccagcgggtgatgggtcacaccagggacaccaaagcaggaccatttcctgggacacatgaggactcctttgatggcctaatagtggctggaggactcttcctacgtgccttgratcaactctccttagattacctgtgttctagaatgcatccaaaacatccttctctccttctgcccatcacttgggggcacacttgcatctcagtctattgccttttccaggagttgtaatgtaaaaatgagatcatttctgccttgattgtaattgtaatctgcccaggtctggatcagggccacggctcccgagaacagcaggaggagggttcgggactccatgacccgcaaccttggcgtctgggcc

SEQ ID NO: 7986 - DNA, 1299 bp, Homo sapiens
  SIMILAR (1072)..(1296): 1001254mologous to Homo sapiens thyrotropin receptor-I, hTSHR -I {truncated extracellular domain},accession number S49816,Smith- Waterman Score=395.
atgggctatactgctgaaagccacagcccaccccttgcaagatacagatctggttctccacatacctttggggaacaggttatccaggattccagtgggcctgtcttcctgaggagaagcttgaaagaggtctgtgctgaggagttggagcctgtgactggggccagttgcaaacctaggtctggggctgaggaagaggaggaagagaatgtcattgggaactggttttgggaaggagatgatgctagttttgaccctaatcctcaatctaataaatgtaatcggagaaatttagatccagaattgcagcttcaacaatacaaaacagcaaagctacaagaggctgctgtgccaatctacaagacagtgattcttagtcgttgctggcagggagaggcagaatcacctgcagatgctgcctgtgggctgagtaaaatgcaccaacttttcaaggaaaaacaaggacaggcgattctaggccttaagggaaagatgacacacttggctattgcagaaacacagttccttaaacacaagtccaaaattcaaacagctctgaacattgaaagtttttggcaacctacattgcagcagaatttggcccaaactgacatgagggacttagtaacctgcatcccagctgctccagctgtgactaaaaggggccaagatacagctcagaccatggcttcagaggatgcaagccccaagccttggcagcttccacatggtatagagcctgtgggtacacagaagtcaagaattgaggtttgggaacctcctcttagatttcaaaggatatatggaaatgcctggatgtccaggcagaagtttgctgcagggaccactcactcaggactactcgttcaacgacagtctcttgtggagcaattttccagactgcaaaccctgctcaatttccaaactcctgcatctagtttacatctgtttgtctctggcagtagttcaaaccctcctcccccaatggaaagctctggcaaggagtttattgctcaccctggaaagagagaaccacctcaacagagattgatagtctctagaggggcaagtgaaattacagacaacccttacatgacgtcaatccctgtgaatgcttttcagggactatgcaatgaaaccttgacactgaagctgtacaacaatggctttacttcagtccaaggatatgctttcaatgggacaaagctggatgctgtttacctaaacaagaataaatacctgacagttattgacaaagatgcatttggaggagtatacagtggaccaagcttgctgtga

SEQ ID NO: 7987 - DNA, 2221 bp, Homo sapiens
  SIMILAR (599)..(2218): 291254mologous to Homo sapiens dJ769N13.1 (KIAA0443 protein.),accession number AL035427,Smith-Waterman Score=607.
tttcgtgagggggacgaaacctgggctccgcaaaacagaacgtgggaagaacggcgggatgttaaggagctcaagaagcagagagtctacctgcccgacgcgttcgtggagaggagcagcggttgctgttggaggaggtgggtgcaaggacggcagatggcatccctgaggggtggtgactgagactagatgcgggtgcaggttcctgtaaagatctgtatgtagctgttcacttggaagttaattaagaaagaacaaaaactattcatttggattcaaggtccatctccactggtggctgtggtggctttggattgttggaagaccatcaccttcagcaggtctgcacttgggaacaatcattctcccccagcccgagcgtgcctctgccctctgtatcattgacagaggctgtatgtttggaaagagaactttgtgactgcagaactgacagttgactctaattcttgctaccaagtttttccccgacccagtgaaagagtgttaagacttcgacctaggacacattgagaaccaaggccaagactggacagggccatataactgggcttcaaccatggctgggactaagaataagacaagagcccaggccaaaactgaaaaaaaggctgctatacaagctaaagctggagcagagagggaggctactggtgttgttaggcctgtagccaagaccagggccaaagcaaaagccaagacagggtctaagacagatgcagtagcagagatgaaggcagtgtctaagaacaaggttgttgctgagacgaaggaaggagctctgtcagagcctaagactctgggcaaagccatgggagatttcactcccaaggctgggaatgagtccaccagctccacatgtaaaaatgaggctggtactgatgcctggttctgggctggggaagaggccactatcaattcctggttctggaatggagaagaggctggtaatagtttcagcactaagaatgataaacctgaaattggtgcccaggtctgtgctgaggagttggaacctgcggctggggccgattgcaaacctaggtcaggggctgaggaggaggaggaagagaatgttattgggaactggttttgggaaggagatgatactagttttgaccctaatcctaaacctgtgagcaggatagttaagcctcagcctgtgtatgaaattaatgaaaaaaataggcccaaggactggtctgaggtaactatctggcccaatgcccctgctgtaactccagctgtgttaggatttagatcccaggcaccatctgaggcaagccctccttcatatattgttctggcctccgctgaagaaaatgcctgttctttgcctgtggcaacagcttgccgcccttctaggaacactcgctcatgctcacagcctatccctgagtgtcgttttgattctgacccctgcatccagaccatagatgagattagacgtcaaatcaggatcagggaggtaaatgggattaagccatttgcttgtccttgcaaaatggaatgctatatggattctgaggaatttgaaaaacttgttagcttacttaagtcaactactgatcctcttattcataaaatagcacggattgcaatgggtgtccataatgttcacccatttgcccaagagtttattaacgaagtaggtgtagtgacacttattgaaagcttgctcagttttccttcccctgaaatgagaaaaaagactgtaattactctgaatcctccttctggggatgaaagacaacgcaaaattgaattacatgttaagcatatgtgtaaagaaaccatgtcatttcctttgaactcaccgggacagcaatctggattaaagatactaggacaactgactactgattttgtccatcactacattgttgccaattacttttcagagcttttccatttgctgtcctcaggaaattgcaaaaccagaaatcttgttttgaaactacttttaaatatgtctgaaaatccaactgcagccagagacatgatcaatatgaaggcattggcagcattaaaactcatctttaaccagaaagaggcaaaagccaatcttgttagtggtgtggccatatttattaacataaaggagcatatcagaaaaggctcaattgtagttgttgatcacttgagttataatacactcatggccattttcagggaagttaaagagattattgaaacaatgtaa

SEQ ID NO: 7988 - DNA, 1571 bp, Homo sapiens
  SIMILAR (715)..(903): 461254mologous to Homo sapiens Human secreted protein from gene 4 clone HE8ND56,accession number W83934,Smith-Waterman Score= 103.
  misc_feature (1)...(1571): n = a,t,c or g
atggaaaaactagatgaactaaaaataaaaatagacaacattaatggagcattaatttgtgccaggcacttttctaaatgttcttcgaatgcacaatcacatttatgcccctacctacaagcgtttcctggaggaccagggggcggggcctgcccggctggcctggacgaacgggaagccgggagctcggccacgggtggcgaggctgcggtgaggcctggtctccggctgccagaccatgctgagtggagcacgctgcaggctcgcctcagcgctgcnggcggaacgcgcgcgcacgccgtccgcggtcgcccgtaggtgcctgcacgcagtcaggggtcgcggcctttggcccgaccggggcaagaagactgaggagccgccccgcgacttcgatccaggcgctgctggagttcctggtgtgcccgctctccaagaagccgctcagatatgaagcatcaacaaacgaaattgattaatgaagagttgagaatagcttatccaatcattgatgggattcctaatattatcatattaggcagctaggatgacacgtcaaagtaagaagcaagaagaagtggagcagcgttagtttcattaattttaaaaaaatttaaaaaaacggcaacagccaactttttcttaataccatatacccttttaaaaacacaggtggcaggtaataagtggaagggaaggatgttttctggtctcctccctacgttgactgttcttaattccactggtttctttagcaggactggtctactcaagcctctggtggaagaaaacttcccacaggggctgcactagcacagcccagcctttgcttttacagcctgctccttgccctattaccataccagtggtatggtattcttccacctttggacttgggatgggtattaaactcttcagggcataattgatgcaactagagtcaatatgcctgtatatattaatgatagctcttgggccatcggatctctggaaagctccaaatgggatggaaatttagtttgcggggaaagaggcttttgcttggcgcatatccaggcttagggactgtggggaggccttaagtttgcagatgcttcttttattgtactccttgttctgccccttgttttttggaaggctctgacttataacctgctgtatccgggaagaaaccattttgaccagtgtcttgggttggagatgaacatcgcctaattggacatgtgatgacctatttccttattcccattcatcctaagagtcattgaaattttgttttgccttgtttgtttagcttcaaggtctttggtaaagtcacatgttaaggatgactgaaattaattccaaaggagtgatgttggaatagtcccctctaaggggagagaaatgcatttgaacgaattgtgatataaaacccccataatcaaatagaaacttcatgtacttacaaaaactgagtttgtaaaattaccttcatttctttggacattaaatgcttatattaggcaataaacatgttgacactttcctataaaaaataaaccagtttgcagtaaaaaaaaaaaaaaaaa

SEQ ID NO: 7989 - DNA, 693 bp, Homo sapiens
  SIMILAR (6)..(161): 641254mologous to Homo sapiens PRO2550,accession number AF130089,Smith-Waterman Score=160.
ccagcctcagcctcccgagtagctgggactacaggcgcgcgccaccacgcccagctaattttgtatttttagtagagacggggttcaccatgttgaccacgatagtcttgatctcttgacctcatcatcccccggcctcagcctcccaaaatgcaggtattgtagcgtgagccacagcccccggcctggaatagcytgccttataacaagactggacttcctcaggggacacagagcagagtccccgccctcgggagctcataaccgatcccccacgctcgccctcgcggccacactttgaaagccctcccctaccggctctacactcaaacagcccgaggcttcgggcagcctcgagttcggattccacttctcagccttctggggtcactgaaaccctcagaactccgaggacaagtcggacacgccttcgcctcagccatcttcgccagcgcaataagtctctgtgtcttcacactcctggtagagggaaaactaaaacctccgggagccagcgtccggcggtgcctgcaatctaaccgggatttggggttccgagccacttttcccacaagccaccgcggtcatggagctttaggcttaaactacatttcccagagggcaacgggaacacccaatctatggcttcccttccgttttcgcgtggttcttttgcaagctgcttgcggctga

SEQ ID NO: 7990 - DNA, 410 bp, Homo sapiens
agggatgcattttgaatatttattgtccttgtttttaacataatttgcaaatttacataattataatggctgtgtttgacaactggcttgcaacaaaattcttgaaaattgaataattggcccacctgggctgggatgagccagctggatcacaccgttgccccctcagcctctaggaggcctcaggattatggcgtccatcttatgatattggccaaaaggagacagtcttggaggtgctgcttactgttgaacttccttttggaatgtatgggagaaggcagggaaaggaatctttaggcagagtgggacagacgctttttattggtctggctggcgtgcctagtggaaagctcaggcagagcttcctatcttgccctggctcccatcttccctctcctgggagttca

SEQ ID NO: 7991 - DNA, 458 bp, Homo sapiens
  SIMILAR (349)..(399): 471254mologous to Homo sapiens HT015 protein,accession number AF223466,Smith-Waterman Score=38.
  misc_feature (1)...(458): n = a,t,c or g
ttggaagacccaaggggttgggggcttttttcgggggtaccccccgcagaggggcaagaaaaacccccttcaggtcacccccttttttacctattaggttccgcaggaggaggttaaccccccccggggcttcaaaccgcagtttcccatttttttannnnnnnnnnncgggggcccccccccggcccccccnnnnnnnnnnnnnngcattttgagtatttattgtccttgtttttaacataatttgcaaatttacataattataatggctgtgtttaacaactggcttgcaacaaaattcttgaaaattgaataattggcccacctgggctgggatgagccagctggagcacaccattgccccctcagcctctaggaggcctcaggattacggcgtccatcttatgatattggccaaaaggagacagtcttggaggtgctgctgactgttgaacttc

SEQ ID NO: 7992 - DNA, 1451 bp, Homo sapiens
  SIMILAR (1420)..(1061): 501254mologous to Homo sapiens prefoldin subunit 1,accession number Y17392,Smith-Waterman Score=240.
  misc_feature (1)...(1451): n = a,t,c or g
atgatcgctcgacatcgatacgactttttttttttttttttttttttttttttcttgcattttgaatatttattgtccttgtttttaacataattttgcaaatttacataattataatggctgtgtttgacaactggcttgcaacaaaatttcttgaaaattgaataattggcccacctgggctggggatgagccagcttggatcacacccgttgccccctcagcctctaggaggcctcagggattatgggcgtccatcttatgatattgggccaaaaggagacaggtcttgggagggtgctgctttactgttgaactttccttttggaattgtatggggagaagggcaggggaaagggaatctttagggcagactgccattccagggggactgcctattctgtttcactgaggattcagcttgtggaaccatctgttctttccttcccccttcctgtctactggcatggcagggcccgggaaggctgagcgtttagtcaaaagggtacagggaaggggaaaagaggaagaggggcaaggccattccccccaagaaaggaagggctctgatgcagaggggagcaggagctgaggtggaggacggccactgcctctctcaccctctggtccaatccctctgctcaagaaaaaccaggcttagcagagtgggaacaaacgctttttattggtctggctggcgttgccttaatgggaaaaactcaaggcaagagcttccctatcttgcccctggctccccatcttcccctctccctgggagttccatcacacatcccgagagggaagcgtgtccctgggcaagaggtggcaggcaaaakchgggtaaaaacttccaagggctgggaagcaaattggggctcaggggtgatgcagaaaatgtgatgttgccaggccatcccaaaaattaaagccatcccatccggggcagaaggaagaagcctgtttcccctgcagacactcctctgccccccaaccagggaatgggaggggcaagaagaagaagcttccccagaggaggcttcccctaacttgggcccttcggtgccatcagcattttccccggatggttgtccctcagctttccctttaaacttcggctccagggtaggactttttctgttcctagttcttttaaatttttccttctgctattttctgcttctctaacagctgacctgtgaattgcttccttggactgaagaataaacattcttcctacaccttcatacatgttagtctcatctaccaaagtcatgatctctgtatctgtaagatgtgcatgctttttcggttctgtttagctgttcaatctgtatgtctgcgagcttcaccttctgttgagtgtcaataactttggcttgaaagctctgtgaagggccttcttcagctctagatccncgggaagtccaccaaactggaaanaggtctccaat

SEQ ID NO: 7993 - DNA, 1563 bp, Homo sapiens
  SIMILAR (811)..(1185): 881254mologous to Homo sapiens unnamed protein product,accession number AK001114,Smith-Waterman Score=606.
tttcgtcgccggtgctgttgtagttggagtctgttcacgggcctgagcttcgaggccaggctcccgggtgtcgttaatgttcggggccgccgggcgccaacccgatcggagctccagcagcccgggaaccagctggccatttccagtagaacccatggaggagctggttcatgaccttgtctcagcattggaaagagagctccagagcaagcctcgaggtggatttgctgaaccaggagacccattctccgaagtatatcttgccctctgaaacgcccagcaaggaaaaggagagggagaaaacggaggttcgtataatgtgcatcacccgtgggaggactggtcactggcttaaagtgaaggctctgattctagttttagaagaacaaagtcaaaaaaaagaaagttgaaaataatcagacaaggaccaaaaatccaagatgaaggagtagttttagaaagtgaggaaacgaaccagaccaataaggacaaaatggaatgtgaagagcaaaaagtctcagatgagctcatgagtgaaagtgattccagcagtctcagcagcactgatgctggattgtttaccaatgatgagggaagacaaggtgatgatgaacagagtgactggttctacgaaaaggaatcaggtggagcatgtggtatcactggagttgtgccctggtgggaaaaggaagatcctactgagctagacaaaaatgtaccagatcctgtctttgaaagtatcttaactggttcttttccccttatgtcacacccaagcagaagaggttttccaactaagactcagtcggccttcatggaatgtcttcaaagaatattaaaaaatctggagggactccaacttcaatggtacccattcctggcccagtgggtaacaagagaatggttcatttttccccggattctcatcaccatgaccattggtttagccctggggctaggacagagcatgaccagcatcagcttctgagagataatcgagctgaaagaggacacaagaaaaattgttctgtgagaacagccagcaggcaaacaagcatgcatttaggatccttatgcacgggagatatcaaacggagaagaaaagctgcacctttgcctggacctactactgcagattatttctcccccattcccaagccagttatagtaaaagaatgtggaagtttagctgatcatgaaaagctcagagatgcacaggaacaagggggagcggcaccccagggctactacttaaaatgtcaggtgtggaaagtaatgagtctctgcttagtaggaatcaagcagaaagagtcttcatggtccacttatcaggtcctctttttaaaaaccaacgtgaaaagtaatgcagcaaaagcctatgtggtattaaaaccaggaacaaacagcctcgacatcaacaagacacgactacgactgaatacagaagttctcaagctcatagatagtgatagtgatgcttctaggcagcttctcagttcatttccaccttttgctgaagaactcactcaaatagtgagaatggttgagaagcgtattggttga

SEQ ID NO: 7994 - DNA, 1024 bp, Homo sapiens
  SIMILAR (178)..(702): 431254mologous to Homo sapiens Human V201 protein sequence,accession number Y22213,Smith-Waterman Score=216.
tcctaactcgcccggtggactagcgccctggaacaatacatttgggtcgtggagtgcgagcacggccggccaatcgccgacgtcagagggccaggaggggcgcggccatttcgccgccaggcccctgctccgtggctggttttctccgcgggcgcctcgggcggaacctggagataatgggcagcacctgggggagccctggctcgggtgcggctcgctctttgcctgacgggcttagtgctctcgctctacgcgctgcacgtgaaggcggcgcgcgcccggggaccgggaattaccgcgcgctcctgcaacgtgggcaccgccaatcaagcttgttccgcgcgtcttctcctccaaggtggggcaaggggtttcgggcttggtggaagcaatgtgcttgggacaggacagcatcctcaatcaatccaacaagcataattcggttgcatcttctaacacaattacagttattggttaaggttgcctgcggaaaacgctgggcctctggtcctgattgctgctgaaactcccctggtgtctcttcgctggttctgtcttacctgggcctgggatcctgttctttcgtgctcctatgaatttctgcaattgtttgtatcacccaccctatgcttatcaacggtgagcctgatgtggctcaagtttccgggaaggtcccaagaacccccagggcaaggcttaagaggcactgagccctcaaccccaagcccaggctgaacctcatcgtgctttgcctttggaatgtgaaccttgcctaaagggggggcatatcttgggtccctagaaggccctaaaatgtggggcttctagattaccccctcctcctgccatacccgcacatgacgaatggaccaaatgtgccaccacgctcgctctttttttacacccaagtgcctctgactctgtccccagttgcgtggtctccaaagctcttttccattgcccagggagggaaggtttttggccattaaagtttcttagatcaagcaaaaaaataaaaaaaaaa

SEQ ID NO: 7995 - DNA, 433 bp, Homo sapiens
  SIMILAR (141)..(275): 421254mologous to Homo sapiens Human secreted protein encoded by gene 160 clone HCELB21,accession number W74887,Smith-Waterman Score=73.
agcctgtgtgcgatgcccttggtgctttagtgcaagaagcctaggctcagaagcacagcagcgccatctttccgtttcaggggttgtgatgaaggccaaggaaaaacatttatctttactattttacctacgtataaagttttagttcattgggtgtgcgaaacaccctttttatcacttttaaatttgcactttattttttttcttccatgcttgttctctggacatttggggatgtgagtgttagagctggtgagagaggagtcaggcggccttccctgcctgatcaccgctttccaatttgcccttcagagaacttaagtcaaggagagttgaaattcacaggccagggcacatcttttatttatttcattatgttggccaacagaacttgattgtaaataataataaagaaatctgttatatacttttc

SEQ ID NO: 7996 - DNA, 371 bp, Homo sapiens
  SIMILAR (140)..(3): 971254mologous to Homo sapiens Human normal bladder tissue EST encoded protein 20,accession number Y60348,Smith-Waterman Score =258.
ccatggcccttttgccaagcctgtgtgcgatgcccttggtgctttagtgcaagaagcctaggctcagaagcacagcagcgccatctttccgtttcaggggttgtgatgaaggccaaggaaaaacatttatctttactattttacctacgtataaagttttagttcattgggtgtgcgaaacaccctttttatcacttttaaatttgcactttattttttttcttccaatttgcccttcagagaacttaagtcaaggagagttgaaattcacaggccagggcacatcttttatttatttcattatgttggccaacagaacttgattgtaaataataataaagaaatctgttatatacttttcaaacctcgaa

SEQ ID NO: 7997 - DNA, 2398 bp, Homo sapiens
  SIMILAR (114)..(965): 381254mologous to Dictyostelium discoideum TipD,accession number AF019236,Smith-Waterman Score=497.
ccgagtctccccttttgggacatcattcttcttctgatgctgccaggagacgctctgtctcttccttcccagtcccccaggacaatgtggatgctcatcctggttctggtaaagaagtgagggtaccagctactgccttgtgtgtcttcgatgcacatgatggggaagtcaacgctgtgcagttcagtccaggttcccggttactggccactggaggcatggaccgcagggttaagctttgggaagtatttggagaaaaatgtgagttcaagggttccctatctggcagtaatgcaggaattacaagcattgaatttgatagtgctggatcttacctcttagcagcttcaaatgattttgcaagccgaatctggactgtggatgattatcgattacggcacacactcacgggacacagtgggaaagtgctgtctgctaagttcctgctggacaatgcgcggattgtctcaggaagtcacgaccggactctcaaactctgggatctacgcagcaaagtctgcataaagacagtgtttgcaggatccagttgcaatgatattgtctgcacagagcaatgtgtaatgagtggacattttgacaagaaaattcgtttctgggacattcgatcagagagcatagttcgagagatggagctgttgggaaagattactgccctggacttaaacccagaaaggactgagctcctgagctgctcccgtgatgacttgctaaaagttattgatctccgaacaaatgctatcaagcagacattcagtgcacctgggttcaagtgcggctctgactggaccagagttgtcttcagccctgatggcagttaccgtggcggcaggctcctgctgaagggctctcctgtatatctgggagtgtgctcacagggaaagtggaaaaggttctttcaaaagcagcacagctcatcccatcaatgcgggtggccgtggtcgccctcctgggctcgcacggtttgtcagtgtggacaaaggatgcaaagctgtgctgtggggcacagtactgacggggctctcagggctgggaggaccccagtgccctcctcacgaagaagcacatgggctcctgcagccctggtcctggcaggtgaatgtgctggggtatagcatggacctcccagagaagctcaaagctaatgttgggcactgtaagctttgcccgtgaatggggattttcttgaaagatttgactgaggtctctcttgggcctggaaagaattaacacctgaaaaaaaacctgaacgctgcgggtcacttagcagaggctcaggtttctttgcctttgggaaaacactactagctctgagccttccataacctcacttgggggagcacagggccccgctgggcctccctcaccaacggcagtgccaaaatcaagcccccacatcaaggtggtgttctctgtgctttctctcgtccttccaaaagtcggttctggcctaacgcatgtcccaacaccttgggttcatttgcccggtgaactcactttaagcattggattaacggaaactcccgaactacagacccctccctgggtgggttgcatgaatgtgtcttcattacttgcttgaaatgtcctcacatctcttccactgttcttcagagctttctggctctcatttcccccacaaaattccgacacatttaaaaatctccggtgtggctttaaaaaatggttttttgtttttttgtttttttgaggtggggagaggatgtgtggaaaattttttccaggggaaatgggttccgctgcagaggtaaggaatgtgttcccgtatcgatctgcagacacccagaaagtgggtgcaacactgcatgcttgggggtgccaagggattcgagacctccaacatacttgtctgaaggtggtgattctggccatggcccctctgccaagcctgtgtgcgatgcccttggtgctttagtgcaagaagcctaggctcagaagcacagcagcgccatctttccgtttcaggggttgtgatgaaggccaaggaaaaacatttatctttactattttacctacgtataaagttttagttcattgggtgtgcgaaacacccttttttatcacttttaaatttgcactttatttttttttcttccatgcttgttctctggacatttggggatgtgagtgttagagctggtgagagaggagtcaggcggccttcccaccgatggtcctggcctccacctgccctctcttccctgcctgatcaccgctttccaatttgcccttcagagaacttaagtcaaggagagttgaaattcacaggccagggcacatcttttatttatttcattatgttggccaacagaacttgattgtaaataataataaagaaatctgttatatacttttcaaa

SEQ ID NO: 7998 - DNA, 924 bp, Homo sapiens
  SIMILAR (119)..(187): 651254mologous to Homo sapiens Human secreted protein, SEQ ID NO: 7645,accession number G03564,Smith-Waterman Score=107.
attttacctctgactggagcagtaactatctcttgctgaatcctattgacgacacccaggatgtgctcaccgggccctggccttacccggtggctgcccggcgggaaagctctgactttcaaaaagtaacagatgctggtgaggttgcgaagaaaagggaacacttatacactgttggtgggagtgtaattcaacccattgttgaaggcaatatgacgattcctcaaagagctaaaagtagaactaccattagacccagcaatcccatcactgggtttatcaaagattgggacaggaaagaaggtatggcaaaggctgcctaattgtcccacaatctctcttttctcctttttccacaagaatagacatactggcacttacagacgacgtttcttagactcacttgcagttagatgtccgtgcaaccctgcaacttttgggagcaaaagtgatgtgtgcaatttttgggtcatgccttcaactggaaagaaatgtgcccttccctctcatcccctctttcctaatggcttaaatgcagacgtggtgtgcctgagtgacagtgagaacctgtctcaaaagattctcctcattctagaagtttctgattctgtaatcttaggtaaactctcacataagaacatcatccagcatgactgcatagaagagccccttactttgcttcgtaatacacaacagttcagattcttgtgcattgcttgccacggctgtacatctcagtattccactttcctggtcaaagccagctggacaaggagccagggcttgatccaaagacagccttctgcaggcagtggttacccagaaaagctgttctctgagggtgctggtgatgaaggtgttgatctcctcccactactggcaaaaccagcgagccctgatgagcaactgagacatagtctttaa

SEQ ID NO: 7999 - DNA, 494 bp, Homo sapiens
  SIMILAR (494)..(150): 1001254mologous to Homo sapiens HTRM clone 921803 protein sequence,accession number Y73373,Smith-Waterman Score=623.
ttttttaaaaaaacaggacccagtttactactgaagctgcagcgaggttacagaggcgtcttggggctcagtccctgagctccgggacgcccaactgggagtgggcctccactctcctacgtacagacacccccatagggaaacgctcacatgctgtcctgctgggacgctgcaggcctggccgttctgtggccgcatccgcgtccgggtccctgtgtcctggctgggcgagccggggagggggctgattcctgggagcggttcagcagcgagttctgaatgtcttccaggacttcacggaagagctcctctcgggacttcatgccgtccaggtagaccacttccacaccgttggcctccatctcctgcctatacttctggtacatgggccacacgtggccatcgaagaggccggggggatcagggactgtgtagttgcgggtacttctcctccacttgcactcttcatacgggacggtcaggaagtaccggcg

SEQ ID NO: 8000 - DNA, 984 bp, Homo sapiens
  SIMILAR (631)..(972): 441254mologous to Homo sapiens HTRM clone 921803 protein sequence,accession number Y73373,Smith-Waterman Score=164.
atggtcctccacgtcctcctgcctgacgtggacatggcggccgcccggagaatacggccggcgccgccgcgctggccaccgccgccgctccagaagccccgcgcccctgccgccgcgacgcgcctgcgccgacgtcacgcacccgccagtgcccacccccgggaaacgaaccccgccgcctattggcggtgcgcccgccgctcgtgccgcacctcgacgtcccgcccccagctgcttttcggcacccacacccggatgcagcctcaccactggctgaacactcgcatccctgatttcattggctgcagtcgacgctggtcaagcggacggaaaaaggccgacttccggtcccttcatcgccccgcccgcctctcctctgaccaggtgctgaagctgcgagaacgcgggccccagccggagtttgtgctgcccaggtctgaagagaagccagaggtgcaccagtggaaaacaggtctgctctggtctcagaagatcaggaaacaagctccagcccctgcacagatcaagctgatgccacgtggcccaagttccaacctaagtcacgttgctgccgagaccataaaggcgccaggttttctcaatgaagccgggacgcactccggagcgcctgcgtggtcgcaccctacccgggctgccttggaagtcgtccccgccgccctccgcaccggcatgaagctcatcgtgggcatcggagggcccctggtggacttgtacagccgccggtacttcctgaccgtcccgatgaagagtgcaagtggaggagaaggtgcacttggtgtctggggtacccgcaactacacagtccctgatcccccggcctcttcgatggccacgtgtggcccatgtaccagaagtatagcaggagatggaggccaacggtgtggaagtggtctacctggacggatgaagtcccgagaggagctcttccgtgaagtcctggaagacattcagactcgctgctga

SEQ ID NO: 8001 - DNA, 965 bp, Homo sapiens
  SIMILAR (177)..(497): 991254mologous to Homo sapiens HTRM clone 921803 protein sequence,accession number Y73373,Smith-Waterman Score=554.
cgcctccgccccatccccaggggccgcctcccccggggcggcctccaggctgctgacgacctataaaggccgccaggttttctcaatgaagccgggacgcactccggagcgcactgcgtggtcgcaccctacccgggctgccttggaagtcgtccccgccgcccctccgcaccggcatgaagctcatcgggggcatcggaggcatgaccaacggcggcaagaccacgctgaccaacagcctgctcagagccctgcccaactgctgcgtgatccatcaggatgacttcttcaagccccaagaccaaatagcagttggggaagacggcttcaaacagtgggacgtgctggagtctctggacatggaggccatgctggacaccgtgcaggcctggctgagcagcccgcagaagtttgcccgtgcccacggggtcagcgtccagccagaggcctcggacacccacatcctcctcctggaaggcttcctgctctacagctacaatacccgcaactacacagtccctgatccccccggcctcttcgatggccacgtgtggcccatgtaccagaagtataggcaggagatggaggccaacggtgtggaagtggtctacctggacggcatgaagtcccgagaggagctcttccgtgaagtcctggaagacattcagaactcgctgctgaaccgctcccaagaatcagcccccttccccgctcgcccagccaggacacagggcacccggacgtggatgcggccacagaacggccaggactgcagcgtcccagcaggacagcatgtgagcgtttccctatgggggtgtctgtacgtaggagagtggaggccccactcccagttgggcgtcccggagctcagggactgagccccaagacgcctctgtaacctcgctgcagcttcagtagtaaactgggtcctgtttttttaactgttggtgtctaccgtgttctgt

SEQ ID NO: 8002 - DNA, 4785 bp, Homo sapiens
  SIMILAR (3199)..(3131): 691254mologous to Homo sapiens Human secreted protein, SEQ ID NO: 7870,accession number G03789,Smith-Waterman Score=78.
  misc_feature (1)...(4785): n = a,t,c or g
cgagcttgctgtggtttttgctctgggtcctctgggatggcgcctggctgtggccgcgtggtctctcacgcaggggcgccgggcgggggaacgcggccaccctgagtctggtgagtcgactgcggcggcctgtgtccgaagtgtccggggccgtgaaacaagggccaagcgccctggcctcaggcccgcgtttcccacgtttggaaaacggggagcttcgttcgaattttgtttacatcatcgaactatgccagggagttctccagataagcctggttttattttccgtcagtgaaaaaggccttaaccgtataaactgacttnatgnatttnatgcttgccctgcccccgtataaaataacttaaaaagcagcgtgcccggttacagctgtttcccacgtgcggtgctcgtcgggagtgatcaccctaccctacaggtggaaagattggatgcctgaagtgtagactgctgctagctgaataccatctggggaagcataaaggtgaccctgaaggatgtccttggtgaggattttggaaaatttgatcttcacaagagttgcctgggatcatttgaaatttctgggagtctgaggagtactgacataattacctgctgggagtctgtaaatacacatttaaggacagtgaggatgtgaataaatatattaatgcactttggcatttgtattttaagtgattaactgccagaaacagctatttctaaaaagttataagggaggaggggttcttttttgatcagtattcactgctgtcaccataattaatagccttaaaatagcttgtgtttggcccaaagagaaatgtactttcttccagtgactcaaaaatcgtggctagaactagactgatttctagtgacaggtgtgctttactgcactcaatgcgtatttttcctccaactaaattgtacatttaatgttgccatatcttctgcctttgctttgcaggaagcgacaaataatgtatagaggtattcaaaaaatttattgaaagcactgtactaggagctgagaacacgatgatgagcacaacacagttcttccctttggaaacatagataagtggagggaatgtcatcaaaaatgtaaaacttcactatgagatgagttccgtgataggattttcttagggaaacctgagaaagagttgagactaaaggtatgtgtcatatttttcacaaaggcaaactgggggaatgagatatacagaggcttgggctagaaaaaagataccgttagtccacttacttttgagacagttttgggctgctttccctcttcagtgccctgttttaggaactgagtccttactgagggcttgtaagatgggctattatgggaggtgagagtgttacaaaatgaggctgaagaggtaggtaaagaagccagaccacttcaggctccctctggctttattaaagcaagataaatccatggtggaaaatcagatttgcaagaaaaggtagttgaactaggttgcttattgttgtctagacaagagaccagcttggactagtaaaattagtgaaataagatcgtttatagttggatgacagagccaactagacgtggtaatagtggaggtgtccataactgctaggtgtccagcttgcacactgatgagcataatgaccctagattcagctggggagcagcatttaaacagctgaatttttaaattacctttgagaaacccacactggtctttttgcagtagcacattactcagtagtctagactacagaaataaaccttaaggccatgggtataaatgagatctgctggtggtagaggaagagggcctagggtctgaagtttgagaaactccactaattaatggcaaggtaaagcatgataagccagaaaggatggtcagtggtaggagcaaaataggattatattaaagaagcaaaagaatgtcctaaaaattctccctgggattaagtaacacagtgattgatattagtggagtagagggaaagatccatgttagagatagcttaagatagggattagatgaattgagggcaatgactaaagatactgcttgcaagaaaactggctgagaatgagaggaaaatcttagttgcttggcgggagggggtttgtggttgtgaaagatagttttgtttaatcttagtcttaaatttaaaaccaagtagcaaggatctagctgagagaataattgaatacattaatataggaggacagacaaagatcctgaaaaggctgggagaagagcatccaaagcacaggtggagagacaaaaaggttagggctgctggcagctgtggagagaactgtacgtggtaagggggagatataagatgtcctgcataagtattttccctgtagattgcaaagtcatctatggagaggaaaggtccaaaatagtcactggggagagcaggtgaattagatggccaagcagggtggatggatcatttgaggtttggggtgacagatcaactgagatccacttacacttctgaaaacgcaagaacactttagaaattaacaacacttaaagctttttacatcatttgtaaataactggtggaacttaacaccacaaaataaagtattataaagaactttatatgaataaaaatatatgcagtctgaaagtgatgcctcagtccttttgcatctgggcactagttgagaaccagcccagccctgggaagacgtcctcccacttgtactattgcacagcaggctagctgcagttcagaattccagaatgttcatcagatgcatctggtcttggttgtggtggacacagacacaagatagaaatgaatgattgctatcctgttccagaaatgaaaatgtggtatcaagtgaatttttacaaaatacttattcttccagttaaaacaaaaaggtccttcagcacaactgtgctgtagttaaaccatggcctataatcccagcactttgggaggctgaggcaggcggatcacttgaggtcaggagttcgagaccagcctgaccaacatggcaaagccctgtctctactaaaaatacaaaaagaattagccgggtgttgtggtgcacgcctgtaatcccagctgctcggtagcctgagacaggagaatcgcttaacccagtaagtggaggctgcggtgagctgacacggtgccgctgcactccagcctgggcgacagagtgataacatctcaaaaaaaaaaaaaaaagaagcaaaagataatgtattttctcatgctgaagaaatacttgcaggtctgagatttgaattaagatacctatttcacagtttcaaaagtaccagtggcgcacacaaccttcccacccctacccttgacccttcatcaggatcaagtctctgtcttgaggcgggaagcttgtatagtttttattgtttttgctgtgtgttttccagccaggttgtttgtagatgtctgaggtttttcttccatcaggctatctttagacccatttcttctctaaaataaaatacatttgaaaaatgtagaaagattcagaagaaaacagccaaatgaagtattttaattacatcagaaaccaagctgctcttaaatttaagatactgagttaattcaaaagtttcataataccaaaagctattcaataaatgttccctctaaatagctgtgcaaaataaagtttgtatttaaactttaatatacaaagttagtctgacatttacatgcataacgattttattcatgaatattaggcataattcacccaaatcagtgtcattacttttgttaacaattcccaaaccaggctctcaacctcactcttccaaacaggatagtgatggagacttggaggcaatttataatcccctgattatattttcagtagtcaatgaatggaacaatgtcttgtgagcccctatcacttgtctcatacggagaaacagggcagctcattaccagagcctgggcaccacatccactagtttgtaaaacttaggttttacacatctcccatcatcacgggtggaggctctgagaatgacactaactcacaactactacttcttatgcgaacccctcctcctcttacttccaaggatggtctaacattgtcagtgtatcaggctggcaagcatatttccttccccaaatgtatattcccataaataatgggctataccgtcccaatctattttgagatttgtttgagctaaaaataaataaatccctcttaaaatgcagctacctttaatctgttcctatgactggcttaatttgttttactgacattcaaaaagcactgatggaataattattctgcctatcatgggaagcatgaacccatctatttgggatggaagatttctagatagccagaggtgggaagagaacaccagtgaatgtgagaggagaatatagcagaagaattaccagaaaaaaagtgctaggagaggacctgaaataagtactatgttgtaagtttgtctaggattgaatctgtccactctgcagaccttaagaaattaagttgctattcttccccattcttagcagcctttgcgtgaaaaggcaaggtgaggtgtaaggcaggtcactgccagaactctggtggcattgtggtggaaattagaacttaaagttgtaccttaaaaatgtacctttccagcttccactggtcactccagccccttctccgcttggcagccagatgagtggcttccttttagcacttggaataaaacagtaagatccaaacgcttcccacagcctttaagtccctgtgttatctg

SEQ ID NO: 8003 - DNA, 1494 bp, Homo sapiens
  SIMILAR (476)..(715): 641254mologous to Homo sapiens serine phosphatase FCP1a,accession number AF081287,Smith-Waterman Score=228.
  misc_feature (1)...(1494): n = a,t,c or g
tcctcactcggctggtgctgagccccgacgcccctgacaggccacgcacctgatcgccgcgnagctggcacagagaaggtgctgcaggccaggagtcggacacctncacgtggtcaaccctgactggctgtggagctgcctggagcgctgggacaaggtngaggagcagctcttcccgctcagggacgatcacaccaaggcacagagggagaacagccctgcnnncttnnccgaccgggagggtgtnccccccaccgccttgtnccacccgatgccggtncttcccaaggcccagcctggncccgaggttcggatctacgactccaacacggggaagctcatcaggacgggcgcccgggggcccccagcaccctccagctccctacccatccgccaggagccctcttccttcaggtggacgacatccttggagaaggcagcgacgacagcgacagcgagaagaggaggcctgaggagcaggaggaggagccccagccccggaagccagggacccgcagggntcggacgctcggggcacctgcgtccagcgagaggagcgcggcagggtccggggtccagaggccacaagaggaagctgaatgaagaggacgccgccagcgagtccagcagggagtccagnaacgagtacgagggcagcagctccgaggccgacgagatggccaaggcgctggaggcggagctcaacgacctcatgtgagcgcgggcagcgggcagggactgaagcctgaccgacctccagcagcactcggacgtccccggaccagccctcagtctcggtccacgctgctttcttcccaaagcacatgtatatttgcagagctccacatacagaaacacattattttgcagaaataggtgtttttaagaagttttactacaggaatgtctacttttgtaagtgacaggtgttaaaggcccaggtgtgctgtgccaaagagctcagcagaggctcacgtggcccaggctggtgcgcccgctgtctcggtaagggctgggttggtgtgttttccccttgtgtaccagagcacattccttaggggacggctttgggggtcccactagacatggactaggagtttaagcaggacagtgtgcgtgcacgagctccgagcccagcacagacatggactaggagtttaagcaggacagtgtgcgtgcacgagctccgagcccagcacagacatgcctggaacccccgccgcctgctgctccctcctagggaacccatttccggggaacgccgtgactgtcgggcagcctggagcttcctgcagcctcctacgcagggtccacgccacgtggcctgggctgccatcctgccgtcctcccactggcatcctggcaagggggcgttgcttttcctgggcggccttttatgtcttggagacacctgatgtaaagtttctgtaaatctatttcatatctgacccaccaaacagatttctctttaataaaaatcctttttgtaaaaaa

SEQ ID NO: 8004 - DNA, 471 bp, Homo sapiens
  SIMILAR (358)..(468): 1001254mologous to Homo sapiens RNA polymerase II CTD phosphatase,accession number AF154115,Smith-Waterman Score=175.
  misc_feature (1)...(471): n = a,t,c or g
atgggnaaaaaacgcctcctccgtcagcccagcagaagccttggaccacaagtggcatccgaaagaaaagaagctccaagagtcacatctggcaaaactgtcctccctggagcccagggcagccacccgcattcccgggatgatgttggacgtgcacatgtttctgcaggggctgctgggccccactttatggacctggacgttactgtgagtcaaagaggaagatgcattcacagcaggtctgtggctcgagaaggtttgcaccttggtaaaatgttaaaggaacagcagcaaacggtgactgagggtgaagaggcgaagctgcaccagcagtggaggtcacgggcgagggtgccagaggacgccgccagcgagtccagcagggagtccagcaacgaggatgagggcagcagctccgaggccgacgagatggccaaggcgctggaggcggagctcaacgacctcatgtga

SEQ ID NO: 8005 - DNA, 3599 bp, Homo sapiens
  SIMILAR (1)..(2769): 971254mologous to Homo sapiens RNA polymerase II CTD phosphatase,accession number AF154115,Smith-Waterman Score=4737.
atggaggtgccggccgcgggtcgcgttcctgccgagggcgccccgacggcggctgtggccgaggtgcgctgcccggggcccgcgccgctgcgcctgctggagtggagggtggcggcgggcgcggccgtgcgcatcggctcggtgctggccgtgttcgaggccgccgcctccgcgcagtccgccggggcctctcagtcccgtgtagcctccgggggctgcgtgcgccccgcgcggccggaacgcaggctgaggtcggagcgcgcgggcgtggtgcgggagctgtgcgcgcagccgggccaggtggtcgccccaggagcggttctggtgaggttggaaggatgcagccacccggttgtcatgaaaggcctgtgtgctgaatgtggccaagacctcacccagttgcagagtaagaacgggaagcagcaggtgccgctgtccacggcgaccgtgtccatggtgcacagcgtgccggagttgatggtgagctccgagcaagctgaacagctgggaagagaagaccagcagcgactgcaccgaaaccggaagctggtgctcatggtggacttggaccagacgttgattcacacaaccgagcagcactgtcagcagatgtcgaataaaggcatctttcacttccagctgggccggggtgagcccatgctgcacacgcgcctgcgtccacactgcaaggacttcctggagaagatcgccaagctgtacgagctgcacgtcttcaccttcggcagccggctgtacgcacacaccatcgcaggctttttagaccccgagaagaagcttttttctcaccgaatattatcaagggatgaatgtattgacccattttctaaaacgggaaaccttagaaatctctttccttgtggagactccatggtttgcattattgatgatcgaaaagatgtctggaagtttgcccccaatctgataactgtgaagaaatatgtatacttccagggcacgggtgatatgaatgcgccccctgggtcccgagaatctcagacgagaaagaaagtaaatcattctcgaggcactgaggtctcagagccatctccgcccgtgagagaccctgagggggtaacgcaggcccctggagtggagcccagcaatggcctggagaagcctgcacgggagctgaacggcagcgaggccgccaccccgcgggactcaccccgccccgggaagccagacgagagggacatctggccccctgcccaggcccccaccagcagccaagagctggcaggcgctcctgagccccagggatcctgtgcgcagggtggccgggtggcaccgggacagcggcctgcccagggtgccacgggcactgacctggactttgacttatccagcgacagcgagagcagcagtgagtccgagggcacgaagtcctcctcctccgcctctgatggcgaaagcgaggggaaaagaggccggcagaagccgaaggctgccccagagggagccggggcgctggcacagggcagttccctggagccggggcggcctgcagcaccgagtctccccggagaggccgagcctggcgcgcatgccccggacaaggagcctgagctgggtgggcaggaggagggcgagcgggatggcctctgcggcctgggcaacggctgtgccgacaggaaggaggcggagaccgagtcacagaacagcgagctgtcgggggtcactgcgggtgagtccctggaccagagcatggaggaggaggaggaggaggacacggatgaggatgaccacctcatctacctggaggagatcctggtccgtgtacacactgactactatgccaagtatgaccgctacctcaacaaggagatcgaggaggcgccggacatccgcaagatcgtgccggagctcaagagcaaggtgctggcagacgtggccataattttcagtgggctacacccgacaaacttcccgatagagaagacgcgggagcattaccacgccacggcgctgggagcgaagatcctcactcggctggtgctgagccccgacgcccctgacagggccacgcacctgatcgccgcgcgagctggcacagagaaggtgctgcaggcacaggagtgcggacacctgcacgtggtcaaccctgactggctgtggagctgcctggagcgctgggacaaggtggaggagcagctcttcccgctcagggacgatcacaccaaggcacagagggagaacagccctgcggcctttcccgaccgggagggtgtgccccccaccgccttgttccacccgatgccggttcttcccaaggcccagcctggccccgaggttcggatctacgactccaacacggggaagctcatcaggacgggcgcccgggggcccccagcaccctccagctccctacccatccgccaggagccctcttccttcagagcggttccgccaccccagccgcagatgtttggtgaagagctgcctgacgctcaggacggagagcagcctggcccttctagaagaaagcgacagcccagtatgtctgagacaatgccgctgtacactctttgtaaggaggatttagagagtatggacaaagaggtggacgacatccttggagaaggcagcgacgacagcgacagcgagaagaggaggcctgaggagcaggaggaggagccccagccccggaagccagggacccgcaggggagcggacgctcggggcacctgcgtccagcgagaggagcgcggcagggggccgggggcccagaggccacaagaggaagctgaatgaagaggacgccgccagcgagtccagcagggagtccagcaacgaggacgagggcagcagctccgaggccgacgagatggccaaggcgctggaggcggagctcaacgacctcatgtgagcgcgggcagcgggcagggactgaagcctgaccgacctccagcagcactcggacgtccccggaccagccctcagtctcggtccacgctgctttcttcccaaaggacatgtatatttgcagagctccacatacagaaacacattattttgcagaaataggtgtttttaagaagttttactacaggaatgtctacttttgtaagtgacaggtgttaaaggcccaggtgtgctgtgccaaagagctcagcagaggctcacgtggcccagggttggtgcgcccgctgtcttcggtaaggggcgggttggtgtgttttccccttgtgtaccagagcacattccttaggggacggctttccccctcccacgagacatggactaggagtttaagcaggacagtgtgcgtgcacgagctccgagcccagcacagacatgcctggaacccccgccgcctgctgctccctcctagggaacccatttccggggaacgccgtgactgtcgggcagcctggagcttcctgcagcctcctacgcagggtcacgccacgtggcctgggctgccatcctgccgtcctcccactggcatcctggcaagggggcgttgcttttcctgggcggccttttatgtcttggagacacctgatgtaaagtttctgtaaatctatttcatatctgacccaccaaacagatttctctttaataaaaatcctttttgt

SEQ ID NO: 8006 - DNA, 680 bp, Homo sapiens
  SIMILAR (2)..(679): 931254mologous to Homo sapiens bK65A6.2 (novel Sushi domain (SCR repeat) containing protein similar to Mucins),accession number Z92546,Smith-Waterman Score=1083.
ggaggcagccctgaccgacttaagggttcaggcgcggtcccagcccgggacgatgtccatcggcacggagaaccgtggctctgggctgtccgcagtggccgtccaggaggtcatctcagatgtggtggaagtcaggctggccaacaggcccggaggtctggaggtgctgctgaaccaggaggtgctgagcttcaccgagcagagctggatggacctgaaaggaatgttcctgtcggtggctgccggggacagggtctgcatcatgctggcatcatgggccgttctgtttgtcagtttgcttggcccgttcctgagtgtgtccgtcctgctgcctgagaagttcctcacccacacccacggcctcctcgggacactcaacaacgaccccaccgacgacttcaccctgcacagcgggcgcgtcctgcccccaggcaccagtccccaggagctgttcctgtttggggccaactggaccgtgcacaatgcgtcctccctgctcacctacgattcctggttcctggtccacaacttcctgtaccaacccaagcacgaccccaccttcgagcccctcttccccagtgagaccaccctcaaccccagcctggcacaagaggcagccaaactatgtggggacgatcatttctgcaactttgatgtggcagccactgggagcctgagca

SEQ ID NO: 8007 - DNA, 3174 bp, Homo sapiens
  SIMILAR (71)..(1645): 631254mologous to Homo sapiens bK65A6.2 (novel Sushi domain (SCR repeat) containing protein similar to Mucins),accession number Z92546,Smith-Waterman Score=1612.
agggagtgagcttgtctggccgcctcgcctcggagccactgcactgctggctgcagacacaggctgcaccatgaaggacaggccctgcacatggggcagccagtccagtacccgccgggccaggccctcagcatcctctcctccagatgcccaagagagctgctccatgcgctgtggcgccctggacgggccatgttcctgccacccgacgtgctctggccttggcacctgctgcttggatttccgggacttctgcctggagatattgccctactcaggatccatgatgggggcccagaccatcgagaggctcagcctgcaatgacccagcccctcccaccaccaccacgcccacaggtttaaggacagcatccagaccctcggccatgtggactcctccgggcaagtgcactgtgtgtcacctctgctctatgagagcgaagcctcagggcctcctccctgcttccctgggcccaggccctcactcacccctcacctcccctgcccagtgcaccccaacaaagtgtcaatgatggagaagagcgagttggtgaacgagacgcgttggcaatactacggcaccgccaacacctcaggcaacctcagcctgtaggtggcaaggcctggggccaggcctcgaaggaaccccagggctaaccaggcatcctctccctcaggaatgccctactcacaggagtggactgcaaagtggtcgtacctgtaccccctggccacacacatccccaactccggctctttcactttcaccccaaaacctgctcggggtggggagagtggggcgaccatggggtggtgtgggctggcccagctccagcatcatcacctccacagggacgtgcaggcgctctggaccaacgaccacgcactggcctggcacctgagcgatgacttccgagaggaccctgtggcctgggcacgaactcagtgccaggcctgggaggagctggaggatcagctgcccaacagggttggcctcagggaggggatgacagaacccgaggccactgggtgacagccacctgctgctctgcagacggactacggctgtgccggtatggggattggggtcaggggtgggctcccaacagtggcctggccctgactcactggctcctgcagcctccggtacggctcaggtcagcagtgctgctacacagcggacgggacgcagctcctgacagctgactccagcggcggcagcactcccgaccgcggccatgactggggcgcacccccgttccgcacgccaccccgagtgcccagcatgtcccactggctctacgatgtcctcagcttctattactgctgcctctgggcagccccagaccctgggaaagatcgggctgggctggggtgcacccccacgtgaccctccactctcaccctagcctccgccttcggagacccacactttgtgaccttcgacggcaccaacttcacattcaatgggcgcggagagtacgttggcatggggtagaaccaaggtgggaggctggagccaagtggctcccgttctgctcccaccaccgcaggcacggagacccgtggcactgggctgaccgcagtggccgtccaggagggcaactcagatgtggtggaagtcaggctggccaacaggaccggacctgaaaggtgagcagtccagccacgcgaggctgcgggctgccctcacctcctccccattcctgcagggagactgaggggaagccctgggccttcatgcctctcccagtcctggctagaggcctgggtggtccgacctcaggccttcacacccaccgaggtgcccccgtcgtacccacctggtcaaaagccgaggcatggcaggggtggcggagggtcatggtcagcagaattggccccgggaacgccctcccttcccctgcaggtgccctcacccacagcccctgggtgccgaccaccctgtcctggggctgcgggaggggacaagatgctcacagcgggtgaccctaatgcatcccccttgagcccaggaatgttcctgtcggtggctgccggggacagggtctccatcatgctggcatcaggggccggcctggaggtcagcgtgcagggcccgttcctgagtgtgtccgtcctgctgcctgagaagttcctcacccacacccacggcctcctcgggacactcaacaacgaccccaccgacgacttccatggcacgggcagggcttggggaccaaagggagccatgcccagccaggccccggtcatgtatcttccagggaccgtgcacaatgcgtcctccctgctcacctacgattcctggttcctggtccacaacttcctgtaccaacccaagcacgaccccaccttcgagcccctcttccccagtgagaccaccctcaaccccagcctggcacaagaggcagccaaactatgtggggacgatcatttctgcaactttgatgtggcagccactgggagcccccggggtggccagatgtgtgtatgcatggcagctcaggcctgttgtctgcactctgtccccatcccagtggtgtcctgtggctggctggccccacctcccaacggacaaaaggagggcaacaggtacctggcgggttccaccatctacttccactgtgacaacggctacagcctgacacctgcctgcacctgtccccactcaccaccccagagagccccctcactgacactcgctccctcaccaggacgcagctacgcggtgctgttgggcatcatctcttagcccaggaatgtccagaatctgggcacagagcccaggcctcaggccacggtggcccacctgagcagctctttgtcggcgcttcctgtggggcctggcatggaggcacagacctgacagtacaggcacagctggggagcaagggaccccttcttctgccaagctgcttccttctgcaagccccagggtggccgagtgcctgctgtgggccagacctctgctaggcccatcaggacacccctgtcctcagggtccaatgctgccaaggaggaggcgggggggtcggtgcagcgcactgtaggagtgggaagtcaaggaggcatcgtggaggagtgcggcttcccacaggcaccccttcaggctttcaccagctccctttgttgcaaggatgtgaggatgactgactttggaagtcatgccaacca

SEQ ID NO: 8008 - DNA, 2130 bp, Homo sapiens
  SIMILAR (1895)..(1113): 951254mologous to Homo sapiens prolyl 4-hydroxylase alpha (II) subunit,accession number U90441,Smith-Waterman Score=1268.
tcatcttatggcccctgtgccacaggcctccctttcttcaagtgacaagggagccagcccccacacccgtatgctggttttagcctgtgcctccatccatatgggccttgtttgcctgagacactctttcccctcactgcttccagctctccactctgctccctcagaagccttgccagagggtcctggacctatggtgcttatgcagctattcgtcctcaggccttcttcagcttcctgtgtatctctgagtgtttccaaccagctgccttggcatttaccagctgcatggacattacatggctggatggtaataacagcagaaaaaaaccccttaagacactcaccccacttgcagcccacaagcacagggcaggcagcatgtcttgttcggtagtcaccttccccgctccgcaagaggttgtaccagaacacagctgtacccttcttaggccaaattgcagcccccagatcagggaagacggtggcaccaccagcttctacatcactcatgtagtttaagaaagtagccacacgattccccgtccctaaatgcttgaaagtatctcgctcatcattcctagagaagtcgaagtgcggttcatactgtcctcccactccataatttgcaacctgtaacaattctgcagtctctactgttaaccctgtgatatgctgacatccgacgatttactcgggccacaacagggtcatcatcttcctctagccaggagcttttggaaacccggtagctggcgacagtgaggactcctgtctgggaatcacgaaacggtggctcgtgcacgtttaggttttgcgatctcctctgatcctctcgatttcctcatcagacatgacatcgtagtacctgacgatgtgcgggctgtccccactcgtcctccttctttgaaagggggcaatgagcagctgtggggccctgttgccatggtggtacctacagaaaagcctcttctgtctaacgggtgtcagtttgacaccctccccacgacagaggctctcgtaaacatccctctcaggcaggtagtccacaggcctctcatagatgccttctggggttgctagctcagcttctgtctgatttgttaacgttttttctctctcttcctccaattaacttgctcaaagtaccgcacgattccctccaggctcggttcgtggcttgggtcaagggagagcaggcggcgggtgagctccagggcacggtgcagatcacccaactggaagacagcatagctgaggtagtccagcacctgtgacttggttgtggtggcctcctccccggcatcaagctgctttagcacctgctccatccacaacaccgtatgataatagtccccttcattgtaggccgagcggcccatcccaaagcagtcatccacactcagcattgcctggtacttggttcctggaagttcccctctggaaattgtgcctgggtccagcctgtatgtgtcctgaagtctcatcagggctttggcagctcctatctcgtcctcatcagtggggaagaactgccgctgcacagagaggttggcgataaaacctgcagctgagtcctgcaggacaaggtcctccagcgcaggccagtctgtgtttagccgcttcaccagtttgtaggcattcacagggtgagccaggtagccctcagcatcagcagctgacttgctagtcaaggcttccattttgttggcccagctcttaatcttggaaagcttggcttcctccacaaggatgtactctttcagagactgcaccagctctttctctgcataaatcaggtcagtcatgtgcccaatagaggtgaagaattcggcctgcacacagctcaggacaccaaaccaggccatcagcaatgcagacacccagagtttcatggtcacagagggaagtgtcacactgctctgggccaggaccttcccgctcttccaatccgcctgtcccactgggttagcaactgcttgcggtttctggcacacagaagggtcccgtttgttgaattagttaacgaattatcacgggtctccgcagctgccaaggaaaaacaacgctggttccacaaggatgtctggacactcgcagctcccggcgtttccagaacctcccgcggcg

SEQ ID NO: 8009 - DNA, 2832 bp, Homo sapiens
  SIMILAR (214)..(789): 301254mologous to Araneus diadematus fibroin-4,accession number U47856,Smith-Waterman Score=134.
ctacagcccggcgaggggatcgggtcgtggcgacctctccagacgcccaggggctggcaggagggcgggccaaggcccgcaggtgggggcgccaaagccaggcggcgcggagtacgtgcggtgggctgcgggcggcatgaagggcgcgggcggcagctccggctccggctccggctccggctcccgcgaggccgggtagcctggcgttcccaggggtcgcagaggatggcgaaccccggcggagccaccgggctggggaccaggacgcaggcaggcgtgtggagcgtgaggtggggacgtgcggcggctcaagtgggcggagccccggcagcggccggaggcggagtcgcaagggaggaggcgccgagctgaccgggcgacgccgcgggaggttctggaacgccgggagctgcgagtgtccaggtgagcgccccgcccgctcagccgcagatcaaccttagcgctggggcgcgggctggggtcgccaggcggtgcgtctgcccgcgcggggctgagagttaggggccggggccggatccggggccggggtcgcgccgctagccgccagcagcgcagtccgggccgccaccctgcccctccgccctgtttctgcacccgtctgggttcttgtgccgccgcccgcagccttcccgagctcagggtggtgaggtcagcggcgcccttcgtgcagtccctcggctgtcgggcggggctgggaacttggccgctcttccctgtcagctcccgggaagtggcggcctgaccccgggctgccggcctcccaagggctgggagtcctaggtcttgtccgggcaggtccagcttggagcccattagatgggccattggatcagaaagtcttttctccccagacatccttgtggaaccagcgttgtttttccttggcagctgcgggacccgtgataattcgttaactaattcaacaaacgggacccttttagtcaccggtttagactggccccagctgatctcagtcatcccttgagtgccttctgcctgtttggcttctgactggagcgtgccggggctggcactctgagggccaggtgtagtggagatcctcaggcctgggtacttgtaggagccttggtccttggcctgtctaggtggtccttcagtgtcaacctcatcttctccctgagcaccttcccaggtgagcacagccatttccatcacctggcctctgttggttttccagttacgaccaacgtacctggttagatgtctgtgctttccagacaccccgtagacagaagaggcttttcgtaggtaccaccatggcaacagggccccacagctgctcattgcccccttaaagaggaggacgagtgggacagcccgcacatcgtcaggtactacgatgcatgtagaatcttttcctggtttatcatctgacttgtaaggatcccaagggagcgaaaactgtgccatctgttttgcttcttgaggctgtgggaacccagtgtgaggtggtgcagcaggaggtgtttggatgggtttcttggcagaggagcccactgaggttcggaaggaggtggaacttgactcaattgagagaagtacataaggcggaggctcaggctggtggcacagtctcttgcctctgttttatccataggttgtagggtttatctttcacatgaggagcagtttcctctcccctctgctgagagccagctctggggtctgacctggtagcccagcttctcccatccagccatgtaatgtccatgcgctggtaaatgccaaggcagctggttggaaacactcagagatacacaggagctgaagaaggcctgaggacgaatagctgcataagcaccataggtccagaccctctggcaaggcttcagaaacaaacctactagcatcttgatctcggactttccagttcccataaccatgagaaataaatgtttttaattcaatgtatggtattttattatagcagctctacctaagacagtacatgtatagtgtctatttgaacattactgataatgttgaacaacttttcatgtttattagttattaggtttcttcaagtgttcttattcatacaaattttaaaatatgtacacaagttctttgttatatattttgcaaatatcttctgtggcttgtcttttcactattttagttctgtcttttgataaacaggagcttttaatttttatgtcaaatctatcaagctttttctttttgatttatgttttttatgtcttatttgagaaatccttctataccccaagatcatgaggatgtttcctgtgttctcttctgaaagctatatagtctttgtcatttaggtttatctttatacgtggtatgaagtgtaaagttctacttttaattttttgcatattttattaggataggatgggctttttctgtagtaataatccctaaatctcaggggcttaatatataaaattgtctcatgcaaaaaaccactgggtctagggcaattgctatctactgccgtctaatctccctctagtggcttccattggtagaccctaacaggaagccagctgataagggaatctgggaaatgtagtttacagagtggcagctacagtagaacagtagagactacaaggatgagcttgcagctgagaatagaaacgtgactggcacactaggtggtttgtttgtaggttttttcttttcctgtttgagacttttttggattcttgaatttgtacaatggtatccttaatcaattgtggaaaattaaatgattttttctttcagcattgtctgtttcttctgtaactgattaaatgtaagttggatcatatcatgaaa

SEQ ID NO: 8010 - DNA, 367 bp, Homo sapiens
  SIMILAR (153)..(365): 971254mologous to Homo sapiens putative prostate cancer susceptibility protein HPC2/ELAC2,accession number AF304370,Smith- Waterman Score=376.
ggcacgaggctgagatctccagtcctgcagtggaaagattgatcagttcggtgttgcggacatgtgatttggaagaggtaaggggcacagccgcaggcatcatgggggcgaggtggggagcagagctgcagagccctccagccccaccctttcagtttcagacctgtctggtgcggcactgcaagcatgcgtttggctgtgcgctggtgcacacctctggctggaaagtggtctattccggggacaccatgccctgcgaggctctggtccggatggggaaagatgccaccctcctgatacatgaagccaccctggaagatggtttggaagaggaagcagtggataagacacacagcacaacgtccca

SEQ ID NO: 8011 - DNA, 1402 bp, Homo sapiens
  SIMILAR (17)..(1186): 761254mologous to Homo sapiens putative prostate cancer susceptibility protein HPC2/ELAC2,accession number AF304370,Smith- Waterman Score=1495.
aacgccagcttggtcgagggagattttggctgaagagctgtgtactcctccagatcctggtgctgcttttgtggtggtagaatgtccagatgaaagcttcattcaacccatctgtgagaatgccacctttcagaggtaccaaggaaaggcagatgcccccgtggccttggtggttcacatggccccagcatctgtgcttgtggacagcaggtaccagcagtggatggagaggtttgggcctgacacccagcacttggtcctgaatgagaactgtgcctcagttcacaaccttcgcagccacaagattcaaacccagctcaacctcatccacccggacatcttccccctgctcaccagtttccgctgtaagaaggagggccccaccctcagtgtgcccatggttcagggtgaatgcctcctcaagtaccagctccgttccaggagggagtgccagagggatgccattattacttgcaatcctgaggaattcatagttgaggcgctgcagcttcccaacttccagcagagcgttgcaggagtacaggaggagtgcgcaggacggcccagccccagcagagaaaagaagtcagtacccagaaatcatcttccttggaacagggtctgccatcccgatgaagattcgaaaatgtcagtgccacacttgtcaaacataagccccgacacgtctctgctactggactgtggtgagggcacatttgggcagctgtgccgtcattacggagaccaggtggacagggtcctgggcaccctggctgctgtgtttgtgtcccacctgcacgcagatcaccacacgggcttgccaagtatcttgctgcagagagaacgcgccttggcatctttgggaaagccgcttcaccctttgctggtggttgcccccaaccagctcaaagcctggctccagcagtaccacaaccagtgccaggaggtcctgcaccacatcagtatgattcctgccaaattgccttcaggaaggtggctgagatctccagtcctgcagtggaaagattgattcagttcgctgttgcgaacatgtgatttgggaagagtttcaaacctgtttggtgcggcattgcaagcatgcgtttggctgtgcgctggtgcacacctctggcttggaaagtggtctattccggggacaccatgccctgcgaggctctggtccggatggggaaagatgccacacggaagcaagcagatgaactaatttcatttcaaggcagtttttaaagaagtcatggaaacagacggcggcacctttcctctaatccagcaaaatgattccctgcacaccagagacaagcagagtaacaggatcagtgggtctaagtgtccgagacttaacgaaaatagtatttcagctgcaataaagattgagtttgca

SEQ ID NO: 8012 - DNA, 1450 bp, Homo sapiens
  SIMILAR (2)..(199): 801254mologous to Gorilla gorilla ELAC2,accession number AF308694,Smith-Waterman Score=268.
  misc_feature (1)...(1450): n = a,t,c or g
ccccaccctcagtgtgcccatggttcagggtgaatgcctcctcaagtaccagctccgtcccaggagggagtggcagagggatgccattattacttgcaatcctgaggaattcatagttgaggcgctgcagcttcccaacttccagcagtaccacaaccagtgccaggaggtcctgcaccacatcagtatgattcctgccaaatgccttcaggaaggggctgagatctccagtcctgcagtggaaagattgatcagttcgctgttggacaacatgtgatttggaagagtttcagacctgtctggtgcggcactgcaagcatgcgtttggctgtgcgctggtgcacacctctggctggaaagtggtctattccggggacaccatgccctgcgaggcttctggtccggatggggaaagatgccaccctcctgatacatgaagccaccctgggaagatggttttnggaagagggaagcagttggaaaagacacacagcacaacgtcccaaggccattcagcgtgggggatgcggatgaacgcggagtttcattatggttgaaccactttcaggccaggcgctattgccaaggtccccctcttcagccccaacttcagcgagaaagtgggagttgcctttgaccacatgaaggtctgctttggagactttccaacaatgcccaagctgattcccccactgaaagccctgtttgctggcgacatcgaggagatgggaggagcgcagggagaagcgggagctgcgggcaggtgcggggcggccctcctgttccaggggagctggcaggcggcctttggaggatggggagcctcagcagaagcgggcccacacagaggagccacaggccaagaaggtcagagcccagtgaagatctgggagaccctggaactcagaaggctgtgtgtcctttctgcccccacgcacgcacccccgtatctgcccctcccttgctgggtagaaagctgaagagcacggtcccccccaggaggcagcctcaggataggtggtatggaagctgtgccgaggccttggggtccccacataagcactagtctatagatgccctcttaggaactggtgccctggcacagctgcggcccaggaggctgcccacacggaagcaagccagatgaactaatttcatttccaaggcagtttttaaagaaagtcatggaaacagacggcggcacctttcctctaatccagcaaaatgattccctgcacaccagagacaagcagaggtaacaggatcaagtgggtctaaagtgtccgagacttaacgaaaatagtatttcagtctgcaataaagattgagtttgcaaaaatacaaaggacaaggggggccgctttaaaggaatccccgaggggcccagacttccgcctgtatgcaagggcatacttgtctccgtaaagggatgcttattaaatcctacctt

SEQ ID NO: 8013 - DNA, 699 bp, Homo sapiens
  SIMILAR (138)..(476): 411254mologous to cercopithicine herpesvirus 15 latent nuclear antigen EBNA-3B,accession number AF159309,Smith-Waterman Score=116.
tcacctgggagctgggagacacggctctgggtatggagcttttacaggagctgcaaacacagcctgtgcccctgtttggttggggaattccttgttttcaattccccgatgcagagtggttctgctggggaaccaccgcgcctgcagttcgtgcacctcttcccggagctgcgccagggaattacagacgaactggaaggggccgagaagggccttggccaccacctttagctccaagccttttcgctttttcagatttgggatcctccccggggaggacctcctggcgccccccggcagtttcccgccgcctagggccgacttttccacctcccgctcccgggcgggggaggccccgcagggccgcttagacgggcccgagcgcacagctccacgcagcctctccacactctccccagcgcctgcagcacccgcagtgcgcacagctccgccagtagcttccccgcgcgccgcccctgcaccgcttcgggccataaccttgctggcgactaagtctgaagaacttcccgtggtttcattcttttcttcgcgtttagtcttagctaagaggccaaagcggctggcacagatgcactggggccactgacattttccatgtcctctgtcacgggccacatgctggagcccacaccgcttcactttccatctgtttgatgatggatcaaattgaactcccat

SEQ ID NO: 8014 - DNA, 435 bp, Homo sapiens
  SIMILAR (36)..(296): 401254mologous to Bos taurus N-WASP,accession number D67066,Smith-Waterman Score=104.
caattcctcgacgccgagagtggttctgctggagaaccgccgcgcctgcagttcctgcaccttttcccggaggtgcgccagggaattacggacgaactggaaggggccgagaagaaaggtcttggccaccacctctagctccaagccttttcgctctttcagactttggatcctccccggggaggacctccaggcgccccttggcagtttcccgccgcctaggaccgacttttccacctcctcctctacctccggctcccgggcgagggaggccccgcgccgccccttagactggctgcggccggaagattgcagccgctttgagcttactccttgttttctcataatcaaggagtatggtggagctgggtcaatttcaggcacagcccagccgagtcaggcgaggtccagagagacctgcgcacgcgtgggtcg

SEQ ID NO: 8015 - DNA, 565 bp, Homo sapiens
  SIMILAR (138)..(476): 411254mologous to cercopithicine herpesvirus 15 latent nuclear antigen EBNA-3B,accession number AF159309,Smith-Waterman Score=116.
tcacctgggagctgggagacacggctctgggtatggagcttttacaggagctgcaaacacagcctgtgcccctgtttggttggggaattccttgttttcaattccccgatgcagagtggttctgctggggaaccaccgcgcctgcagttcgtgcacctcttcccggagctgcgccagggaattacagacgaactggaaggggccgagaagggccttggccaccacctttagctccaagccttttcgctttttcagatttgggatcctccccggggaggacctcctggcgccccccggcagtttcccgccgcctagggccgacttttccacctcccgctcccgggcgggggaggccccgcagggccgcttagacgggcccgagcgcacagctccacgcagcctctccacactctccccagcgcctgcagcacccgcagtgcgcacagctccgccagtagcttccccgcgcgccgcccctgcaccgcttcgggccataaccttgctggcgactaagtctgaagaacttcccgtggtttcattcttttcttcgcgtttagtcttagct

SEQ ID NO: 8016 - DNA, 1670 bp, Homo sapiens
  SIMILAR (726)..(1175): 341254mologous to Chlamydomonas eugametos amino acid feature: N-glycosylation sites, aa 41 .. 43, 46 .. 48, 51 .. 53, 72 .. 74, 107 .. 109, 128 .. 130, 132 .. 134, 158 .. 160, 163 .. 165; amino acid feat,accession number L29028,Smith-Waterman Score=126.
tcaggaaaagttgtaaatttgaagactgtctggcttttgttgttgttgctgctgacattgctggaaggccacgagcaatgttctttttggctttctacatccaagggaaagctgacctgacatgattaaatccaactctccattttctccatgtttatacttgggaatctgattatagcaatgtagaattgccacaaagatggcgatgctgagagtggttctgctggggaaccaccgcgcctgcagttcgtgcacctcttcccggagctgcgccagggaattacggacgaactggaaggggtcgagaagggtcttggccaccacctttagctccaagccttttcgctttttcagatttgggatcctccccggggaggacctcctggcgccccctggcagtttcccgccgcctagggccgacttttccacctccagctcccgggcgggggaggccccgtacggccgcttagacgggctggggcgggaagattgcagcggctttgggtttactccttgtttcttcataatccctagtggagctgggtcaatttcaggcacagcccatccgagtcgggcgaggtccagaaaggcctgactcgcctggcagcctcaacggacttgtccccgcagccgttgactagccgttgacgagcggacctaccggtcgtcatggcgactgtgaaatgtagggtggagcgcatgcgttcgaagccattcgcgcgggcagtccctgcgtgtccccctgcgtgtccccccacgtgctccccagcgcgcgcagcacccccgcctctgcgcttccccgagcgtgcagcttccggtgagggcagccccacgcacagcccccaacaccctccccagcgcctgcaagcctttggtgcgcgcagtccccaagcccacatgcgcagttctcaccttgcgcgcagccccacgtacagcccccaacacgctcccagccccactggcgcagaacccatcaccgcttgcccttcacgcgcttcattgggagtgcagctcccaccccgagcgcgcagctccacgcagcctctccacactctccccagcgcttgcagcaccccccagtgcgcacagctctgccagtagcttcccggcgcgccgcccctgcaccgcttcgggccataaccttgctggcgactaagtctgaagaacttcctgtggtttcattcttttcttcaggttacacgttaattaacgaggtattaaaggggaagatctcagctgaaagaaatgactgtaggaagtgtgtcagggaagccaacggaaccgctggcccgccggtggtgcgcccggcattaggaaagtctctacgatcgctgaggtatcgggcagtcagtgcccgttgccaacgcggagggaacgggcggagactgcgggcaacacgtggcagagccggccgtttactgaatcttagagcaaaatgcttttccaatgaggttcctcagaagtcatcggccctaggagcggtgtgctcaagcgctttcagcaccagccaggaccaactaagaggggagcgcttacctcccagtcaccgcgcagccctacaagaggccaaagcggctggcacagatgcactggggccactgacattttccatgtcctctgtcacgggccacatgctggagcccacaccgcttcacttgccatctgtttga

SEQ ID NO: 8017 - DNA, 314 bp, Homo sapiens
  SIMILAR (174)..(4): 311254mologous to Mus musculus monoclonal antibody AE5 Ig light chain variable region,accession number U35889,Smith-Waterman Score=74.
tttccagtttgtccaagagcctttattggaaaaatgtccaacaagtgatatcactagcagctgaaggggctgccaggtgagagggggagcacctgaggctccatggaagacattggagtagtgcagtgcagcatctgcctctagggtcagacaattccttttatttgctggggtaagaggagtagggtacaactagtgactctcccctggaccggggaatggaaggagatatcccatctgatatccactccccaggtccaggggcacagactctgaacagacctaccttctggctctgctcacagtggaaagag

SEQ ID NO: 8018 - DNA, 564 bp, Homo sapiens
  SIMILAR (495)..(524): 601254mologous to Homo sapiens myotonin protein kinase A,accession number U46546,Smith-Waterman Score=42.
gtggaggaactcaccgcgaggaccggcggaggagccccgcctggatgtcaagcggatgccaagcggatgccacagttccccccccagcggactccgtggggacatggcttcgctggtgcccctttccccatatctaagccccacggtcctcctgctggtcagctgtgacctgggcttcgtgcgagcagaccggcctccctctcctgtgaatgtgacggtcactcacctcagagccaactcggccactgtgtcctgggacgtcccagaaggcaacatcgtcattggctactccatttcccagcaagtatgaatcacccttctgctcccccaacctgtgtccttggatttcggcacatttcttcacttaagtgggggggatctggaagctggcgtatcctggctcaggctgcccttttcacgctactcccccggagtgcttggatgttgaagagtctctggttgagccttgtggcctggcactggggtgaggctgtcctcctctcccctcatctccctgcagcggcagaatggccccgggcagcgtgtgattcgggaggtgaacct

SEQ ID NO: 8019 - DNA, 1424 bp, Homo sapiens
  SIMILAR (239)..(460): 401254mologous to Thermobifida fusca beta-1,4-endoglucanase precursor,accession number L20094,Smith-Waterman Score=121.
ggcagccaccgagtcgggcgatgggccgccctctgcgaccgagcagccccccgaggcctgaccaaccgcgagaccggcggaggagccccgcctggatgtcaagcggatgccaagcggatgccacagttcccctcccagcggactccgaggggacatggcttcgctggtgcccctttccccatatctaagccccacggtcctcctgctggtcagctgtgacctgggcttcgtgcgagcagaccggcctccctctcctgtgaatgtgacggtcactcacctcagagccaactcggccactgtgtcctgggacgtcccagaaggcaacatcgtcattggctactccatttcccagcaacggcagaatggccccgggcagcgtgtgattcgggaggtgaacaccaccacccgggcctgtgccctctggggcctggctgaagacagtgactacacagtgcaggtcaggagcatcggccttcggttatgagagtcccccagggccccgggtgcacttccgaactctcaagggttctgaccggctaccttcaaacagttcaagcccaggtgacatcacagtggaaggtctggatggagagcggccactgcagactggggaagtggtcatcattgtggtggtgttgctcatgtgggctgctgtaattgggctgttctgccgtcagtatgacatcatcaaggacaatgactccaacaacaatcccaaggagaagggaaaggggccggaacagagtcctcagggaaggccagtggggacaagacaaaaaaagtcaccatctatcaacaccatcgacgtttgagtgaagaaacacacccagaaaagagatgcactaacaactggggatagggatggggtcagggggagcccaagatggtgatctgcccgagactcccagagggtaatgccactcccacaatctcaggcctggtacccatcctctttcccactgtgaaccagagcccagaaaggtaggtctgttcaaaagtctaatgccccctggaaccctggggagtggaatatgagatggggtatctacttacatatccgcacagggcacaggaggagagacgctaggaggaccctactcccattaggtcccaaatgggggccccatttcacctgtattcaggactttggaggcatccccagctgccctggtatcttgcctctgggcctcagaagaagggtgtttctgtgggtactcctcttaccccatgcaaataaaaggaattgtctgaccctagacggcatgatgctgcacttgcacgtacctccaatgtcttccatggagcctcaggtgctccccctctcacctggcatgccccttcagctgctagtgatatcacttgttggacatttttccaataaaggttcttggacaaactggaaaaaaaaaaaaaaaaaaaagatt

SEQ ID NO: 8020 - DNA, 2535 bp, Homo sapiens
  SIMILAR (1)..(894): 1001254mologous to Homo sapiens SM-20,accession number AF229245,Smith-Waterman Score=1601.
gcggccgccggcggccagggctcggcggtggctgccgaagccgagcccggcaaggaggagccgccggcccgctcatcgctgttccaggagaaggcgaacctgtaccccccaagcaacacgcccggggatgcgctgagccccggcggcggcctgcggcccaacgggcagacgaagcccctgccggcgctgaagctggcgctcgagtacatcgtgccgtgcatgaacaagcacggcatctgtgtggtggacgacttcctcggcaaggagaccggacagcagatcggcgacgaggtgcgcgccctgcacgacaccgggaagttcacggacgggcagctggtcagccagaagagtgactcgtccaaggacatccgaggcgataagatcacctggatcgagggcaaggagcccggctgcgaaaccattgggctgctcatgagcagcatggacgacctgatacgccactgtaacgggaagctgggcagctacaaaatcaatggccggacgaaagccatggttgcttgttatccgggcaatggaacgggttatgtacgtcatgttgataatccaaatggagatggaagatgtgtgacatgtatatattatcttaataaagactgggatgccaaggtaagtggaggtatacttcgaatttttccagaaggcaaagcccagtttgctgacattgaacccaaatttgatagactgctgtttttctggtctgaccgtcgcaaccctcatgaagtacaaccagcatatgctacaaggtacgcaataactgtttggtattttgatgcagatgagagagcacgagctaaagtaaaatatctaacaggtgaaaaaggtgtgagggttgaactcaataaaccttcagattcggtcggtaaagacgtcttctagagcctttgatccagcaataccccacttcacctacaataattgttgacgctatttgttaatttgtgaatacgaataaatgggataaagaaaaatagacaaccagttcgcattttagtaaggaaacagaaacaactttttgtgttgcatcaaacagaagattttgactgctgtgactttgtactgcatgatcaacttcaaatctgtgattgcttacaggaggaagataagctactaattgaaaatggtttttacatctggatatgaaataagtgccctgtgtagaatttttttcattcttatattttgccagatctgttatctagctgagttcatttcatctctacttttttaatatatgtcaagtttgaatttgggataatttttctatgattaggtacaatttatcaaaactgaattgagaaaaaattacagtattattcctcaaaataacatcaatctatttttgtaaacctgttcatactattaaattttgccctaaaagacctcttaataatgattgttgccagtgactgatgattaattttattttacttaaaataggaaaaggagcactttaattacaactgaaaaatcagattgttttgcagtccttcctatcttacactaatttgaactcttaaagattgctgctttttttttgacattgtcaataacgaaacctaattgtaaaacagtcaccatttactaccaataacttttagttaatgttttacaaggaaaaagacacaataagaagagtttaattttttttttttttttgagcctgggcgacagagtgagactccgtctcaaaaaaaaaaaaaaaaagaaatgtttcattttggtttttcaccaaccttcctttgataggacaaagcagatactaagagggggaggaaaggctgttctgtgtctgaacccagttgggctagtccccaagaggagctgagagccatgtactctaatgcctcccttttcttcccccagccctgcctgatgtggctctgggaattcctgcagagaagagcaggggtggccaggagatagtgagcagctcccaggaggcatggagggatccagaacctggactgaagaaccacctagaaataactcagcagaattctgaaaatgaggtcacgctgggtaagaatgcctttttttttttttcatagtcaaagttagctatggagtttctgtagtattcactactccagacctttttcaagttgaattttttttctttttccctatgtctgttcttacgtattttttttaaacttttatttcagtagtgtttggggaacaagtagtgtttggttgcatggaaaagttcttcagtggtgatttctgagattttggtgcacccatcacccaagggtagtcttttttatccatcaagtctgtacccaatgtgtagtctttgtttttttctttttttttttttttgagactgagtctcattctatcacccaggctggagtggagtggtatgatcttgactcactgcaacatctgcctcccgggttcaagtgattctcctgcctcagcctcctgagtcgctgggattactgagattgtgccactgcactccagcctgggcgacagagtgagactccgtctcaaaaaaaaaaaaaaaaa

SEQ ID NO: 8021 - DNA, 255 bp, Homo sapiens
  SIMILAR (85)..(246): 291254mologous to Aquifex aeolicus putative protein,accession number AE000723,Smith-Waterman Score=71.
atggtggaggaagagctcgcagtgaattatgtctactcaatctatgcatcaaaggagcagattagatacaagcatggtagaagttttgccaatggccatgtgaaagagctgatggaaggggctcttagtttgatagaggagctgaagtatgtaaccaaacagattggcaaagcatccgaagcagccagggaggaagggaccaaaggttttcgacagagagggcgtgatgcgaagtccttccttcagtggcctaag

SEQ ID NO: 8022 - DNA, 936 bp, Homo sapiens
  SIMILAR (732)..(866): 311254mologous to Rattus norvegicus MEGF6,accession number AB011532,Smith-Waterman Score=41.
atgccacagagggccctattgtgtcaactcacttacgcgtgcatctcagcgcagctgatatgtccatttgctatggagcaacagctggttgcctgctgtcaccccatgtctggagagtgtgcctgcaagccgggctggtcaggactctactgtaatgagacatgttctcctggattctacggggaagcttgccagcagatctgcagctgccaaaatggggcagactgtgacagtgtgactggaaagtgcacctgtgccccaggattcaaaggaattgactgctctaccccatgccctctgggaacctatgggataaactgttcctctcgctgtggctgtaaaaatgatgcagtctgctctcctgtggacgggtcttgtacttgcaaggcaggctggcacggggtggactgctccatcagatgtcccagtggcacatggggctttggctgtaacttaacatgccagtgcctcaacgggggagcctgcaacaccctggacgggacctgcacgtgtgcacctggatggcgcggggagaaatgcgaacttccctgccaggatggcacgtacgggctgaactgtgctgagcgctgcgactgcagccacgcagatggctgccaccctaccacgggccattgccgctgcctccccggatggtcagtgttcaccggaaatggtgtaccaattaacaacattcacattatagtttgggactgcttccatgttaaggttcagactgtggtgactttttgcctgattactttagaagccaaaactgtaacacaagacatgaccgtctcagcatcgtggtactgggtggttgttagtattctggaatcctggagggtctgcgtgcttgctcttaatgtgttttcatttggtctgaggccagcaactgccagttcactactaattataacttattgcctttcaatgtga

SEQ ID NO: 8023 - DNA, 2295 bp, Homo sapiens
  SIMILAR (82)..(429): 401254mologous to Rattus norvegicus MEGF6,accession number AB011532,Smith-Waterman Score=253.
atgaaagtaggattggaccagataatagaagtggtgccctcacactctgtgacttcaggagcagctgctggtgaatgtggaggtgtccactgtgacagcgtgtgtgctgagggacgctggggccccaactgctccctgccctgctactgtaaaaatggggcttcatgctcccctgatgatggcatctgcgagtgtgcaccaggcttccgaggcaccacttgtcagaggatctgctcccctggtttttatgggcatcgctgcagccagacatgcccacagtgcgttcacagcagcgggccctgccaccacatcaccggcctgtgtgactgcttgcctggcttcacaggcgccctctgcaatgaagcttattcacagtgtgtcccagtggcagatttgggaaaaactgtgcaggaatttgtacctgcaccaacaacggaacctgtaaccccattgacagatcttgtcagtgttaccccggttggattggcagtgactgctctcaaccccactgtgctgataaatgtgtccatggtcgctgtattgctccaaacacctgtcagtgtgagcctggctggggagggaccaactgctccagtgtcaaaaaacaatcaactgtttgtgaatcttaaaaatgtgaaccctgggaagagaggccctgtgggggactgcactgggacattgccggctgactggaaacatggcggctacctcaacgagctcggtgcttttggacttgacagaagctatatgggaaaatccttaaaagacctgggaaagaattctgaatataattcaagtaactgctccctaagcagttctgagaacccatatgccactattaaagacccacctgtacttatcccgaaaagctcagagtgtggttatgtggagatgaaatcgccggcacgaagagattccccatatgcagagatcaataactcaacttcagccaacaggaatgtctatgaagttgaacctacagtgagtgttgtccaaggagtattcagcaataatgggcgtctttcccaggatccatatgacctcccaagaacagtcacatcccttgtcattatgacctgctgccagtccgagacagttcatcctcccttaagcaagaggacagtggtggtagcagcagcaacagcagcagcagcagtgaatgacaccaaaggaccgcttggggctcttagtttgatagaggagctgaagtatgtaaacaaacagattggcaaagcatccgaagcagccagggaggaagggaccaaagatttagtgacatgggacttggaaaagctcacaggaaaagcagcagaagagcagagtgggaagttggcagctaccctctgtgggaaggattggttaatccagagagaaggctggccatacattctcagtcggatgttcttggcttcatctccactgatggcagagaaagcgaatcattatggagaaagtcaaatggtaactcaaagttcaagttctaatgggggcgtccaggcaagtgtggcttgtaagaaggacagagggaagaggtttggggactgggtaactcactttattgcctggcaggccagctctgatgtctggactgtgagtgccaccatgattccaggaatgctgtccagttctgggacactcttgggggtacaagtcagcctcaataggaatcccctgaaaggactcagctctagatgtgcagggcttgcagtcagagacagccttgctccaaattcccaaggttggaaagctacatttgactttccttctctagagtgcccttcaggaacatatggctatggctgtcgccagatatgtgattgtctgaacaactccacctgcgaccacatcactgggacctgttactgcagccccggatggaagggagcgagatgtgatcaagctggtgttatcatagttggaaatctgaacagcttaagccgaaccagtactgctctccctgctgattcctaccagatcggggccattgcaggcatcatcattcttgtcctagttgttctcttcctactggcattgttcattatttatagacacaagcagaagggaaaggaatcaagcatgccagcagttacctacacccctgctatgagggtcgtcaatgcagattataccatttcagatctcttcaccagtgtgtgcaaaatggctgttgaacgcaaccagcagaaacagggcgatatcttggagaacaacaacaacaaaaatgtcaggcaagaagatgtggggcctcccaagagtggaggtttcatttgtgtccttaactgtgtgtcagcttag

SEQ ID NO: 8024 - DNA, 2909 bp, Homo sapiens
  SIMILAR (76)..(1377): 371254mologous to Rattus norvegicus MEGF6,accession number AB011532,Smith-Waterman Score=876.
atgccacagagggccctattgtgtcaactcacttacgcgtgcatctcagcgcagctgatatgtccatttgctatggagcaacagctggttgcctgctgtcaccccatgtctggagagtgtgcctgcaagccgggctggtcaggactctactgtaatgagacatgttctcctggattctacggggaagcttgccagcagatctgcagctgccaaaatggggcagactgtgacagtgtgactggaaagtgcacctgtgccccaggattcaaaggaattgactgctctaccccatgccctctgggaacctatgggataaactgttcctctcgctgtggctgtaaaaatgatgcagtctgctctcctgtggacgggtcttgtacttgcaaggcaggctggcacggggtggactgctccatcagatgtcccagtggcacatggggctttggctgtaacttaacatgccagtgcctcaacgggggagcctgcaacaccctggacgggacctgcacgtgtgcacctggatggcgcggggagaaatgcgaacttccctgccaggatggcacgtacgggctgaactgtgctgagcgctgcgactgcagccacgcagatggctgccaccctaccacgggccattgccgctgcctccccggatggtcaggtgtccactgtgacagcgtgtgtgctgagggacgctggggccccaactgctccctgccctgctactgtaaaaatggggcttcatgctcccctgatgatggcatctgcgagtgtgcaccaggcttccgaggcaccacttgtcagaggatctgctcccctggtttttatgggcatcgctgcagccagacatgcccacagtgcgttcacagcagcgggccctgccaccacatcaccggcctgtgtgactgcttgcctggcttcacaggcgccctctgcaatgaagcttattcacagtgtgtcccagtggcagatttgggaaaaactgtgcaggaatttgtacctgcaccaacaacggaacctgtaaccccattgacagatcttgtcagtgttaccccggttggattggcagtgactgctctcaaccatgtccacctgcccactggggcccaaactgcatccacacgtgcaactgccataatggagctttctgcagcgcctacgatggggaatgtaaatgcactcctggctggacagggctctactgcactcagaagatccccaagacactcttgcagggcagctgccagcccatggttttatggaaaagattgtgcactgatatgccaatgtcaaaacggagctgactgcgaccacatttctgggcagtgtacttgccgcactggattcatgggacggcactgtgagcagaaggtcaggcctccctgggatcatcgctggttactcactgctctgggcggaggaggtgtgactacaagaatgaagacagaattcaagttttccattctgttcttttgggctctcccttcctctccttcttatttttggaatgtggctgctcagagccttaaaagatccagtcgagctttcttcatggcagaggcagaacccgggtctcacattggaggacagtacattcggtggggaggagggctggtggcccagggccaatccctgttgctgccctgtgcagtctggactgtgagtgccaccatgattccaggaatgctgtccagttctgggacactcttgggggtacaagtcagcctcaataggaatcccctgaaaggactcagctctagatgtgcagggcttgcagtcagagacagccttgctccaaattcccaaggttggaaagctacatttgactttccttctctagagtgcccttcaggaacatatggctatggctgtcgccagatatgtgattgtctgaacaactccacctgcgaccacatcactgggacctgttactgcagccccggatggaagggagcgagatgtgatcaagctggtgttatcatagttggaaatctgaacagcttaagccgaaccagtactgctctccctgctgattcctaccagatcggggccattgcaggcatcatcattcttgtcctagttgttctcttcctactggcattgttcattatttatagacacaagcagaagggaaaggaatcaagcatgccagcagttacctacacccctgctatgagggtcgtcaatgcagattataccatttcaggaacccttcctcacagcaatggtggaaacgctaatagccactacttcaccaatcccagttaccacacgctcacccagtgtgccacatccccttcacgttcaacaacaggggacaggatgactgttcacgagttcaaaaaacaatcaactgtttgtgaatcttaaaaatgtgaaccctgggaagagaggccctgtggggggactgcactgggacattgccggctgactggaaacatggcggctacctcaacgagcttcggtgcttttgggacttgacagaagctatttggggaaaatccttaaaaggacctggggaaaggatttttgaatataattcaagtaactgctccctaagcagttctgagaacccatatgccactattaaagacccacctgtacttatcccgaaaagctcagagtgtggttatgtggagatgaaatcgccggcacgaagagattccccatatgcagagatcaataactcaacttcagccaacaggaatgtctatgaagttgaacctacagtgagtgttgtccaaggagtattcagcaataatgggcgtctctcccaggatccatatgacctcccaaagaacagtcacatcccttgtcattatgacctgctgccagtccgagacagttcatcctcccctaagcaagaggacagtggtggtagcagcagcaacagcagcagcagcagtgaatga

SEQ ID NO: 8025 - DNA, 639 bp, Homo sapiens
  SIMILAR (315)..(256): 401254mologous to Homo sapiens Amino acid sequence of a human secreted protein,accession number Y19552,Smith-Waterman Score=39.
atgaaggttgcagttgtaaatcggagcatgagagaaggcctgagaaaagtggaaggaggcagggaattgagtaatatcaaagcctcatctgagcttttagctcagctctcttttactggctccttgtttctgatctttccctcctatagttctgaaatgagaaaagaacagagccatgaggaccaaggacacataatggatacacggatgaggaagaacaagcaagcaggcagaaaagtcactctaatagagagccccacaccttctggcttccagctggtagaaggtgcaaacaaaagcaagacaaacacacactgcatctgtaccttgaaacagcctcaattccaggtggttgaagggactccctggggcacctggaattcaggaaataaaggaaatgtggagatgcatgtcaagcatttgccaaaaggagggctggagaatgacagctgggagcctgggtcaccatcgcagcctgctgcacgtagggcaggtggcaacgacgtggataggacaggctctctgcctgcgagtgtgagacacacgcttactatacagcatcctctgtggaagggagggtgtcatacaagttatatacatgaccagatgactttccatgacacaacggatgaccattaa

SEQ ID NO: 8026 - DNA, 1148 bp, Homo sapiens
ttttaatataagtttgggctttgcctgcccccttagaattgatttttttggttggtttttttttgtcttttttttgagttggagtttcactcttttcgcccaggctggagtgctatggtgtgatctcggctcactgcaacctccgcctcttgggttcaagcaaattctcttgcctcagcctcccaagtagcttggactataggtgcctaccaccacgcctgactaatttttgtatttttggtagagatggggttccaccacgttggccaggctggtctagaactcctgacctcaggtgatccacctgcctcagcctcccaaagtgctgggattacaggcatgagccaccgtgcccagtcagctgccttatcttttaaataaagtggaatttccaaaaacagatacttcatattctgggcatagcatcacacatacaaccattaccaatataataatattaaatgattacttaacagacatcctaataacgcaaacaccttttattcacatttgctgagtagcaattacagtgttttcttcattagttttccaacactggtaatgtaatttatgatgcaattactaacaatatacgtaccaatactttgaccaacaatagtcacaatggtttataacaactgaactcaaaggccacgttgatttttccacccacaacttgattctgatttttctagagtcattcataagaacaagaagtagtggatcctttcttcctccttagtatctgaaaattctgaactctgaagagaaattccatttggtttgtcattttcacctctgtgcatttcggcagctcttaacttttcttcaattctttactctattagagtgacttttctgcctgcttgcttgttcttcctcatccgtgtatccattatgtgtccttggtcctcatggctctgttcttttctcatttcagaatgtgtcatagattctgagcctagtctgaagtcctgggacttgttcttattgattgattgcttctctttcagtcttgtttgagtaactgctttcctggtgttatctctactgaagcttgtttggcctttttagatttccttcttcacaatcagatttctgcaagatcattcttcagcaagatttggcactatctttaaacaagcatt

SEQ ID NO: 8027 - DNA, 954 bp, Homo sapiens
  SIMILAR (760)..(948): 731254mologous to Homo sapiens envelope protein,accession number AF072508,Smith-Waterman Score=217.
atggattgggaatgccagcggccagcccattgtggctccccactagacccggaagaagccaagctgcaggaagaagccacggctgcaggtggagctgcctgccagtccagcaccgtgcacccgcactcctcagcccttgggcggtcgatgggactgggtactgtggagcagggggtggtgctcataggggaggctcccgcggcgccagagaccacggactcaccactgagcacaaaggcaatgttgggcatgctggtaaaggaccactggagtccagcagcccagacccctttctttgtgatcaaggaaggtgggaaaaggggtgcaggactgctacatggccaactaattttaaaggataagtttatcactcagtcagctgcagacattaaagaaaaacttcaaaagtccaccttaggcccagagcgaaacttaaaaaccctattgaacttggcaacctctgttttttataatagagatcaggaggagcaggcggaacgggacaaacgaggtaagaaaaaggccaccactttagtcatggccctcgggcaagcggactttggaggctctggaacgcggaaagcctgggcaaatcgaatgcctaatagggcttgcttccagcagtacccccttagacctgaggcccaacaaggactccaaaagattgttaaggacctaaaagcccaaggcctagtaaaaccatgcagtagcccctctgatactccaattttaggagtacagaaacctaatggacagtggagaattgaagctgtaaaactacaaatggctcttcaaatggagccccagatgcagtccatgactaagctctactgcggacccctggactggcctgctagcccatgctctgatattaatgacatggaaggcaccccccctgaggaaatctcaactgcacgacccctactatgccccaattcagcaggaagctgttaa

SEQ ID NO: 8028 - DNA, 924 bp, Homo sapiens
  SIMILAR (19)..(924): 771254mologous to multiple sclerosis associated retrovirus polyprotein,accession number AF009668,Smith-Waterman Score=1201.
gaaactagcccagatctaggactcacccctgagagcaaaggcaatgttgggcatgctggtaaaggaccgctagaatccagcagccaggaccactttctttgtggtcaagaaaggcagtacccccttagacccaaggcccaacaaggactccaaaaaactgttaaggacctaaaagcccaaggcctagtaaaaccatgcagtagcccctgcaatactccaactgtaggagtacagaaacccaacggacagtggaggttagtgcaaaatctcaggattatcaatgagactgttgttcctctatacccagctgaacctaacccttatactctgctttcccaaataccagaggaagcagagtggtatatagtcctggaccttaaggatgccttcttctgcatccctgtacatcctgattcccaattcctgtttgcctttgaagatccttcaaactcaacgtctcaactcacctggactgttttacgccaagggttcagggatagcccccatctatttggccaggcattagcccaagatttgagccaattctcatacctggacactcttgtcctttggtatgtggatgatttacttttagccacctgttcagaaaccttgtgccatcaagccacccaagtgctcttaaatttcctcaccacctgtggctacaaggtttccaaaccaaaggctcagctctgctcacagcaggttaaatacttagggctaaaattatccaaaggcttgagggccctcagtgaggaacacatccagcctatactggcttatcctcttcccaaaaccctaaagcaactaagagggttccttggcataacaggtttctaccgaatgtggattcccaggtacagcaaaataggcagatcattatatacactaattaaagaaactcagaaagccaatacccattta

SEQ ID NO: 8029 - DNA, 914 bp, Homo sapiens
  SIMILAR (708)..(749): 781254mologous to multiple sclerosis associated retrovirus polyprotein,accession number AF009668,Smith-Waterman Score=54.
ctagtaaaaccatgcaatagcccctgcaatactccagttttaggagtacagaaacctaatggacagtggaggttagtgcaagatctcaggattatcaatgaggctgttcttcctctataccctgctatacctaacccttgtactctgctttcccaaaaaccacagaaagcagagtggtttacagtcctggaccttaaggatgcctttttctgcatccctgtacaccctgactctcaattcttgtttgcctttgaagatcctttgaacccaatgtctcaactcacctggactgttttaccccaagggttcaagcatagcgcccatctatttggccaggcattagcccaagacttgagccaattctcatacctggacactcttgtccttcagtacggggatgatttaattttagccacccgatcagaaacctggtgccatcaagccacccaagcactcttaaatttccttgctacctgtggctacaaggtttccaaacaaaatgctcagctctgctcacagcaggttaaaaacttagggctaaaattatccaaaggcacaagggccctcagtgaggaacgtatccagcctatactggcttatcctcatcccaaaaccctaaagcaactaagagggttccttggcataacaagcttctgccgaatatggattcccaggtacagcgaaatagtcaggccattatacacactaaggaaactcagaaagccaatacccatttagtaaggattactattggctgtacagaaacctaaagaggtggcagtcttacactgccagagtcaccagaaaggaaagggaaacagaaaggaactgccaagcggatattgaagccaaaagagcggcaaggcaggaccctctattagaaatgcttatagaaggacccccagtccttctat

SEQ ID NO: 8030 - DNA, 575 bp, Homo sapiens
  SIMILAR (241)..(573): 871254mologous to multiple sclerosis associated retrovirus polyprotein,accession number AF009668,Smith-Waterman Score=532.
gaacccagcccagctctaggactcacccctgagcgcaaaggcaatgttgggcatgctggtaaaggaccactagaatccagcagcccagacccctttctttgtggtcaagaaaggcgggaaaaggggtgcaggactgctacatcggtaagcataactaatccgataaacagaggtccatgggtggttacgcaccctggaaaggaactcacccctgagcacaaaggcaatgttgggcacgctgggagagacattctagcaaaagcaggggccattatacacctgaacataggagaaggaacacccgtttgttgtcccctgcttgaggaaggaattaatcctgaagtctgggcaacagaaggacaatatggacgagcaaagaatgcccgtcctgttcaagttaaactaaaggattccacctcctttccctaccaaaggcagtaccccctcagacccaaggcccaacaaggactccaaaagattgttaaggacctaaaagcccaaggcctagtaaaaccatgcagtaacccctgcagtactccaattttaggagtacagaaacccaacagacagtggag

SEQ ID NO: 8031 - DNA, 334 bp, Homo sapiens
  SIMILAR (140)..(328): 731254mologous to Homo sapiens envelope protein,accession number AF072508,Smith-Waterman Score=217.
gcagtacccccttagacctgaggcccaacaaggactccaaaagattgttaaggacctaaaagcccaaggcctagtaaaaccatgcagtagcccctctgatactccaattttaggagtacagaaacctaatggacagtggagaattgaagctgtaaaactacaaatggctcttcaaatggagccccagatgcagtccatgactaagctctactgcggacccctggactggcctgctagcccatgctctgatattaatgacatggaaggcaccccccctgaggaaatctcaactgcacgacccctactatgccccaattcagcaggaagctgttaa

SEQ ID NO: 8032 - DNA, 900 bp, Homo sapiens; identical to SEQ ID NO: 3403
  SIMILAR (238)..(897): 881254mologous to multiple sclerosis associated retrovirus polyprotein,accession number AF009668,Smith-Waterman Score=1019.

SEQ ID NO: 8033 - DNA, 804 bp, Homo sapiens
  SIMILAR (143)..(211): 781254mologous to Homo sapiens gag,accession number AF156961,Smith-Waterman Score=99.
gaacccagcccagctctaggactcacccctgagcacaaaggcaatgttgggcacactggtaaaggaccactagaatccagcagcccggacccttttctttgtggtcaagaaaggggaaaacaggtgcaggactgctacatcgatgggaaatgttccccccaaggcaaaaacgcccttaagatgtattctggagaattcgacccagtcagagtgtgtgtacctttttccctctcagatttgaagcaacttaaaatagacctaggtagattctcagataaccctgatggctatattgatgttttacaagggttaggacaatcctttgatctgacatggagagatataatgttactgctagatcagacactaaccccaaatgagagaaatgccaccataactgcagcccgagagtttggtgatctctggtgtctcagtcaggtcaatgataggatgacaacagagcaaagagaacgattccccacaggccagcaggcagttcccagtgtagaccctcgctgggacacagagtcagaacatggagatgggtgccacagacatttgctaacttgcatgttagaaggactaaggaaaactaagaagaagccgatgaattactcaatgatgtccactataacacagggaaaggaaaaaaatcctaatgcctttctggagagactaaggcaggcattgaggaagcatacctctctgtcacctgactctattgaaggccaactaatcttaaaggataagtgtatcactctgtcagctgcagacattagaaaaaacttcagaagtccaccttag

SEQ ID NO: 8034 - DNA, 1926 bp, Homo sapiens
  SIMILAR (1063)..(1431): 911254mologous to Homo sapiens aldose reductase-like peptide,accession number U37100,Smith-Waterman Score=591.
atgggagaagaaagatacggaatggaggaagaaggtcatcttgtcatcagtgtaactcaggctagtcattttttaacccttcagtttgatgcctgttcagtcatcccgtatggagatgagcaaggtcccatgaaagccatcttgctattactcacctttgggccctgtatttttaacctccttgtcaaatttgtttcctctaggatcgaggccatcaagctacagatggtcttacaaatggaaccccaagtgaactcaactaacaacttccaccaaggacccctggaccaacccgttggccctttgactggcctaaagagttcccttctgaaggacactacaagtgcagggccccttcttcgcccctatccagcatctcttctcggcaaagtgaaagaagcggtgaaggtggccattgatgcagaatatcgccacattgactgtgcctatttctatgagaatcaacatgaggtgggagaagccatccaagagaagatccaagagaaggctgtgatgcgggaggacctgttcatcgtcagcaaggtgcacatggcgcatttggtgtggcccactttctttgagagaccccttgtgaggaaagcctttgagaagaccctcaaggacctgaagctgagctatctggacgtctatcttattcactggccacagggattcaagagcttgaaaaagtggtatgcagatgtggtatttagcaagcatcaggatcctgaaaccttgttgaacagaaccaagtgtcctgatgcagattccagtaaacttttcattctgtatttacagactggggatgactttttccccaaagatgataaaggtaatatgatcagtggaaaaggaacgttcttggatgcctgggaggccatggaggagctggtggacgaggggctggtgaaagcccttggggtctcaaatttcaaccacttccagatcgagaggctcttgaacaaacctggactgaaatataaaccagtgactaaccagaactccctaggaacaatgcaaaacagagccggctttccccgtgatgaggattgtttgctgttgcaggttgagtgtcacccatacctcacgcaggagaaactgatccagtactgccactccaagggcatcaccgttacggcctacagccccctgggctctccggatagaccttgggccaaacctgaggacccttccctgctggaggatcccaagattaaggagattgctgcaaagcacaaaaaaaccacagcccaggttctgatccgtttccatatccagaggaatgtgacagtgatccccaagtctatgacaccagcacacattgttgagaacattcaggtctttgactttaaattgagtgatgaggagatggcaaccatactcagcttcaacagaaactggagggcctttgacttcaaggaggagagacatcctagcaaaagtaggggccattatacactagaattaggagaagaaaaaagggtgaacatatatacagactctgagtatgcttacctagtcctccatgcccacgcagtaatatggagagaaagggaattcctaacttccaagggaacacctatcaaacatcaggaagccattaggagattattattggctgtacagaaacctaaagaggtggcagtctttcactgctggggtcatcagaaaggaaaggaaagggaaatagaagggaactgccaagtggatattgaagccaaaagagctgcaagaatcaaagctgtaaaactacaaatggttcttcaaatggagcaccagatgcagtgcatgactaagatctaccgtggacccctggactggccagctagcccatgctccgatgttaatgacattgaaggcacccctcccgaggaaatctcaactgcacaacccctgctacaccccaattcagcaggaagcagttag

SEQ ID NO: 8035 - DNA, 2343 bp, Homo sapiens; identical to SEQ ID NO: 2096
  SIMILAR (334)..(1041): 741254mologous to multiple sclerosis associated retrovirus polyprotein,accession number AF009668,Smith-Waterman Score=862.

SEQ ID NO: 8036 - DNA, 865 bp, Homo sapiens
  SIMILAR (265)..(864): 831254mologous to multiple sclerosis associated retrovirus polyprotein,accession number AF009668,Smith-Waterman Score=876.
atgaaattgtcagcagactcaataatcaccctaaggggcatcattctggatgccgacattctctatgatggaaagggactgaaagaactcagcctagctctaggactcacccctgagcacaaaggcaatgttgggcacgctggtaaaggaccactagaatccagcagcccggacccctttctttgtgatcaagaaaggcgggaaaaggggtgagggctgcctagcaaaagcaggggccattatacacctgaacataggagaacacccgtttgttgtcccctgcttgaggaaggaattaatcttgaagactgggcaacagaaggacaatatggacgagcaaagaatgcccgtcctgttcaagttaaactaaaggattctgcctcctttccccaccaaaggcagtacccccttagacccgaggctcaacaaggactccaaaagattaaggacctaaaagcccaaggcctagtaaaagcatgcaatagcccctacaataatccaactttaggagtacagaaacccagtggacagtggaggttagtgcaagatctcaggattatcaatgaggtcactgtccctctatacctagctgtacctaacccttatattctgctttcccaaataccagaggaagcagagtggtttacagacctggaccttaaggatgcctttttctgcatccctgtacatcctgactctcaattcttatttgcctttgaagatccttcaaacccaatgtctcaactcacctggactgtttcaccccaagggttcagggatagcccccatctatttggccaggcattagcccaagacttgagccggttctcatacctgggcactcttgtcctttggtatgtggatg

SEQ ID NO: 8037 - DNA, 1721 bp, Homo sapiens
  SIMILAR (1416)..(1505): 731254mologous to Homo sapiens syncytin precursor,accession number AF208161,Smith-Waterman Score=109.
atgaatcaaagtgaccaggaaatgactggagcgtttgtccacatgaaaagttatacgggcctgatctcaggggtggcagtaaagatggaaagacacatttatcaagacagacgaattgcaatagagaaagagtttaattcatgtagaactggctgtatgggagactggagttttactattactcaaatcagactcctggaaaacacagggatcagggtttttaaggataatttggtagaggaagcagagtggtttacagtcctggaccttatggatgcctttttctgcatccctgtacatcctgactctcaattcttgtttgcctttgaagatccttcgaacccagcatctcaacttacctggactgttttaccccagaggttcaagaatagtccccatctatttggccaggcattagcccaagacttgagccagttctcatacctggacactcttgtccttcggtacatggatgatttacttttagctgcctattcagaaaccttgtgccatcaagccaccgaagctctcttaaatttcctcgccacctgtggctacaaggtttccaaaccaaaggctcagctctgctcacagcaggttaaatacttagggctaaagttatccaaaggcaccagggacctcaccacatttcttccagtcaatgaagaaaagatagaacataactgtcaacaagtaattgctcaaagctacgctgctcgaggggaacttctagaggttcccttggctgatcctgacctcaacttgtatactaatggaagttcctttgtagaaaaagcacttgaaaagtggatctatgtggttcctctcattcttagcgcccccatgatcatctacactgaacaagatttatacaattatgtcatacctaagtcccataacaaaagagtacccattctttcttttgttattggagcaggagtgctagacggactaggtgctggcattggtggtatcaaaacctctactcagttctactataaactatctcaagaactaaatggtgacatggattgggtcaccaactcactggtcaccttgcaagatcaacttaactccctagcagcagtagtccctcaaaatcgaagagctttagacttgctaactgctgaaagagggggaacctatttatttttaggggaagaatgttattatgctaatcaatccagaatcatcactgagaaagttaaagaaattcaagatcgaatacaacatagaccagaggagcttcaaaacaccagacgctggggcctcctctgccaatggatgcactggattctccccttcttaggacctctagcagctataatattgttactcctctttggaccctgtatctttaatctctttgttaagtttgtctcttccagaatcaaagctgtaaagctacaaatgttcttcaaatggagtcccagatgcagtccatgaataagatctaccgtggacccctggaccggcctgctagcccatgctccaatgttaatgagggggggcaaatatatacgcaaggcgacaaggtgctgatgccgctggcgatcagggttcatcatgccgtttgtgatggcttccatgtcggcagaatgcttaatgaattacaacagtactgcgatgagtggcagggcggggcactggccaaaggaactcgattgttcgtgctgtcttatcaggcaaaaagtgagcgacagtatcaggtggttggttga

SEQ ID NO: 8038 - DNA, 1687 bp, Homo sapiens
  SIMILAR (263)..(1192): 831254mologous to multiple sclerosis associated retrovirus polyprotein,accession number AF009668,Smith-Waterman Score=1340.
atgcctcttctccaaatgattgcaacacctctccagcaatctctgatttctacggaggatgagatggatgaattgacagaagtaggctttgaaaggtgggtaataacaaacttcactgaggaacccagcccagctctaggattcacccctgagcacaaaggcaatgttgggcatgctggtaaaggaccactagaatccagcagcccagacccctttctttgtggtcaagaaaggcgggaaaaggggtgcaggactgctacatcggcagtacccccttagacttgaggccaaacagggactcaaaaaaattgttaaggacctaaaagcccaaggcctagtaacaccatgcagtagcccctgcaatactccaactttagcagtacagaaacccaacggacagtggaggttagtgcaagatctcaggattatcaatgaggctgttgtccctctatacccagctgtacctaacccttacattctgctttcccaaataccagaggaagcagagtggtttacagtcctggaccttaaggatgcctttttctgcatccctgtacatcctgactctcaattcttgtttgcctttgaagatccttcaaacccaatgtctcaactcacctggactgttttaccccaagggttcagggatagcctccatctatttggccaggcattagcccaagacttgagccagttctcatacctggacactcttgtccttcagtatatggatgatttacttttagtgacccattcagaaaccttgtgccatcaagccacccaagtactcttaaatttcctcgccacctgtggctacaaggtttccaaactaaaggctcagatctgctcacagcaggttaaatacttagggctaaaactatccaaaggcaccagggccctcagtgaggaacgtatccagcctatattggcttatcctcatcctaaaacccgaaaacaactaagagggctccttggcatcacaggcttctgccaaatatggattcccaggtacagcgaaatagccaggccattacatacactaattaagaaaactcagaaagccaatacccatttagtaagatggacacctgaagcagaagcagcttttcaggtcttaaagaaggccctaacccaagccccagtgttaagcttgccaacggggcaagactttttccttatatgtcacagaaaaaacaggaatagctctaggagtccttacacagcactatggagaggaaaggaattcctgacttccgacggaatacctatcaaacatcaggaagccattaggagattattattggctgtacagaaacctaaagaggtggcagtcttacactgccagggtcatcagaaaggaaaggaaagggaaatagaagggaaccgccaagtggatattgaagccgaaaaagctgcaacgcaggaccctccattagaactgcttatagaaggacccctagtatggggtaatcccctctgggaaaccaaaccccaaatcgaagctgtaagactacaaattgttcttcaaatggagccccagatgcagtccatgactaagatctaccacggacccctggactggcctgctagaccgtgctccaatgttaatgacatggaaggcacccctcctgaggaaatctcaactgcacgacccctactatgcctcaattcagcaggaagcagttaa

SEQ ID NO: 8039 - DNA, 1431 bp, Homo sapiens
  SIMILAR (1)..(1011): 991254mologous to Homo sapiens G protein coupled receptor OGR1,accession number U48405,Smith-Waterman Score=1775.
atggggaacatcactgcagacaactcctcgatgagctgtaccatcgaccataccatccaccagacgctggccccggtggtctatgttaccgtgctggtggtgggcttcccggccaactgcctgtccctctacttcggctacctgcagatcaaggcccggaacgagctgggcgtgtacctgtgcaacctgacggtggccgacctcttctacatctgctcgctgcccttctggctgcagtacgtgctgcagcacgacaactggtctcacggcgacctgtcctgccaggtgtgcggcatcctcctgtacgagaacatctacatcagcgtgggcttcctctgctgcatctccgtggaccgctacctggctgtggcccatcccttccgcttccaccagttccggaccctgaaggcggccgtcggcgtcagcgtggtcatctgggccaaggagctgctgaccagcatctacttcctgatgcacgaggaggtcatcgaggacgagaaccagcaccgcgtgtgctttgagcactaccccatccaggcatggcagcgcgccatcaactactaccgcttcctggtgggcttcctcttccccatctgcctgctgctggcgtcctaccagggcatcctgcgcgccgtgcgccggagccacggcacccagaagagccgcaaggaccagatccagcggctggtgctcagcaccgtggtcatcttcctggcctgcttcctgccctaccacgtgttgctgctggtgcgcaggtactgggaggccagctgcgacttcgccaagggcgttttcaacgcctaccacttctccctcctgctcaccagcttcaactgcgtcgccgaccccgtgctctactgcttcgtcagcgagaccacccaccgggacctggcccgcctccgcggggcctgcctggccttcctcacctgctccaggaccggccgggccagggaggcctacccgctgggtgcccccgaggcctccgggaaaagcggggcccaggaggaggaagtgaccaagtttgaaggcggcagaaatggccacacagccaagaagagcccatgcaactcagtccaggattttactggaatcaaagctgtaaaactacaaatagttcttcaaatggagccccagatgcagtccatgactaagatctaccatggacccctggaccggcctgctagcccatgctccgatgttgatgacatcgaaggcacccctcccgaggaaatctcaactgcacaacccctactacgccccaattcagcaggaagcagttagagtggtcattggccaacctccccaacagcacttgggttttcctgttgagagtggggactgagagacaggactagctggatttcctaggctgactaagaatccctaagcctagctgggaaaggtgaccacacctacctttaaacacagggc

SEQ ID NO: 8040 - DNA, 3205 bp, Homo sapiens
  SIMILAR (439)..(1356): 861254mologous to multiple sclerosis associated retrovirus polyprotein,accession number AF009668,Smith-Waterman Score=1363.
gactcaccactgagcacaaaggcaatgttgggcatgctggtaaaggaccactggagtccagcagcccagacccctttctttgtgatcaaggaaggtgggaaaaggggtgcaggactgctacatggccaactaattttaaaggataagtttatcactcagtcagctgcagacattaaagaaaaacttcaaaagtccaccttaggcccagagcgaaacttaaaaaccctattgaacttggcaacctctgttttttataatagagatcaggaggagcaggcggaacgggacaaacgaggtaagaaaaaggccaccactttagtcatggccctcgggcaagcggactttggaggctctggaacgcggaaagcctgggcaaatcgaatgcctaatagggcttacttccagtgcggtctacaaggacactttaaaaaagattgtccaagtagaaagccccaggtatgcttgaccattgagagccaagaggttaactgtctcctggacgccggtgcggccttctcagtcttactctcctgtcccggacaactgtcctccagatctgtcactatccgaggggtcctaggacagccagtcactagatacttcttccagccactaagttgtgactggggagctttacccttttcacatgctttcctaattatgcctgaaagcctcactcccttgttagagagagagattctagtaaaagcaggggccattatacacctgaacataggagaaggaacacccatttgtcgtctcctgtttgaggaaggaattagtcctgaagtctgggcaacagaaggacaatatggacaagcaaagaatgcccattttgtccaagttaaactaaaggattccacctcctttccctatcaaaggcagtaccccctcagacccgaggcccaacaaagactccaaaagattgttaaggacctaaaagcccaaggcctagtaaaaccatacagtagcccctgcaatactccaattttaggagtacagaaacccaaaagacagtggaggttagtgcaagatctcaggattatcaatgaggctgtttttcctctatacccagctatacctagcccttatactctgctttcccaaataccagaggaagcagagtggtttacagtcctggatcttaaggatgcctttttctgcatccctgtacatcctgactctcaattcttgtttgcatttgaagatccttcaaacccaacatctcaactcacctggactgttttaccccaagggttcagggatagtccccatctatttggccaggcattagcccaagacttgagccagttctcatacctggacactcctgtcctttggtacgtgaatgaaatcacttttagctgtccgttcagaaaccttatgccatcaagccacccaaatgctcttaaatttccttgctacctgtggctacaaggttttcaaaccaaaggctcagctctgctcacagcaggttaaatacttaggactaaaattatccaaaggcaccaaggccctcagtgaggaatgtattcagcctatactggcttatcctcatctcaaaaccctaaagcaactaagagagttccttggcataacaggcttctgccgaatatggattcccaggtacagcaaaatagccagaccattaaatacacgaattaaggaaactcaaaaagccaatacccatttagtaagatggacacctgaagcagaagtggctttccaggccctaaagaaggcgctaacacatgccccagtgttaagcttgccagtggggcaaaacttttctttatatgtcacaaaaaacaaacaaacaaagaaaaaaaaaaacatgaatagctctaagagtccttgcgctggtctgagggacgagtttgcaacccgtggcatacctgataaggaaattgatgtagtggcaaagggtcagcctcattgtttacgggtagtggtggcagtagcagtcttagtatctgaagcagttaaaataatacagggaagaaatcttactgtgtggacatctcatgatgtgaatggcatactcactgctaaaggagacttgtggctgtcagacaaccatttacttaaatatcaggctctattacttgaagggccaatgctgcgactgtgcacttgtgcagctcttaacctggacacatttcttccacacaatgaagaaaagatagaacataactgtcaacaagtaattgctcaaacctatgccactcgaggggaccatttagaggttcccttgactgatcccaaccctaacttgtatactgatggaagatcctttgtagaaaaaggacttcaaaaagtggggtatgcagtagtcagtgataatggaatacttgaaagtaatcccctcactccaggaactagtgctcagctggcaaaactcactcgggcactagaattaggagaaggaaaaagggtaaatatatatacagactctaagtatgcttacctagtcctccatgcccatgcagtaatatggagagaaagggaattcctaacttctgagggaacacctatcaaacatcaggaagccattagggaattattattggccgtacagaaacctaaagaggtggcagtcttacactgccggggtcatcagaaaggaaaggaaagggaaatagaaaggaaccgccaagcagatattgaagccaaaagagctgcaaggcaggaccctccattagaaatgcttatagaaggacccctagtatggggtaatcccctctgggaaaccaagccccagtattcagaagaagaaatagaatggggaatctcacgaggacatagttttctcccctcaggatggcaagccaccgaacaaggaaaaatacctttgcctgcagctaaccaatggaaattacttaaaaccactcaccaaaactttcacttatgcattgatagcacccatcagatggccaaattgttatttactggaccaggacttttcaaaactctcaagcagatagttggggcctgtaaatttgtctcttccagaattaaagctgtaaaactacaaatcattcttcaaatggagccccagatgcagtccatgactaagatctaccgcggacccctggaccaccctgacagcccatgctccaatgttaacgacatcgaaggcacccctcctgaggaaatctcaactgcacaacccctactacaccccaggccagcaggaagcagttag

SEQ ID NO: 8041 - DNA, 369 bp, Homo sapiens
  SIMILAR (143)..(346): 381254mologous to Plasmid F 97 pct identical (1 gap) to pir:T00282,accession number AP001918,Smith-Waterman Score=76.
ttcggcacgtaggtacatctacaccctcaagggcatgtgcccgttaaacacaccccaacaggccttggatactccagctgtcgtcacctgcttcttggccgtgcctgttattaaaaaggtgaggtcggggcaaaggcaggtatgcaggtctctgatgcacttccacgcctaggaggcgtctcctagctatgtcagggtggcgcctgcagagccacacctaggaccacctggcctaggacgtagacttagagaccggctcgcgaggaaagatatcagacctggtccgtcattagtgccttccggtttgcaaaaacctaagtcaagtccccagccagactgccaggccgaatgaaaaaacccccctttcac

SEQ ID NO: 8042 - DNA, 2652 bp, Homo sapiens
  SIMILAR (136)..(1515): 291254mologous to Caenorhabditis elegans contains similarity to protein kinases (Pfam:pkinase.hmm, score: 149.36),accession number AF098504,Smith-Waterman Score=427.
atgagcaagttttcatgtgcatccctgacagccacagagagcgacgggacgccactcatggagcagtacgtgccctgcccggtctgcgagacagcctgggcccagcacacggaccccagtgagaaatcagaggatgtgcagtacttcgacatggaagactgtgtcctgacggccatcgagcgggacttcatctcctgccccagacacccggacctccccgtgccgctgcaggagctggtccctgaactgttcatgaccgacttcccggccaggctcttcctggagaacagcaagctggagcacagcgaggacgagggcagcgtcctgggccagggcggcagtggcaccgtcatctaccgggcccggtaccagggccagcctgtggccgtcaagcgcttccacatcaaaaaattcaagaactttgctaacgtaccggcagacaccatgctgaggcacctgcgggccaccgatgccatgaagaacttctccgagttccggcaggaggccagcatgctgcacgcgctgcagcacccctgcatcgtggcgctcatcggcatcagcatccacccgctctgcttcgccctggagctcgcgccgctcagcagcctcaacaccgtgctgtccgagaacgccagagattcttcctttatacccctgggacacatgctcacccaaaaaatagcctaccagatcgcctcgggcctggcctacctgcacaagaaaaacatcatcttctgtgacctgaagtcggacaacattctggtgtggtcccttgacgtcaaggagcacatcaacatcaagctatctgactacgggatttcgaggcagtcattccatgagggcgccctaggcgtggagggcactcctggctaccaggccccagagatcaggcctcgcattgtatatgatgagaaggtagatatgttctcctatggaatggtgctctacgagttgctgtcaggacagcgccctgcactgggccaccaccagctccagattgccaagaagctgtccaagggcatccgcccggttctggggcagccggaggaagtgcagttccggcgactgcaggcgctcatgatggagtgctgggacactaagccagagaagcgaccgctggccctgtcggtggtgagccagatgaaggacccgacttttgccaccttcatgtatgaactgtgctgtgggaagcagacagccttcttctcatcccagggccaggagtacaccgtggtgttttgggatggaaaagaggagtccaggaactacacggtggtgaacacagagaagggcctcatggaggtgcagaggatgtgctgccctgggatgaaggtgagctgccagctccaggtccagagatccctgtggacagccaccgaggaccagaaaatctacatctacaccctcaagggcatgtgccccttaaacacaccccaacaggccttggatactccagctgtcgtcacctgcttcttggccgtgcctgttattaaaaagaattcctacctggtcttagcgggcctcgccgatgggcttgtggctgtgtttcccgtggtgcggggcaccccaaaggacagctgctcctacctgtgctcacacacagccaacaggtccaagttcagcatcgcggatgaagacgcacggcagaacccctacccagtgaaggccatggaggtggtcaacagcggctctgaggtctggtacagcaatgggccgggcctccttgtcatcgactgtgcctccctggagatctgcaggcggctggagccctacatggccccctccatggttacgtcagtcgtgtgcagctctgagggcagaggggaggaggtcgtctggtgcctggatgacaaggccaactccttggtgatgtaccactccaccacctaccagctgtgtgcccggtacttctgcggggtccccagccccctcagggacatgtttcccgtgcggcccttggacacggaacccccggcagccagccacacggccaacccaaaggtgcctgagggggactccatcgcggacgtgagcatcatgtacagtgaggagctgggcacgcagatcctgatccaccaggaatcactcactgactactgctccatgtcctcctactcctcatccccaccccgccaggctgccaggtccccctcaagcctccccagctccccagcaagttcttccagtgtgcctttctccaccgactgcgaggactcagacatgctacatacgcccggtgctgcctccgacaggtctgagcatgacctgacccccatggacggggagaccttcagccagcaactggcaggccgggaagaatcctcgccgtcagagacctcatttgggtccccaggcgcggtggagatgttatcgtcattggcctggagaaggattctggcgcccagcggggccgagtcattgccgccttaaaagcccgagagctgactccgcatggggtgctggtggatgctgcccgggaggcaaaggacacttgtgtgtgcaacctttgaaaaagaaaacacagagtggtgcctggccgtctggaggggctggggcgccagggagttcgacattttctaccagtcctacgaggagctgggccggctggaggcttgcactcgcaagagaagtgccccacaactgcccagttaa

SEQ ID NO: 8043 - DNA, 1644 bp, Homo sapiens
  SIMILAR (1)..(714): 941254mologous to Homo sapiens sorting nexin 8,accession number AF121858,Smith-Waterman Score=1161.
atgccgcaggggaacccgctgctgctgtcccacaccctgcaggagctgctggccagggacaccgtgcaggtggagctcattccggagaagaagggcctcttcctgaagcatgtggagtatgaggtttccagccagcgcttcaagtcctcggtatacagacggtacaatgacttcgtggtcttccaggagatgctcctgcacaagttcccctaccgtatggtgcctgccctgccacccaagagaatgctgggagctgacagggagttcatcgaggccaggaggagagccctgaagcgcttcgtcaacctggtggcgcgacaccccctgttctccgaggatgtggtcctcaagctcttcctgtccttcagcggctcggatgtgcagaacaagttaaaggagtcagcacagtgcgtcggggacgaattcctgaactctgacatccaggctcagtttgccatcagccgggagctgatccggaacatctacaatagctttcacaagcttcgcgacagggccgagcggatcgcatcgcgggccatcgacaatgcggcagatcttctcatattcgggaaggagctaagtgcaatagggtctgacacgaccccgctgccctcctgggccgctctgaatagcagcacgtgggggtccctgaagcaggctctgaaaggcctgtctgtggaattcgcgctgctcgccgacaaggctgcacaacagacccctgctgtctccagagcttggatgctcccctcagtggcagctggagcccagggctttggaccgactcttcataccgcagatgcctctgagcaccgtgtgttcgggccgtgtgcactgtgcctggcctgcgcccccaccgagggctgctactggtggctgcccgccgtttgctgtgcactcactgccctgttgggctctctctgtggctgtgctgcccgcacagagccttgtgtgagggccgaagaggagcctgtgtccaccgctgcccccaccgccgagtgtggtgcttctgcgtgcagcctggggcggccgcctctcttcctggatcagcagcacggtaagcaggaagagaacgacgtggtggagaagctgaacctcttcttggatctgctgcagtcctataaggacctgtgcgagcggcatgagaagggcgtgttgcacaagcaccagcgggccctgcacaagtacagcctgatgaagaggcagatgatgagcgccaccgcgcagaaccgcgagccggagtccgtggagcagctggagtcccgcattgtggaggctgaaggagaaggggccgccctggctcagggagcacgctggtgttcgggccttggtgctcccgtcgccggctgggccgggtgcgaaaggcggctgtttgctccgcagcaggagaacgcgattcagacgatggagctgcggaactacttctccctgtactgcctgcaccaggagacgcagctcatccacgtctacctgcccctcacctcccacatcctccgcgccttcgtcaactctcagatccaagggcacaaggagatgagcaaggtgtggaacgacctgaggcccaagctcagctgcctctttgcgggaccacacagcaccctgaccccaccgtgctccccgccggaggacggcctgtgtcctcactag

SEQ ID NO: 8044 - DNA, 1145 bp, Homo sapiens
  SIMILAR (1)..(303): 991254mologous to Homo sapiens sorting nexin 8,accession number AF121858,Smith-Waterman Score=511.
gtcctgcacaagttcccctaccgtatggtgcctgccctgccacccaagagaatgctgggagctgacagggagttcatcgaggccaggaggagagccctgaagcgcttcgtcaacctggtggcgcgacaccccctgttctccgaggatgtggtcctcaagctcttcctgtccttcagcggctcggatgtgcagaacaagttaaaggagtcagcacagtgcgtcggggacgaattcctgaactgtaagctggctaccagggccaaggacttcctcccagctgacatccaggctcagtttgccatcaagccgggaagctgatccggaacatctacaatagctttcacaagcttcgcaacagggccgagcggatcgcttcgcggccatcgacaatgcggcagatcttctcatattcgggaaggagctaagtgcaatagggtctgacacgaccccgctgccctcctgggccgctctgaatagcaagcacgtggggggtccctgaagcaggctctgaaaggcctgtctgtggaaatttgcgctgcttcgccgacaaggctgcacaacagggtaagcagggaggagaacgacgttggtggagaagctgaacctcttcttggatctgctgccagtcctattaaggacctgtgcgaagcggccatgagaagggcgtgtttcaacaaagcaccagcgggcccttgcacaaagtacagcctgattgaagaggccagattgattgagcgccaccggcgcagaaccgcggagcccggaggtccgtggaagcaagctgaagtcccgcattcgtggagccagggagaacgcgatttcagacgatggagctgcggaactaccttctccctgtactgcctgcacccaggagacgcagctcatccacgtctacctgcccctcacctccccacatcctccggcgccttcgtcaactctcagatccaagggcacaaggagatgagcaaggtgtggaacgacctgaggcccaagctcagctgcctctttgcgggaccacacaggacccctgaccccaccgtgctccccgccggaggacgggcctgtgtcctcactagcgcctgaggctgaggtggtgctccctgcggccgcactaaaacctctttccaaaaaaaaaaaaagtcgac

SEQ ID NO: 8045 - DNA, 1232 bp, Homo sapiens
  SIMILAR (430)..(681): 361254mologous to Mycobacterium tuberculosis proline-rich mucin homolog,accession number AF071081,Smith-Waterman Score=106.
atgccccaggtccctgcccctccctgcccagtatcacttcagggcaccctggggagccgcggccagaccttcctgctcctgcctcttctcaccccagccctgcaactcaattactcccagctcacttctgctgcggcagctggcggtggctgcggccggagggtgtgggggccacggagccccagctctttccagtacaggctggcagcaggtctgcaaatctccccaggtcaggtctgtccccgacaacccaaccacagcagattctacggcaagtttagcatggaagtttggggaggtgctcagaagccacatcaactgtggctacaaatgaaaacaacagccactgcttccggtgcatgctcagaggcgggcacaggtttccgcacccgccctcctgctgggctgagctgcggccagcactccctgccacagcctccccgctgctcagacttgtctctggggctccatccggggcgcctgccctgtgataggggccactgcccacccctgccccctgtcacccctaccccagataaggcaggcccaatccttgacccggcccaaagctgtcccttctgtagccccatcccagccccaccaaagcaaccctcacctccagccaggttcccagagatgaagcggaagaagacgctgatgatgcctcccagtgagggcagcttatctctggccagtggaatggaagcatctgtcttccagagacttctgagccgatgcacctgtcttgatcaagccactgttatttggggtttctgttatatgcaagttcaggcaagccaagggatcccttgcagagggaaagacgagctgctgcgcctcgcacccctgccagtaaaggaagccagaagaacaaagccccgaagcccgggaaaacacgcaaaggcccctccctcatccagtgcctgctcaccgcacctctgctgctcctcaccaatactccaggctctggattagaggctttaaattcccatgggagaatgggtccccagcaggaggcagcaggggttctgctaaactggaagctgggacggccgcctggccatgctgggcccctcacaccactcagaccaactggcatcaagggccatcggccagtgaatgaccctattatcgaggggagcagggaggactctgcttcaaatccagtgaattctccagggagcctagcaacactgccagttacagtgatgaaagtcagtgggggcttctag

SEQ ID NO: 8046 - DNA, 1036 bp, Homo sapiens
  SIMILAR (52)..(138): 621254mologous to Homo sapiens prostate stromal protein ps20,accession number AF169631,Smith-Waterman Score=104.
  misc_feature (1)...(1036): n = a,t,c or g
tccctgcaggcaccgcgccggaattcccgggctgaacacacacgcacgctgaactccgagtgcccgcgacgccgtcgctgttgtatcaagggatgcacctacacctgactggacgctgtgccagcccccgccagtcttagactggctggtgcagccgaaacctcgatggcttggtggcaatggctggctcctggatggccctgaggaggtgttacaagcagaggcgtgcagcaccacggaggatggggccgaacccctgctctgtccctcgggctatgagtgccacatcctgagcccagggtgacgtggccgaaggtatccccaaccgtgggcagtgcgtcaagcagcgccggcaagcagatgggcgaatcctacgacacaaactttacaaagaatatccagaaggtgactcaaagaatgtggcagaacctgggaaggggacaacagaggcactttcagtaaagcaacggcnaggcagctaggtttgcaagaacattcctctactttctgctaagccttgggaaacagttggggaaaagtagtttgacccttcacagtttcacatttcagcttcagcagagccaagaccccagagatgctttagagacaggacacctggcccatccaaaccccagtttggccccagccttggttgggtgactttgtgggagccacttaacagctctggggtccctgtttttaccatcctgggaagcaaggccctgcagctccacgagacctttaccccgggaagaagcggcccaccccatgaaagcatttctgaagcccctttcctaagacaaggctcagcatccttgatatttttgacagattcctcccaagtctggctctgggaggtatgtacccatctcaaatgttcccaagataaattcatccttcaggaaatggaaatgaacttgcttactaatgtgtgattcctagttgtagccaccggatgtgctgaggcctaaatgtttagcaggtgggaggaggccacagaacaataaaaacaaccgaaataagatgccgagaaaaa

SEQ ID NO: 8047 - DNA, 424 bp, Homo sapiens
  SIMILAR (31)..(183): 311254mologous to Schizophyllum commune pheromone precursor Bbp1(3),accession number U74495,Smith-Waterman Score=69.
caaataatcacaggctggacaggacactgcccagggactattgtcatgctgccacagcttacaccacccatgagctggcgtttggtgacttcagactccctactgaaggccaccaggagctatgccacaacagccacctcatttattttagaagagacaagtgaacacactgcacttggagaagcgtggattcacttacaggggtgacacacaggtgatgcctgccccagggagcctgcagtgctcatgatggtcttacattttaggatgtaaagtgttgagtctagcatttgccattcattgctaactgcttctgtgattcctaggacccagactctgagctgatactgaatgagaaaaagcccggggtaaggtctgggagtcctggagagataatgaagagaggtcgctcgctgccttttgt

SEQ ID NO: 8048 - DNA, 558 bp, Homo sapiens
  SIMILAR (262)..(540): 481254mologous to Rattus norvegicus inositol polyphosphate 4- phosphatase,accession number U26397,Smith-Waterman Score=207.
atgtgcttggtcacaagacagatgaggacagagggtaggcccttcttggcccaagttggaggtgagtggataaaaagaattctggcctctgacaaagcagacagtttggcatcacagctgagcagctgtggcccctttaacaggtatcagctcagagtctgggtcctaggaatcacagaagcagttagcaatgaatggcaaatgctagactcaacactttacatcctaaaatgtaagaccatcatgagcactgcaggctccctggggcaggcatcacctgtgtgtcacccctatgcagctgaggatgacgctggtagtgagttctctagggaagggcacctgtgggctctcactggctcagtggcacctgtgcaagagggaacacatgggggcagcccacctgtggaagggtggctggctgctaccagaacttgtgagggttgtcgaagagaaaatacaatgaagaatgttggaagtcgcaaatatgcatttaattccctgcagctgaaggctttccccaagcattacaggcctcccgaagacttacggaaaagttga

SEQ ID NO: 8049 - DNA, 310 bp, Homo sapiens
  SIMILAR (129)..(4): 401254mologous to synthetic construct MDV homologue of HSV-1 IE-68,accession number A04084,Smith-Waterman Score=63.
ttttttttttaaagatacatgaaaagggttttatttatttaacaaacagacaattgaacaaacaaacaatggaagcaagtcatttgccaaaaggaacacagagggtcatgatgatctactcctccaaggatttcagggttcccagacgcctagttttctgtctagttctggaagatgttattcttggggagcaataggtcctcgagtttggggctctttcaggttctctctccatttccccattctgctgcaaacaggcagtcctcagctctggacttctggatcacgacgtcgatatccttctgaattc

SEQ ID NO: 8050 - DNA, 375 bp, Homo sapiens
  SIMILAR (165)..(88): 421254mologous to Human immunodeficiency virus type 2 gp105,accession number AJ400307,Smith-Waterman Score=66.
  misc_feature (1)...(375): n = a,t,c or g
ggtcatgatgatgctactcctccaaggatttcagagttcccagacgcttagttttctgtctagttcttctgcaagatgttattcttggggagcaataggtcctcgagtttggggctctttcaggttctctctccatttccccattgtgcaccatccctgccctggtggagcccccgtgcggaccacagtnnnnnnnnnnnnnnnnnnnnnnnnnnnnnnnnnnnnnnnnnnnnnnnnnnnnnnnnnnnnnnnnnnnnnnnnnnnnnnnnnnnnnnnnnnnnnnnnnnnnnnnnnnnnnnnnnnnnnntcagggcgttcagcttcccttggggccccggccggctaaaaatgaataccgagccgcccacgcgtccg

SEQ ID NO: 8051 - DNA, 376 bp, Homo sapiens
  SIMILAR (165)..(88): 421254mologous to Human immunodeficiency virus type 2 gp105,accession number AJ400307,Smith-Waterman Score=65.
  misc_feature (1)...(376): n = a,t,c or g
ngtcatgatgatgctactcctccaaggatttcagagttcccagacgcctagttttctgtctagttcttctggaagatgttattcttggggagcaataggtcctcgagtttggggctctttcaggttctctctccatttccccattctgcaccatccctgccctggtggagcccccgtgcggaacacannnnnnnnnnnnnnnnnnnnnnnnnnnnnnnnnnnnnnnnnnnnnnnnnnnnnnnnnnnnnnnnnnnnnnnnnnnnnnnnnnnnnnnnnnnnnnnnnnnnnnnnnnnnnnnnnnnnnnnnnnnnnnnnnnnnnnnnnnnnnnnnnnnnnnnnnnnnnnnnaaagggacgccgacccgcccacgcgtccg

SEQ ID NO: 8052 - DNA, 1098 bp, Homo sapiens
  SIMILAR (511)..(434): 381254mologous to Homo sapiens Human phosphodiesterase interacting protein, myomegalin,accession number Y71159,Smith- Waterman Score=43.
tcaacgagacaccgcacgaagacggcgattgttcctgaaggcagattcaaatcgccttcgaggccgcaagcaggcatcaggacagaacactacttcctcccaccgccacacaggctcaagagacactatctttttgaccagcagcttgccctccacaatctgctgtcttagggcactgtagtcatcaatgtggccaatgacatggcggccatgcttattggcaaaggagccatcagtagcatcaccctccagcttgggaggggccttcattactggagaagtatccaaacccaagccatcatccctgccctggtggagcccccgtgcgggacacaggatccgaagatggcagcggaagctccgcagcggccccgaaagcgactgggcagggtgggcacaggctccctcaggggatcctctacagtcaacctggttcttgccccccagcctttcctgctgttttaaggacttccggtggctgcgcttcttgcatggttcctggaaggcaagggtcacaaggctggagtacatggcagagcccttagggatttcaccatccatgtcaacagccaagccaatacgctgttgctccaatacgtaaaaggcacttctgtagggctggcatgagtcagtcagtccaagataaactgaaggagttgaataacatctatccagtgagtcttgcaagacttcaggctctttctcatccagcagctccctgctgagccctagtctctgctcttcttgactttgacccaactctttcaagtccacccgtgttttcatgcttttctcataggaatccccatccagaactagtaaagtcactgaattcccactctttctgaccagatccacaacaagagacactatctttttgaccagcagcttgccctccacaatctgctgtcttagggcactgtagtcatcaatgtggccaatgacatggcggccatgcttattggcaaaggagccatcagtagcatcaccctccagcttgggaggggccttcattactggagaagtatccaaacccaagcctttctgttctgagcctgccctcagatagaaaccatagccattgcttcctttcttcat

SEQ ID NO: 8053 - DNA, 916 bp, Homo sapiens
  SIMILAR (353)..(631): 361254mologous to Caenorhabditis elegans collagen,accession number M23559,Smith-Waterman Score=110.
ttaaagatacatgaaaagggttttatttatttaacaaacagacaattgaacaaacaaacaatggaagcaagtcatttgccaaaaggaacacagagggtcatgatgatctactcctccaaggatttcagggttcccaaacccctagttttctgtctagttctggaagatgttattcttggggagcaataggtcctcaaatttggggcctcttcaggttctctctccatttccccattctgctctcttcaaaggactaaaagctaaaggcgacaaaggattcattcgacaagtcctagtcgtgcgcccttgtgagtgccagaccctgctccctgccaggggacccacgagcgaccctcaccaccatccctgccctggtggagccccgggcggaacacaggatccgaagatggcagcggaagctccgcagcatcccaacagcgactgggcagggtggatacaggctccttcactgggtgaaggcggcacaaagaaccggaagaaccatcccgggagcccaccgggcgttcagcttcccttgggaccccaggcgtctcgggctgggtcgccgaccggggagtttctggggtctctccctctggctccagaatctcctaacgcgcaggtgtccaacgtgaccagcgcgattcaccgctctaatatctctggttttccaaggacttgctcagtcgtcctgccaggcgggccctgcaaacaggcagtcctcagctctggacttctggatcacgacgtcgatatccttctgaattcggtcttgccttgaacacatccccattaaataaatccttggaaaagaagcagccgctatttccaccccacccccctcgcacgctttcagctttcgtaaatattcagttaaaaatgaaacctctggccgaggcaggggctgaaggccaag

SEQ ID NO: 8054 - DNA, 1401 bp, Homo sapiens
  SIMILAR (1098)..(1205): 331254mologous to Homo sapiens unnamed protein product,accession number AK000726,Smith-Waterman Score=40.
ctataggaagggcgcacgcacgaaacttcctccgtcccttgcatcctcagggcccgcccggcaggacgactgagcaaggccttggaagaccggagagattggagcggtaagtcgcgctggtcacgttggacacctgcgcgttgggagattctggagccagaaggatagccgaatggccttcgcccgccctgcccctcgcctgcttcagaaacccccggaaacgccccggtctgcgacccgggttcgagcagccagggggctcaagggaagctgaacgcctggtgggctcccgggatggctcttcccgttctttgcacagccttcacccagtgagggagcctgtgccctccctgcccagtcgcttttggggccgctgcggagcttccgctgccatcttcggatcctgtgttccgcacgggggctccaccagggcagggatcgtggcaatataaagtcctggttcacgctcaggaacgagagctgacccagttaagggagaagttgcgggaagggagagatgcctcccgctcattgaatgagcatctccaggccctcctcactccggatgagccggacaagtcccaggggcaggacctccaagaacagctggctgaggggtgtagactggcacagcaccttgtccaaaagctcagcccagaaaatgacaacgatgacgatgaagatgttcaagttgagttggctgagaaagtgcagaaatcgtctgcccccagggagatgcagaaggctgaagaaaaggaagtccctgaggactcacaggaggaatgtgccatcacttattcaaatagccatggcccttatgactccaaccagccacataggaaaaccaaaatcacatttgaggaagacaaagtcgactcaactctgattggctcatcctctcatgttgaatgggaggatgctgtacacattattccagaaaatgaaagtgatgatgaggaagaggaagaaaaagggccagtgtctcccagaagcccgaggaaacgccctcgtccgcgacccgagccgccgcctcgaggctcaggggaagctgaacgctcggtgggctcctgggatgcatcttcgcgttctttgcgccgccttcacccactgagggagcctgtgcccaccctgcccagtcgctttcggggccgctgcggagcttccgctgccatcttcggatcctgtgtcccgcacgggggctccaccagggcagggatgatgggtagcaaggaagtcggcaaaggcggcgaccctggcgaggaaacttccccagtagctttgttcagcgaatatcccaacgcgcaggtgtccaacactacaattcaccgctctaatctctccggttttccaaggacctggaacttgcacagtcgtcctgccaggagggcccctgaagattga

SEQ ID NO: 8055 - DNA, 504 bp, Homo sapiens
  SIMILAR (274)..(360): 311254mologous to Human herpesvirus 4 latent membrane protein 1,accession number AF085646,Smith-Waterman Score=43.
tttttttttaagtttaaagatatatgaaaagggttttatttatttaacagacagacaatggaaacaagcaaaacaatgggagcaagtcctttgccaaaaggaacacagagggtcatgatgatgctactcctccaaggatttcagagttcccagacgcctagttttctgtctagttcttctggaagatgttattcttggggagcaataggtcctcgagtttggggctctttcaggttctctctccatttccccattctgcaccatccctgccttggtggagcccccgtgcggaacacaggatccgaagatggcagcggaagctcctccgcggccccgagagcgactgggcagggtggatacaggctccttcactgggtgaaggcggcacaaagaacgggaagaaccatcccgggaggccaccaggcgttcagcttccccttgggacctcaggcggctcgggctgggtcgccgaccggggagtttctggggtctctccctctggct

SEQ ID NO: 8056 - DNA, 1874 bp, Homo sapiens
  SIMILAR (411)..(515): 341254mologous to Caenorhabditis elegans weak similarity to collagens; glycine- and proline-rich,accession number AF000298,Smith-Waterman Score=46.
acatcgatacgacttttttttttttttttttttttttttacatgaaaagggttttatttatttaacaaacagaccaattgaacaaacaaacaatggaagcaagtcatttgccaaaaggaacacagagggtcatgatgatctacttcctccaaggatttcagggttcccagacgcctagttttctgtctagttcttctggaagatgttattcttggggagcaataggtcctcgagtttggggctctttcaggttctctctccatttccccattctgctacaatagataaacaaacaaaaacaattctcacttccagaagatcccgcctgtacgtctgcacgagcccttcaggaggtctggatgtctggttcacaactcccctgcttcttttccagcttttgcttttcccttcccccgctcccgccctaccgccccacgacccgaccaccgcccagctgagccccagaggctccacagcgcagaaggtgcaccagaggccgtgtcagttgccctccctgccggggctcttcaaaggactaaaagctaaaggcgacgatgaattcattccacaagtcctagtcgtgcgccctggtgagtaccagaccctgctccccgcgaggggacccacgagcgaccctcaccaccatccctgccctggtggagcccccgtgcggaacacaggatccgaagatggcagcggaagctcctcagcggcccggaaagcgactgggcaggaatctcctaacacgcaggcgtccaacgtgaccggcgcgactcaccgctctaatctctctgggtttccaaggccttgctcagtggtcctgcccgggcaccggcagcagttttccgtctgtgcctactccacctgctgtccttgttgggtcagcgaacatcgcctccgtctaccactcaatcagcaaacgggaccgccctcgaggacctcacccgccgcttacccccctaacaaattcgcgggcatcgcctccggtcgcctcttcccaaggcctaacgagcgccttcgctggcaacggagttattcgcagctcagcccgatgggcgtctccggggtggcgacgggaaagaagagcctgcaagcgacacaccgagggctccgcgagggacaccgaggccacgagtccgaaggcctggagcgagttgcagcgacccggccgcagctcaccactggactagagatgcgcctttgcgaggtggcagcaagtgaccagtcggtcgtgcgtcgccagagaagctttatgggccacttccttcggcatccccgggggcaggtgcgcggtgcccggggaagaagagggtttgactgcggttctcgacccccggcgaccaacctccaccccgacgacctgaacccaactccctccccaagcactggagatggggcttttccaagggctggggatcttgctgtcctgagaacagctgagcaagggggtcgaggaggagcttgggtggtggaggagaggaaaccggcatgccctgtggcctttatcctgctggtgtggaacagtcagagccctgcagggctgcagagcttctgtactgggcggcatcccagcctgagtgtcagagctcagagagcaggcaccggagcaagtagagaggagggcaccttttggacagaacctgtgggacaagagcgacgtctcatccgttcaggttcctcacaaaatgagagtcaggaagatcagggtgcagacctgatttcccacgaagggctgaaagcagacaaccggagggagagcagcacctgggccaatgaggtagaagacagaagaccacagtgtacttctgccctcaacctcaccccctcccacctacattctccacaccccctgaccaccttcttcagaaacgtaa

SEQ ID NO: 8057 - DNA, 1029 bp, Homo sapiens
  SIMILAR (764)..(889): 501254mologous to Volvox carteri f. nagariensis hydroxyproline-rich glycoprotein DZ-HRGP,accession number AJ242540,Smith-Waterman Score=94.
atgcaaggattaaatgagttaatgcaggtaaaaactcttggagcagtgcctgcactcagtaagcacctgggaaacaccccagtaccgaagacctccctcgcccagctagaggggaagcagggagcaaccctgctctttttcatctcccagggatacacccggggaaaaccactggctgtcactgccgcagagggactaggctggcccgccagtgagacgagcgctgggggcttcatgaccccacgccacgcggcgtcccaaccgtggaggtgcctcctgacccgacctgcagccaaaccacacgcgaccctttcgcccgtttccttcgaagaacccgtgtttccgctttccagaacctctaagagcacccaccttggtcccggggcccttacccccgacacaccccgggcgggtcccgcacttggagcggaacctgagtgcgctgggcttggggaagtcggaaggattaaagagaaacccatgcgtcgaaccgctgctccaacgcccatcaggttccctaagatcacaggcactcttccactcagactgctgctgatcatgctctgctcggtatgcgggaccagtcattgtctgggcagtcgcctggacctaagtctcctgacgcggacgaccagttgcaaaacagagaccacactgagactgagcaacgtatcagcagcggtcgcagctctgcgcttgcgcctgagagccagctacagcagggctgtgctgggattcactttcgtggaaggttttgcaaagcccctcccctggcctcgggacctgcagcccaccatgcctgagcctcccaccccctccgtgggctcctgtgcggcccaagcctccccgatgagcgccgccccctgctccacggtgcccagtcccatcaaccacccaagggctgaagagtgtgggcgcacggcgcgggactggcaggcagctccacttgcagccctggtgcgggatccactggatgaagccagctgggcccctgagtctggtggggacgtggagaacctttatgtctag

SEQ ID NO: 8058 - DNA, 981 bp, Homo sapiens
  SIMILAR (156)..(731): 311254mologous to Thermus thermophilus competence factor ComEA,accession number AF319938,Smith-Waterman Score=103.
ttacagagggaggagccagccacagggcccatcccgtcggtcccgcccctcggggcgaaaaggcattctggagcaaccgaacctgctaacggaacttgggcgcgtaggcggggcccgggtcgagattcgtccaatcaaagctctggcgggggcgaacgcagccagttgcgacatcgtggttggcggcggctgagccggccgctcttgcccccgggagctgccagcccactggctggggaggaccccgaacggaacgccggctgggtggcggggcggggccgcgcccatgcgtccgaagcgtgggccaatgaacggcggcggctgcggcccgggggcggggtccggggcgggaggagaagcgttgggccgcggtcgcggggccgtctcaggctgccgtcccgcccctcccgtccggccgccgccgccgccaccgccgccaccgcctgggggttggttgaggcggacggcggggtccgggccggagtacgtcgttcccgctgcgctaggggaagcgggcaggtgagtgctggcggcggtctctgcgcccgcgcggcccgcggggggaaactcgcgccgcgtctccgagctctgcgaggccgtccctcgccctggccagcgcccctcggccgaagtccggcccgcgcccccgccagggtccccgccggccgctgtggccccggggcttgaaggggcaggtgtgcgctcgggggccagggcgaggagggcccggcggggtcggagggcgccggtcggcctctgcccgggcgcccagggtgcccggggaccagcccccgcctcctcccgcgccgtccagttaggaagacggacgtaggaaataggtcgtctttcttcccacgcgcccctggccgtgctccacacgcgcagtgccctactcaattcctgatcatataataaatgcccaaatgacatgattgtgatggggacgatcatattggagaacttccataggacacaggacat

SEQ ID NO: 8059 - DNA, 454 bp, Homo sapiens
  SIMILAR (178)..(453): 911254mologous to Oryctolagus cuniculus anion exchanger 4b,accession number AB038264,Smith-Waterman Score=445.
ttgtacgtcttcatctacgatgctgagggcaaaatgctgaacttgacccatacctatcctatccagaagcctgggtcctctgcctacgggtgcctctgccaatacccaggcccaggaggaaatgagtctcaatggataaggacaaggccaaaagacagagacgacattgtaagcatgcccacactccctgggcgtggctggctggtgtcaccttttggagccaacccctggtggtggagtgtggcagctgccctgcctgccctgctgctgtctatcctcatcttcatggaccaacagatcacagcagtcatcctcaaccgcatggaatacagactgcagaagggagctggcttccacctggacctcttctgtgtggctgtgctgatgctactcacatcagcgcttggactgccttggtatgtctcaaccactgtcatctccctggctcacatgg

SEQ ID NO: 8060 - DNA, 390 bp, Homo sapiens
  SIMILAR (376)..(2): 741254mologous to Homo sapiens serologically defined breast cancer antigen NY-BR-16,accession number AF308285,Smith-Waterman Score=484.
tatgttcatttacacttctgccttcatctagcaatttacgaacagcattaacatccccatctgaacaagcttctgttagactgcgagtgtccacttgtcctgcattgtggctgttttctgctttcatccgtgtcagtgcagcagcagcttcatccagtgcacaactaactgaggatgtcagtctccggagtacctcaggatctgctgcttctagcaatgcttctagtcgtgcctgtgtctctggatccacagtgcgtaagtctgctccttctgcagtacttgataagaatatctctgatgttgttttaagcactgggttatccagatcttcttggtccaaaataaatgattcaacctcggacacttcgtcctcgtcactgccagaggcac

SEQ ID NO: 8061 - DNA, 850 bp, Homo sapiens
  SIMILAR (1)..(36): 831254mologous to Oryctolagus cuniculus anion exchanger 4b,accession number AB038264,Smith-Waterman Score=51.
ctggcacctgtgttcaagttaattccaatgcctgtgtcaatggcatcttcctgtatatggggtgggcagcgctcagcagcattcagttcactaatagggtgaagctgttgttgatgccagcaaaacaccagccagacttgctactcttgcggcatgtgcctctgaccagggtccacctcttcacagccatccagcttgcctgtctggggctgctttggataatcaagtctacccctgcagccatcatcttccccctcatgttgctgggccttgtgggggtccgaaaggccctggagagggtcttctcaccacaggaactcctcgggctggatgagctgatgccagaggaggagagaagcatccctgagaaggggctggagccagaacactcattcagtggaagtgacagtgaagattcagagctgatgtatcagccaaaggctccagaaatcaacatttctgtgaattagctggagtaggagtctgggagtggagaccccaggaaacagcatgaggtgcttactcaggaagtcaggacatttttggcctttggcttaacttccagatgctcagtcggcttggggaaggactgaagggcagctgccaagacctcagttacctcctgacctgagggtggagagtggcaggaagcaagcatgtttgctgtgcacttaggaaaggctggtgagccagagggactgatcaggccccattcactctctactcattaaaaggtcctgagccacgaagcgcttcccattttgaactttctgtcctcacagattctgtttgacagaatctaagggccatcagggaactcttttcatcttgcaaagagaaaaagccagtt

SEQ ID NO: 8062 - DNA, 3402 bp, Homo sapiens
  SIMILAR (1693)..(3093): 951254mologous to Homo sapiens unnamed protein product,accession number AK000295,Smith-Waterman Score=2227.
atgcctgcagattcatttgaatctccattgacgctagctgcctgtggaggacatgttgaattggcagctctacttattgaaaggggagcaaatcttgaagaagttaatgatgaaggatacactcccttgatggaagctgcccgggaaggacatgaagaaatggtggcactactcttagcacaaggagcaaatataaatgcccagacagaagaaactcaagaaactgctcttactttggcttgctgtggaggattttctgaagttgcagactttcttattaaggcaggggctgatatagaacttggctgctccacacctctgatggaggcatctcaggagggacacctggaattggttaaatatttgctggcttctggcgctaatgtgcatgctacaacagcaacaggagacacagccttaacctatgcttgtgaaaatggacatacggatgttgcagatgttttacttcaagcaggggctgatttagacaagcaggaggacatgaagactattttggagggcatagatccggccaagcatcaggaacatgaatctgaaggtggaagaacacctttgatgaaagctgcaagagctggtcatttgtgcactgtgcagtttcttattagcaaaggtgccaatgttaacagggctacagccaataatgatcatacagtagtgtcgctggcatgtgcaggaggccacctggcagttgttgagcttctcttggctcatggggctgaccctactcatcgactcaaggatggttcaacaatgctcattgaagctgcaaagggtggccatactaatgtagtttcttatctgttggattatccaaataatgttctgtcagttcccaccacagatgtgtctcagctccctccaccttctcaagatcagtctcaggtgccacgtgtgccaacgcatacacttgccatggttgtacctccccaggaacctgacagaacttcacaggagaactctcctgcccttttaggagtgcaaaaaggtacatccaagcagaagtccagttccctccaggtagcagatcaggacctactgccatcttttcacccataccagcctttggagtgcatagtagaggagactgaaggcaagctgaatgaactgggacaaagaattagtgctattgaaaaagcacagcttaagtcactggagttaattcaaggtgaacctctgaacaaagataagatagaagaacttaaaaagaacagagaagagcaagtccagaagaagaagaaaatattgaaagaactgcagaaagtggaaaggcagttgcagatgaaaacacagcagcaatttaccaaagaatacttggaaaccaaaggtcagaaagacacagtgtctctacaccaacagtgctctcatagaggagtcttcccagaaggggaaggagatggtagtctcccagaggatcacttttcagagttacctcaggttgacacaatcttatttaaagataatgatgttgatgatgagcaacagtctccaccatcggcagaacagattgattttgtcccagtccagcctttatcatctccacagtgtaacttttccagtgacttaggttctaatgggacaaattctcttgaacttcagaaagtatcaggtaatcagcagattgtaggacagcctcagattgctattactggacatgatcaggggctgttagttcaagaaccagatggactaatggttgcaactccagctcagacgcttaccgacactcttgatgacctgatagcagctgtgagtaccagagtgcccactggttccaacagttcttctcagaccacagagtgtcttacacctgaatcctgttcgcagactacaagcaatgtggcttcccaatcgatgcctcctgtgtatccttcagttgacattgatgcacatactgagagcaatcatgacacagcattaacactagcttgtgcaggtggtcatgaagaacttgtatctgtgctcattgcacgggatgccaaaattgaacacagagacaaaaaaggtttcacaccactaatcctggcagcaacagcagggcatgttggagttgttgaaatccttttggataaaggtggagatatagaagcacagtctgaacgaactaaggatactccgctttcattggcatgttctggtggacgtcaggaggtggtagacttgctgctggctcgaggtgcaaataaagaacataggaacgtatctgattatacaccactgagtctagctgcgtctggaggatatgttaatatcattaagattctgcttaatgctggggcagaaattaattcaaggactgggagtaaactaggtatttctcccctgatgttggctgcaatgaatggacatgttcctgcagtaaaattgctgctcgatatgggttcagacattaatgcccaaatagagaccaatcggaacacggctctcaccctggcctgtttccagggccgagcagaagtagtgagtttgcttctggaccgaaaagccaatgttgaacatagggcaaagacgggtcttacccccttgatggaagcagcttctggagggtatgcagaggttggaagagttcttcttgataaaggagcagatgttaatgctccccctgtgccttcctcaagagatactgctttaacaatagcagcagacaaaggtcactacaaattttgtgaactcctgattcataggggagcccacattgatgttcgtaacaaaaagggaaatacgccactttggctggcatccaatggaggtcattttgatgttgtgcagttgctagtgcaagcaggtgctgatgtggatgcagcagataaccggaaaatcacacctcttatgtcagcatttcgcaagggtcatgtaaaagttgttcaatatttggtaaaggaagtaaatcagttcccttctgatatagaatgcatgagatacatagcaacaattacagataaggaactgttgaaaaaatgtcatcaatgtgtcgaaaccattgtgaaggctaaagaccagcaagctgcagaagcaaataagaatgcgagtattcttttaaaggaacttgatctggaaaaggaacaaagttcctcaccagcaacggaacaaagctggacggagaatgactttgacgagctgagagaagaaggcctcagacgatcaaattactctgagctacgggaggaaattcaaaccaaaggcaaagaagttgaaaactttgaaaaaaatttagaagattgtataactagaataaccaatacagagaagtgcttaaaggagctgatggagctgaaaaccaaggctcgagaactacgtgaagaatgcagaagcctcaggagcccatgcgatcaactggaagaaagggtatcagcgatggaaaatgaaatgaatgaaatgaaatga

SEQ ID NO: 8063 - DNA, 4614 bp, Homo sapiens
  SIMILAR (385)..(1800): 801254mologous to Oryctolagus cuniculus anion exchanger 4b,accession number AB038264,Smith-Waterman Score=1995.
atgaagctgccaggccaggaagggtttgaagcctccagtgctcctagaaatattccttcaggggagctggacagcaaccctgaccctggcaccggccccagccctgatggcccctcagacacagagagcaaggaactgggagtacccaaagaccctctgctcttcattcagctgaatgagctgctgggctggccccaggcgctggagtggagagagacaggcacgtgggtactgtttgaggagaagttggaggtggctgcaggccggtggagtgccccccacgtgcccaccctggcactgcccagcctccagaagctccgcagcctgctggccgagggccttgtactgctggactgcccagctcagagcctcctggagctcgtgggctctactcatccaagaaaggcttctgacaatgaggaagcccccctgagggaacagtgtcagaaccccctgagacagaagctacctccaggagctgaggcagggactgtgctggcaggggagctgggcttcctggcacagccactgggagcctttgttcgactgcggaaccctgtggtactggggtcccttactgaggtgtccctcccaagcaggtttttctgccttctcctgggcccctgtatgctgggaaagggctaccatgagatgggacgggcagcagctgtcctcctcagtgacccgcaattccagtggtcagttcgtcgggccagcaaccttcatgaccttctggcagccctggatgcattcctagaggaggtgacagtgcttcccccaggtcggtgggacccaacagcccggattcccccgcccaaatgtctgccatctcagcacaaaaggcttccctcgcaacagcgggagatcagaggtcccgccgtcccgcgcctgacctcggctgaggacaggcaccgccatgggccacacgcacacagcccggagttgcagcggaccggcagcgatttcttggacgccctgcatctccagtgcttctcggccgtactctacatttacctggccactgtcactaatgccatcacttttgggggtctgctgggagatgccactgatggtgcccagggagtgctggaaagtttcctgggcacagcagtggctggagctgccttctgcctgatggcaggccagcccctcaccattctgagcagcacggggccagtgctggtctttgagcgcctgctcttctctttcagcagagattacagcctggactacctgcccttccgcctatgggtgggcatctgggtggctaccttttgcctggtgctggtggccacagaggccagtgtgctggtgcgctacttcacccgcttcactgaggaaggtttctgtgccctcatcagcctcatcttcatctacgatgctgtgggcaaaatgctgaacttgacccatacctatcctatccagaagcctgggtcctctgcctacgggtgcctctgccaatacccaggcccaggaggaaatgagtctcaatggataaggacaaggccaaaagacagagacgacattgtaagcatggacttaggcctgatcaatgcatccttgctgccgccacctgagtgcacccggcagggaggccaccctcgtggccctggctgtcatacagtcccagacattgccttcttctcccttctcctcttccttacttctttcttctttgctatggccctcaagtgtgtaaagaccagccgcttcttcccctctgtggtgcgcaaagggctcagcgacttctcctcagtcctggccatcctgctcggctgtggccttgatgcttttctgggccctaaccacaccaaagctcatggtacccagagagttcaagcccacactccctgggcgtggctggctggtgtcaccttttggagccaacccctggtggtggagtgtggcagctgccctgcctgccctgctgctgtctatcctcatcttcatggaccaacagatcacagcagtcatcctcaaccgcatggaatacagcactgcagaagggagctggcttccacctggacctcttctgtgtggctgtgctgatgctactcacatcagcgcttggactgccttggtatgtctcagccactgtcatctccctggctcacatggacagtcttcggagagagagcagagcctgtgcccccggggagcgccccaacttcctgggtatcagggaacagaggctgacaggcctggtggtgttcatccttacaggagcctccatcttcctggcacctgtgctccaagttcatttccaataggcctgtgctctataggcatcctctcctcgtatatgggggtggccagccgctccagacagcatttcagtttcacttaataggggtgaaagctgttgcttgatggccagccaaaacatccaagcccagacctgcctacttcttggcggcatggtgcctctgaccagggtccacctcctttacagccatcccacttgccctgtctggggctgctttgggataatcaaggcgtacccctgcagccatcatcttccccctcatggcttgggccatgtttctattcctgcagttgctgggccttgtgggggtccgaaaggccctggagagggtcttctcaccacaggaactcctctggctggatgagctgatgccagaggaggagagaagcatccctgagaaggggctggagccagaacactcattcagtggaagtgacagtgaagatgaacgcagctcctcaccagcaacggaacaaagctggatggagaatgactttaacgaattgagagaagaaggcttcagacaatcaaacttctctgagctaaaggaggaagttcgaacccaacacaaagaagctaaaaaccttgaaaaaagattagacaaatggctaactagaataaccagtgtagagaagtccttaaatgacctgatggagctgaagaccatggcacaagaactatgtgatgaatgcacaagcctcagtagccgattcgatcaactggaagaaagggttgaatcatttattttggaccaagaagatctggataacccagtgcttaaaacaacatcagagatattcttatcaagtactgcagaaggagcagacttacgcactgtggatccagagacacaggcacgactagaagcattgctagaagcagcaggaattggcaaattgtcaactgctgatggtaaagcttttgcagatcctgaggtactccggagactgacatcctcagttagttgtgcactggatgaagctgctgctgcactgacacggatgaaagcagaaaacagccacaatgcaggacaagtggacactcgcagtctagcagaagcttgttcagatggggatgttaatgctgttcgtaaattgctagatgaaggcagaagtgtaaatgaacatacagaagaaggagaaagcctgctgtgtttggcttgttcagcagggtattatgaattagcacaagtattgcttgctatgcatgctaatgttgaagatcgagggaataaaggagacataactcccctgatggcagctttcagtggaggttacttagatattgtgaaattattacttcttcatgatgctgatgtcaactcccagtctgcaacaggaaacactgcgctaacttatgcatgtgctggaggatttgttgacattgttaaagtgctccttaatgaaggtgcaaatatagaagatcataatgaaaatggacatactcccttaatggaagcagccagtgcaggtcatgtggaagttgcaagagttcttttagatcatggtgcaggcatcaacactcattctaatgaattcaaagaaagtgctctaacacttgcttgctacaaaggccatttggatatggttcgctttctacttgaagctggtgcagatcaagagcacaaaacagatgagatgcacactgccttaatggaggcctgcatggatggacatgtagaggtggcacgtttgcttttggatagtggtgctcaagtgaacatgcctgcagattcatttgaatctccattgacgctagctgcctgtggaggacatgttgaattggcagctcctactttattgaaagggggagcaaatcttgaagaagacaatgatgaaggatacactcccttgatggaagctgcccgggaaggacatgaagaaatggtggcactactcttagcacaaggagcaaatataaattcccagacagaagaaactcaagaaactgctcttactttggcttgctgtggaggattttctgaagttgcagactttcttattaaggcaggggctgatatagaacttggctgctccacacctctgatggaggcatctcaggagggacacctggaattggttaaatatttgctggcttctggaaacactgcgctaacttatgcatgtgctggaggatttgttgacattgttaaagtgctccttaatgaaggtgcaaatatagaagatcataatgaaaatggacatactcccttaatggaagcagccagtgcaggtcatgtggaagttgcaagagttcttttagatcatggtgcaggcatcaacactcattctaatgaattcaaagaaagtgctctaacacttgcttgctacaaagattcattactctaa

SEQ ID NO: 8064 - DNA, 469 bp, Homo sapiens
  SIMILAR (268)..(363): 481254mologous to Homo sapiens TGR-CL3C,accession number A27282,Smith-Waterman Score=70.
ctgatcacgccaagcttggcacgaggacctcgggtatgcgacctcactcgctgagcctctgtttcttctcctcatcttacgacattcttatgaggatcactaaagacagggtgaagaacctcacatgcatcacttataccatccttcccacggacttacagccagggtgtgggttacctaggagcttttatccctccagcaagcctaccagcttctggctctgggcttgtaagctatttccaccgctacccatttccttcaatccttcacctgcccattccaagacagcccatggccactccggtaagcacacggaggcggggatgtgatggagctaaaccggcgaggggataacgggcaggtgttgttttgtcagcataaaggcaccgcccctccccagctcgggtcctgtggggggtcctgtaggaggttgattctacccttgtacagcacagggcccaggccccta

SEQ ID NO: 8065 - DNA, 525 bp, Homo sapiens
  SIMILAR (127)..(411): 501254mologous to Rattus norvegicus MEGF6,accession number AB011532,Smith-Waterman Score=318.
atggccctgctccccactgttttgtgtctatgggcacaggcacagttcttagtagacctaggccaaagcaactccaagcaccaggagcaccagttggctccagatgttgcctttgccaaaatgaaaggcgcttgcgtgtgcgccgccggcttccgtggatggcgctgcgaggagctctgcgcgcctggcacccacggcaagggatgccagctgccgtgccagtgccgacacggtgccagctgcgacccccgcgccggcgagtgcctctgcgcacctggctacaccggcgtctactgcgaggagctgtgccctcctgggagccatggagctcactgtgagctgcgctgcccctgtcagaatgggggcacctgccaccacatcactggcgagtgtgcctgccccccaggctggacggtccgtttagggccctccttctccaggaagccttcttggatgtctgcccagggagacaagcatctctttgataatcagcagcatacagctttgtctctacctgttacttga

SEQ ID NO: 8066 - DNA, 1053 bp, Homo sapiens
  SIMILAR (79)..(1023): 301254mologous to Rattus norvegicus MEGF6,accession number AB011532,Smith-Waterman Score=379.
atgctgataatgacatttcatggcctgttaccctgcatgcagatggcctgcaagtggcagctccgagtgcttgttgccggcatccgctgtgacagcacgtgtccacctggccgctggggccccaactgctctgtctcctgcagctgtgagaatggaggctcctgctccccaaaggatgggagctgcgagtgtgcccctggcttccgaggacccttatgccagagaactgtacatattctctaccctcgtggttgtggaatccgtgatgttggtgaaagtggtaatagaaagcagaaggctgtggaacagtacagggagcactggactgtgagtccagaagtacagtgctcagcctcccacttctcatctgtgagacctaagtcagcttgcccacccgggttctggggccccgcctgcttccacgcatgcagctgccacaacggggcgagctgcagcgccgaggacggggcctgccactgcacccctggctggactggactcttctgcacacagcgatgtgccccaggaacctttggctatgggtgtcagcaaaaatgtgagtgcatgaacaactccacctgtgaccatgtcaccggcacctgttactgcagccctggcttcaaaggaatcaggtgtgaccaaggcatcatgctcctgttattcctcattgtggtgctgctgggcctatttgcctggcatcggcggcggcagaaagagaagggccgagacctggctccccgtgtctcctacacacctgccatgaggatgaccagcaccgactactccctctcagtggagctaacagcatacccacttaccggtagagtggacgcccagattcacccctcaggacagaagcactcattcttccccagctgccagaaatttagtggctcgcagggagaggtctgtgccgtttcctgtgcagcagggacctatggccccaactgctcgtccatctgtagctgtaacaatggtggcacctgctccccagtagatggctcctgtacctgcaaggaaggtaggatcatctgcctgcagcacaaacaatga

SEQ ID NO: 8067 - DNA, 971 bp, Homo sapiens
  SIMILAR (3)..(299): 461254mologous to Rattus norvegicus MEGF6,accession number AB011532,Smith-Waterman Score=268.
  misc_feature (1)...(971): n = a,t,c or g
gcatccgctgtgacagcacgtgtccacctggccgctggggccccaactgctctgtctcctgcagctgtgagaatggaggctcctgctccccagaggatgggagctgcgagtgtgcccctggcttccgaggacccttatgccagagaatctgcccccctgggttctatggccactgctgcgcccagccatgccccctctgcgtgcacagcagcaggccctgccaccacatcatcggcatctgtgagtgcctcccaggattctctggagctttctgcaaccaaggtcacagccccaactgggaacccgagccctggatggtacagatcatgagaaatgacagatccccgatgcagctgcagggcctttctggggagagcacacgccacacaggnccggtgctgctcggcacagatgccagtgagacccaggtgattggatttgtgaacttggctcaatttctcatcatctgccctaggaaactgcattataaggcccagaacagcaagaaatcaaatgggtcagatgcttccagtgattggaaggattggggcatttgggacagagagagctgcgaggagctgtgccctcctgggagccatggagctcactgtgagctgcgctgcccctgtcagaatgggggcacctgccaccacatcactggcgagtgtgcctgccccccaggctggacggtgggagctcctgctgagccctatgctgtccagttaagtcatgaagagctgctggagaagcacagcccggcaagcctaccagcttctggctctgggcttgtaagctatttccaccgctacccatttccttcaatccttcacctgcccattccaagacagcccatggccactccgtttgagaaaaattcctctctgagccccaaggcactggaaggggagacagcgacctgcgtgggtatcgtggggaaggcgtgccccttggtggccctgacgctctgctag

SEQ ID NO: 8068 - DNA, 867 bp, Homo sapiens
  SIMILAR (77)..(619): 311254mologous to Nicotiana tabacum extensin,accession number X71602,Smith-Waterman Score=166.
atggtgcaggccccggagacagccaatatcacagctggacaattccatcctcatgaaccctctagcctggcaatagccagcagtacccgagctctgagtatttcaagccaagccagaaagaaaatccagatattggcagctccatttcccaccacattcgtcatcaccgacatcatggaggaagagcctggagcctatgtacaggtgtacatgtccacctctaaccccgtacgggtgtacgtgcccacctctaagcccatacaggcgtacgtgcccacctctaaccatgtacaggcgtatatgtccacctctaaccccgtacaggtgtacgtgcccacctctaaccccatacaggatgttttcatctccgttgcacaaggaaataacttcagctcagagaagcccagaaccctcctcaaggccacacagctcgaaagcagcagcactgaggtgacagcccagaattatggaaaaacaaagaatatatggtccttctcccacctctgtgcaacctgcatctcctccaccctgcttagacgatcctcggaagaaagcagaaaggccagaccacagggcaacagggaaaaggcatctgccagagacatcgctctagcagagctggtcaggagagctgtggagaaccctgaggactcagaggctccagctccagctccagcagccctgagtcctgcttctgaacacagaacagaccccatacaggaaacaaagaaagcaagaaagagctcagacaatgatgggagcactccactggcacagacaccgactcgaaggagctcccagtggccacgtctgggacagttccagcaacaagaagatgacagcagtggactctactccacaggataa

SEQ ID NO: 8069 - DNA, 1959 bp, Homo sapiens
  SIMILAR (1144)..(1179): 1001254mologous to Homo sapiens cytosolic NADP(+)-dependent malic enzyme,accession number U43944,Smith-Waterman Score=71.
tcattagttattgctatatcatctcttttgacatttctagatctaaaattttatgactgtaatattcttcagtaaaataatatacaatcctcttttctgctgaatatgtgatccttactgttcatagaagttgctggcttttaaaaataaacaaacagtttgattcaggctaaatggagaaaaagtcacagatttagtgattcaaactacagaagtaaatgacatgattgaggttggagatgaggtatttactggaacatgctttgaggagacctttaattctctattgtaagtttgcacatggagtttataaaagcattttctaaatttctgcctcccttatatgatcctgaacaagtatcgaaaccagtattgcacattcaatgatgatattcaaggtaacaaaattttcactgcatatggatcaataacatgtctgaaattagttcataattgtatcaaaaagatatggctggttgattcaaaaggattaatagttaaggtaagaatttgtcatttttaaccagaataaagataactatgccattctggatggccatcgaacctagaagccattgttcaagaaataaaaccaactgccctcataggtaagcattttctcctctcccttctcccctaccccttattttgacctgattgtttttttaatgaacggcctattatttttgctttgagtaatccaactagcaaagcagaatgttctgcagagcagtgctacaaaataaccaaggtaaagtaaaactataacagatattttaataatcaaatttttattcattatagggaggcgaccctatatcctggccaaggcaacaattcctatgtgttccctggagttgctcttggtgttgtggcgtgtggattgaggcagatcacagataatattttcctcactactgctgaggtattgtaaaatcctctaagtttaccaagggtttaaaataccaagtgtgctcagcctaggaataccattagagatgtttctctgaaaattgcagaaaaggtaaaaccactcttgttcaagcttcattatttttccttccttttcttgctaaatatgcaagaagcatttgtccgctcccagatgtatagtactgattatgaccagatttctacctgatttgttattcttggcctgaagaggtgcagaaaatacagccccaaagttgacccagtaggataatagcaaacatttcctaaccctattaatgaggtctttaaacctttcataatttttaaaggttggaatccttttataatgattcataagacacttagattaagattttactttaacagtctaaaaattgatagaagaatatcgatataaattgggataaacatcacatgagacaattttgcttcactttgccttctggttatttatggtttctgtctgaattattctgcctacgttctctttaaaagctgttgtacgtactacggagaaactcatcatttttatacaggacacttaatgggaagacccaaaattactaataaattggacattaccaacattaaaactcataattattttgttgaccattttgttaaaatctacttttcaaaaaaaaaaaagctagaaatgaatctaggcgtaggtgaacttttgctaagcagaaataacactactttgttgcctagagaaagataacttctcaagtatttttattccagtcctagatcatatatgtccttttgtgcaacggaattctaacagttctaaggggaaagatcactggctgtttacagcggccttttgcaggccttaggatttttaatattcttttgtccattggttacatctcataggggtaaagctcttattaccttgatcctgagtcaggaaatcccacctggaaattcacctttttttcccccttggatcaaacatcccatcctgtagttaccatactgtggttacggggatttggg

SEQ ID NO: 8070 - DNA, 2121 bp, Homo sapiens
  SIMILAR (278)..(586): 591254mologous to Homo sapiens dJ583P15.5.1 (this gene fragment and some or all of partial isoforms of gene dJ583P15.4 are probably part of the same gene),accession number AL121845,Smith- Waterman Score=298.
agcccggcccaggtcatgttccagtgtctgtggaagagctgcgggaaggtgctgagcacggcgtcggcgatgcagagacacatccgcctggtgcacctggggaggcaggcagagcctgagcagagtgatggtgaggaggacttctactacacagagctggatgttggtgtggacacgctgaccgacgggctgtccagcctgactccagtgtcccccacggcctccatgccgcctgccttcccccgcctggagctgccagagctgctggagcccccagccctgcctagtcccctgcggccgcctgccccgcccctgcccccgccccctgtcctgagcaccgttgctaacccccagtcctgtcacagtgaccgtgtctaccacgggctgcctgacgcccgcccgcctggagccgcatgccacggaggttggagcctgcccacccgccttgtcctccaggatcggagtcatcctgaggaagccccgcggcgactcgaataagtgccggaatgtgatatggcatggaagcgccgggacctcctggtgcacagcctgccgctggaagaaagcctgccagcggttcctggactaaagtccggctcgttcaagaacataaagctaccaccttctccctccccaccccctccaggcccgggggctgaaacagcccgaaggaacaagccccagggggctggcccttcaccagctgcagggtctgcttttaactgggttggggtgccggacttaacccttgaacctttccccccgccaggtccaggggaggggtccccacccactcaaagtgccctctaaagaaacccagctttttgcactaaagcccaaacccacacccgctgtccccctttacgcccaagggccctgggggcagccacccttcccgcctgtcggcccgtagatttatcaagggtgttatgggcccagctttggggggccagtcccgatgcactttgaggggtgttggagaggggactcccccactcgcacttaactcaacggctctcgggccctggggctgtttttacccatgtttgtttttgaaactccaggtgtctcacgtctgggctgccaccaggcgaagagagaaattaaagatttgaggtttttccagaagctttgtctgcctctcgggaggaaggccgtggggctgggaccctgtggtgggcaagtgggtggagtctggcagctgcccacagagggccgagggtcacccgtcggccgccgccaccccaggcgaggccggaggaaggatcatctgagacgcaggaggcatctgctggagcagcaatttcccaatttattgaaagtgatcgctttgcaaggatgtctaagctaatcccgtcacagaaagggaaacgcacaggcgcctaggcagaaacttggagactcaccgcagaggccacgtgaaacccacggccacagagaggcaggaacggcagagccatgattttcccaccgagcgattacgagaacctcttcccccaatagtagacacatctccaatacaaacacaggtttataataagtaataggaagtcaatataatatagattatccccagaaaaaaatcaacaatcttcaaacactgccctttttttgtgtgttttgtttttgttgacaggttgaaagcatgttgaaaaaaataaatatttaagaaaagcacacacagcaccctcactacaagtagttttaaaagggctgcatacaaaacacaatataagatctaaaaaaaacccccaccattaagtatggctttcttaagagtcgcacatgtcacagaatgagctaaaataagattacttcttttataatattgcaaaaagttccagtttttgcattttctcagttttttaaagaggaagatgtgcaaagttggaagcagtaagctgcgtcttatgagtcagttccctacgtagccctggcagtgtcctgtgtcccaaagctcagagagccccagtgtacaacctggtcaggatccagagcttgacagaaaaatcgtggtgtccctgccccctccccgcccccaaataacaccatccccaatggactgtatttcccactttggtgttgtaaacaccaaaatacaaacagacacaaacaaaaata

SEQ ID NO: 8071 - DNA, 456 bp, Homo sapiens
  SIMILAR (9)..(71): 421254mologous to Bacteriophage 186 computer protein 78; putative host replication depressing protein,accession number X15001,Smith-Waterman Score=64.
agatgggagttttatctataagccctgactggggctgctgcctttctttcagagatgccctgcccagagagcagttttacaggctttttacagacagatcagaccgagtccctgaaaactccgtgacagatgtttgtcacattgaaagtaaaatggagcctctccgcctcggcccacaaacgtctccattatgagaccaagcctggtctgctcgttcaccactctggtctttaatttcctcaaatgctcagagctctctcgtagcttagggtctttggagttgctgtttcctctccctaaatggttcctctcaatccttgcataattagtcattgagatatcagcttaaatagcacctgttcagtgaggcatgttgttcaccaggcgttctgagggagttatgtcgtcccttttgatctccgggtacggaccggaatctcgtaatgcatggtcatg

SEQ ID NO: 8072 - DNA, 1413 bp, Homo sapiens
  SIMILAR (973)..(1095): 651254mologous to Homo sapiens Human secreted protein, SEQ ID NO: 6908,accession number G02827,Smith-Waterman Score=118.
atgaaagcccagtccacagcctccatgcccccggcccggcccgccccgcgcgcgtttcctgcgccgcagcccggacgtcgagaagatacccttcgcttaaaggccctgcgatgtccgcggccgccctcctgcaggaggtgctcggaggcgcgccgcgtccctcgggcctgggtgaggcggcggctccaggcaagacccggtcgtttcgcccccgggacttttacttgcggagtccgcgttcctacggcaccaggccctgaaaaagcccccagtcatcgcctcggggttcggcacggccagacccgtggtcctgctgcctccgcccgagccacccgtgaagcgcagagcgcgcggggtcttggagagctcgcggcacgcggctcccaggcgggtcttccacttgggaagggagcgcgaacagagccaggagggccctgcatggccaaagagaggaaggccagctccgtctccgcagaggacggctacatggaggccagcagcgggcggaggaaagtgaggatccgcagcaacttcgtgagcgagagcggggcccgcgaggcgcgggaagcggcggggttaggagcccagggagaacaggagagctggccgcccagcgacgcgcgggaggccgcctggcaggcgctgctgccctcccgcgtgatccccacgtccatcgaagagatcatcgcctctctgcagtccgaggcccagctggcctccgaccagaccatcaaagagctcatacggagcgtccttggccagaactacgacattacaatggaaattttctgtgaatctaataagaaaacaaatcagggatgcccaatgaagagccttagcaaagagaagaaaggcctcggtgcccctacttctgacataggctccatgctctacgacatagttaaggttggggaatttctcctggataatatcgtgaagagtgttttccaacttggttccattctctccgtcactttcagtcccattgtgatgagctgtgtacctcagttggaaatgcagaaatcacctgcctactgcattgatctcgctgggagctgcagaccggagctgttcctattcagccatcttgccagcaggtatttctttatagcaacacaagaacagcctaatacaatttccagtatcaacgggctgttacaagttccccctaccccttcccagtgggatggagacagtggagtgtctaaactttcaacatcgtccagaagtaaagaggccactcgctccctcttccctctggtgtcaatggaggccatgtggagaacagtaatgagacactcctattctttccaactaggatgggatcagcagaggcctagtggggagccaaaactcctagtcccaccatgcagtaacaaggaggcccccatccctggtgccagtaaaggctga

SEQ ID NO: 8073 - DNA, 1756 bp, Homo sapiens
  SIMILAR (923)..(1042): 871254mologous to Homo sapiens Human secreted protein sequence SEQ ID NO:103,accession number Y87064,Smith-Waterman Score =169.
atgaaagcccagtccacagcctccatgcccccggcccggcccgccccgcgcgcgtttcctgcgccgcagcccggacgtcgagaagatacccttcgcttaaaggccctgcgatgtccgcggccgccctcctgcaggaggtgctcggaggcgcgccgcgtccctcgggcctgggtgaggcggcggctccaggcaagacccggtcgtttcgcccccgggacttttacttgcggagctccgcgttcctacggcaccaggccctgaaaaagcccccagtcatcgcctcggggttcggcacggccagacccgtggtcctgctgcctccgcccgagccacccgtgaagcgcagagcgcgcggggtcttggagagctcgcggcacgcggctcccaggcgggtcttccacttgggaagggagcgcgaacagagccaggaggtagctcctctcgcagggccctgcatggccaaagagaggaaggccagctccgtctccgcagaggacggctacatggaggccagcagcgggcggaggaaagtgaggatccgcagcaacttcgtgagcgagagcggggcccgcgaggcgcgggaagcggcggggttaggagcccagggagaacaggagagctggccgcccagcgacgcgcgggaggccgcctggcaggcgctgctgccctcccgcgtgatccccacgtccatcgaagagatcatcgcctctctgcagtccgaggcccagctggcctccgaccagaccatcaaagagctcatacggagcgtccttggccagaactacgacattacaatggaaattttctatgaatctaataagaaaacaaatcagggatgcccaatgaagagccttagcaaagagaagaaaggcctcggtgcccctacttctgacataggctccatgctctacgacatagttaaggtctgctggagtttgctggagatccgctgcagactcagtttgcctgggtatcaccagtggaggctgcagaacggcaaagattgctgcctgttccttcctctggcagctttgtctcagaggtgcacctgccaaatgccagctggagctctgctgtatgaagtgtctgtttacccctgctgggaggtgctctgtgcccagagagatgggagttttatctataagcccctgactggggctgctgcctttctttcagagatgccctgcccagagaggaggaatctagagaggcagtccggctgcagtggccttgctgagctgcaatgggctccacccagtttgaacttcctggaggctttgtttacacagtgaagggaaaaactcctactcaatcagtgcctcatcccattgtgatgagctgtgtacctcagttggaaatgcagaaatcacctgcctactgcattgatctcgctgggagctgcagaccggagctgttcctattcagccatcttgccagcaggtatttctttatagcaacacaagaacagcctaatacaatttccagtatcaacgggctgttacaagttccccctaccccttcccagtgggatggagacagtggagtgtctaaactttcaacatcgtccagaagtaaagaggccactcgctccctcttccctctggtgtcaatggaggccatgtggagaacagtaatgagacactcctattctttccaactaggatgggatcagcagaggcctagtggggagccaaaactcctagtcccaccatgcagtaacaaggaggcccccatccctggtgccagtaaaggctga

SEQ ID NO: 8074 - DNA, 1275 bp, Homo sapiens
  SIMILAR (751)..(1269): 941254mologous to unidentified bacterium transposase,accession number Z78058,Smith-Waterman Score=825.
atggcgcgatctcggctcactgtaacctccgcctcccgggttcaagcgattctcctgactcagcctcaaatctcatccaaatgtcacttcttagagttttgcttctggaaatggttctcacactcagaacaactagaaagcctagtgaaatataactatatccatttagaggcatcagagagatacccaatcagtgaggaaaacagggctgccaatatgctgtcttcacgggacgtgataatggatcattcttggcatttcccactcattagatggattaatttaggggcattttctgtccttggtataatcattgagaagggaatgagaatagctgctgcattggatgaattacagcacagggtccagaacttagatgtgaaaaaagaaaaggagaaattgaggatggaaagagaggtgaaaagggggttgagattgaatggtaaatttaattctctcgtgttaaacgacggtgtaaccgaggttgaccctagtgaagaaccacaagagaacactggcataacaccatatcacgatggtcccgtgaagacatggaccagagaaggtggagccgcggatatgttagacatagcggagtttcgtcgtggcgccaataacaagagacgctcagacccaggactcagtcctgccacccctgtgacttgggcaagcaccatctgtcaagtccaggttgggccaggctgtctaagagaaggagaagctaaccgaccagcagagacggtgaaagggctggcccgatttgcgcaaccgccagacgagatacgcattgctgacggggaattcgtttggcgtccgaaatgtatccgctcacttgcttttggagaagctgattatatcgtcggggttcactggcgaggattgcgctggttaactgcagaaggaatgcgctttgacatgatgggttttctgcgcgggctggattgcggtaagaacggtgaaaccactgtaatgataggcaattcaggtaataaaaaagccggagctccctttccggcacgtctcattgccgtatcacttcctcccgaaaaagcattaatcagtaaaacccgactgctcagcgagaatcgtcgaaaaggacgagtagttcaggcggaaacgctggaagcagcgggccatgtgctattgctaacatcattaccggaagatgaatattcagcagagcaagtggctgattgttaccgtctgcgatggcaatttgaactggcttttaagcggctcaaaagtttgctgcacctggatgctttgcgactatag

SEQ ID NO: 8075 - DNA, 6294 bp, Homo sapiens
  SIMILAR (5007)..(3499): 901254mologous to Homo sapiens putative p150,accession number U93572,Smith-Waterman Score=2384.
tcaaacccttgatccagttgcagtcacagacaactgggcaccagggttcttggctccagctgtgcctgtgaagcctccacctctgacaggtggtggctcaagtctccactccaaggcccgtgaggacaggccacctgggtgggagcaaggtttctctaagttttccttaaaatgccttccgtgtatctgttcttcatcttcctgagagcacagtgtatcagacttgaaggggtggcctgcccctccacacctgtgggcgtttctcatcaggtgggacaagagaaggaggggtttgctggagatcatggggatgagaaccactgtgctttcttcatcagttaggccagcacaggctacatcgagagcaaagcaggtgagctgatcctccaatgagtacaacgtgctgttgtaaggttgctggcagtcagacaggtcatgggggagtgaaggagtcaagtaaacttcatccagggagtcctgtgggacgtcctgttcctccacctctggcagatccgggctcagcctggggcattgtgggtcttggtcttcttcttcttcttgatttttttcaatgtctgcaacaaagtcagacagggacagacacattaagtctattcccctattcatgcaacaatccactgtccaatctgtccccatcaagagccaagccaacatgctgttcctccaatgagtaaaagtacttctgtagggctggcatgagtcaggcagttcaagataactggtaggagtcgaataatatctatccagtgagtcctgcaagacttcaggctcttccacttccaacagctccctgctgagcttgaagaagtaggaaaaactgggacatgttgcctctcgatcgtcctttttcacttgatcacactgaggtccagcaagatgatggacagatgagctaaaacaagccaacttagaagacacagaaaatggagataaattcagtgaaacctgggtcacatcttccactgagaggtagacaagggtgacactggcctgggatgctaactggagctttatcaccttcacaatggagtactcactacctatgtcaagagccaagccaacttgctgttcctctaatgagtgaaaggtgctcctgtaagacctcctttcctctggtctcggttgagacactgcaaagggcatcgtcctggagcatttctcctctccccaaggcccctcgaaggaaggatgggcggacggaagcttcaccccgaagtggtcaagcgcgcagagctccagcttccgcaggagcatttcccggtgtctctcatgggtaagagtgggtcctgcaggataatgcctcccgttccctgaggagcagtgctggagatgcccatgtggccagctcctaggccacgcgacccaggccctccaggaggagcgaggagtcctgggccctgaaccagccccctggacccggggctgggggccttgctgtcccaaggacagctggggagaaagaggaagccggctgagatgtgtaaagcagctcttgctaccgcgggaagggagagggcgcgcgggacccaggagccactgtgcgaagccaggcctcaggagcagccgccttgttcctagaaggggtgcctccatccatctggtgtccaaagactgcagggagaccttctcgtccggtgggaaagcgaggtctcccatgctttcccaccacgcaggccttgtgtcctttctcctgctagtgtctgcccgccagcgggcgggagctgcggctgcggcggttccacactctgtggacgctgcccgccagcgagccaagagccgcgcttggaggcgggagtcggggagtcgtgtgcaggtcggaaggagacccaagctctgggtcagggcttttttgccaatagccaaattcagcgtgtaaaagacagagagctcacatctgtctgttcgagagcggccacagttttccatttgtgcctgctccacgtgctgtctttgttgggtcagcaaacatcgcctccctttaccgctcagtcccacttccaacctcgcgggcatcgcctccagtcgcttcttctgaaggcctaagaagcacgttacccgcgaacggaggtgaggaggctccactgaccgtcccctgtcagctgataatttgtggcacgcacaaacgccacgacttgccttggcctctctcttagttattcgcagctcagcccgatcggcgcctccgggacggcagaggcggcaaagacggtgggcttcttgggtgcagttccaggagggctggcatctagcgggcgtaaaggaagattcctgcgggaaggcagtcagtgcaaaacaattccctgactggtaatccaacccgagctgcggcggtgaaagcgctaaattcaaggacacaagtcccggagccagttgcagcgtccgggcagaacctgaccaccgacctagagatgcgcctttgtgaagcggcagcgcatggagagacagtagcgggtcaccgggccagagccgcgcactgccattttcccatcttaggctatactgcaacgccacccttccgtatgctctgggcaaagctccaagggttcccgctgacgtttgagttttttcctcagggccaagatcgaactggtcaccaattcgtgatttcccatcggccaagtgcgtgggcattgatctacacgcgagtttctccacctccgcggaatgggtattacggggtgggggaggggcccttcggtggattgtaaggtgtttagccgcatccctcgcctccgctgacttaggatttgaggcttttaacatctcgacatcatgagtttctacctttaggtctttccttctgttctgtcctccaaatcggcctcttctgagcctgttgaccagggccagccaggtagaaggctgggttcgctcaccgaggatcctctcgcccctccatgaagtcgacctcacctcctctgaaggtcctcccggtcctccagtggctggagaaggtgagtcgagtccctgtctccagtttgcaaagtggacaaagcctacgacaatgggccccgaatcagctactaggcatccctgtctttccagttggtggtactcgagcttccctacccaggatttctgtggattccaagggtacaactgaacaccttttgtcgttccaactgctcttatttgaattaagggctgatcctgacgcgcctggttgcggggagcaaaacggatcagctgactacccagacgagcaactttgccgtgactcggattcgaaccgaggttgctgcggccacaacgcagagtactaaccactatacgatcacggcgggccacaaggcaagcggtgatgcttgaccttgctcgaccgaagccgagttgagctaggggagcccaagcggcgtagaaagtcgggtgaaggcggagccaagaacggaaagagccatcactagagtccacggggcgttctgcttcctttgggaagtcgcggacccgggcgtttcccgggacgctggctctgacgctttttgatggggttgtttttttcttgtaaatttgtttgagttcattgtagattctggatattagccctttgtcagatgagtagtttgcaaaaattttctcccattctgtaggtttcctgttcactctgatggtagtttcttttgctgtgcagaagctctttagcttaattaaatcccatttgtcaattttggcttttgttgccatggcttttggtgttttagacatgaagtccttgcccatgcctatgtcctgaatggtattgcctaggttttcttctaggttttttatggttttaggtctaacatgtaagtctttaatccatcttgagttaacttttgtataaggtgtaaggaagggatccagtttcagctttgtacatatggctagccagttttcccagcaccatttattaaatagggaatcctttccccatttcttgtttttctcaggtttgtcaaagatcagatggttgtagatatgcggcattatttctgagggctctgttctgttccattgatctatatgtctgttttggtaccagtaccattctgttttggttactgtagccttgtagtatagtttgaagtcaggtagcgtgacgcctctggctttgttctttttgcttaagattgacttggcaatgcaggctcttttttggttccatgtgaactttaaagtagtttttcccaattctgtgaagaaagccattggtagcttgatggggatgacattgaatctataaattaccttgggcagtatggccattttcacgatattgattcttcctacccatgagcatggaatgttcttccatttgtttgtatcctcttttatttccttgagcaatggtttgtagttctccttgaagaggtccttcacatcccttgtaagttggattcctaggtattttattctctttgaagcaattgtgaatgggagttcactcatgatttgggtctctgtttgtctgttattggtgtataagaatgcttgtgatttttgtacattgattttgtatcctaagactttgctgaagttgcttatcagcttaaggagattttgggctgagacaatggggttttctagatatacaatcatgtcatgtgcaaacagggacaatttgacttcctcttttcctaattgaataccctttatttccttctcctgcctaattgccctggccagaacttccaacactatgttgaatagcagtggtgagagaggacatccctgtcttgtgccagttttcaaagggaatacttccagtttttgcccattcagtatgatattggctgtgggtttgtcatagatagctcttattattttgagatacgtcccatcaatacctaatttattgagagtttttagcatgaagggttgttgaattttgtcaaaggctttttctgcatctattgagataatcatgtggtttttgtctttggctctgtttatatgcagttcctccttgtacctctggtagaattcggctgtgaatccatctggtcctggactttttttggttggtaagctattgattattgccacaatttcagatcctgttattggtctattcagagattcaacttcttcctggtttagtcttgggagggtgtatgtgttgaggaatttatccatttcttctagattttctagtttatttgcatagaggtgtttgtagtattctctgatggtagtttgtatttctgtgggattggtggtgatatcccctttatcattttttattgcatctatttgattcctctctcttttcttctttactagtcttgctagcagtctatcgattttgttgatcttttcaaaaaaccagctcctggattcattaattttttgaagggttttttgtgtctcaatttccttcagttctgctctgattttagttatttcttgccttctgctagcttttgaatgtgtttgctcttgcttttctagttcttttaattgtgatgttagggtgtcaattttggatctttcctgctttctcttgtgggcatttagtgctataaatttccctctacacactgctttgaatgtgtcccagagattctggtatgttgtgtctttgttctcgttggtttcaaagaacatctttatttctgccttcattttgttaagtacccagtagtcattcaggagcaggttgttcagtttccatgtagttgagcggttttgagtgggtttcttaatcctcttaatcagtggaatcttggtgctccaattgttgaaggacccagagatgaagacctccttgcctccttcagaccagcggataacagtgggccgggcctgctgtgtgggctttacggagtcctccaaatcctgctgccatgatacaaactctttgtccccagggagagagtgaaaacaagttgttctcttcctgaaagtccttggaattgagagcaaggtcttcagggcagctgtgggttgtcgtttttttagccacgcaacattttgaagtactactgaggagtaaacaagtcgtggaatcattggctcttccaccttggagtcagggaggctgaacacgctggggtcgtccgtactccccaccatgatcttgtgctccttccccggggcatggccgcctgcgccctcggagcgtgcagccttggcgccgtggcgctccccggacacccggtcgctggtggtgtttcccatggctgcagctcgtcggggaccacctaccgcggggaacgacaccgggttgggaggatgaggcagaagaatcgcttgaacccgggaggcggaggttgcggtgagccgagatcgcgccat

SEQ ID NO: 8076 - DNA, 2173 bp, Homo sapiens
  SIMILAR (58)..(768): 791254mologous to Mus musculus NG22,accession number AF109906,Smith-Waterman Score=965.
atggatgggatttctggtggaaagagagccctgagagagaggcacagtaagagcaaagctctgggacgctgctttccatggaccaacattactccaccggcgctcccagggatcaccaatgacaccaccatacagcaggggatcagcggtcttattgacagcctcaatgcccgagacatcagtgttaagatctttgaagattttgcccagtcctggtattggattcttgttgccctgggggtggctctggtcttgagcctactgtttatcttgcttctgcgcctggtggctgggcccctggtgctggtgctgatcctgggagtgctgggcgtgctggcatatggcatctactactgctgggaggagtaccgagtgctgcgggacaagggcgcctccatctcccagctgggtttcaccaccaacctcagtgcctaccagagcgtgcaggagacctggctggccgccctgatcgtgttggcggtgcttgaagccatcctgctgctggtgctcatcttcctgcggcagcggattcgtattgccatcgccctcctgaaggaggccagcaaggctgtgggacagatgatgtctaccatgttctacccactggtcacctttgtcctcctcctcatctgcattgcctactgggccatgactgctctgtacctggctacatcggggcaaccccagtatgtgctctgggcatccaacatcagctcccccggctgtgagaaagtgccaataaatatcttcatgcaaccccacggcccaccttgtgaactcctcgtgcccagggctgatgtgcgtcttccagggctactcatccaaaggcctaatccaacgttctgtcttcaatctgcaaatctatggggtcctggggctcttctggacccttaactgggtactggccctgggccaatgcgtcctcgctggagcctttgcctccttctactgggccttccacaagccccaggacatccctaccttccccttaatctctgccttcatccgcacactccgttaccacactgggtcattggcatttggagccctcatcctgacccttgtgcagatagcccgggtcatcttggagtatattgaccacaagctcagaggagtgcagaaccctgtagcccgctgcatcatgtgctgattcaagtgctgcctctggtgtctggaaaaatttatcaagttcctaaaccgcaatgcatacatcatgatcgccatctacggggaagaatttctgtgtctcagccaaaaatgcgttcatgctactcatgcgaaacattgtcagggtggtcgtcctggacaaagtcacagacctgctgctgttctttgggaagctgctggtggtcggaggcgtgggggtcctgtccttctttttttttctccggtcgcatcccggggctgggtaaagactttaagagcccccacctcaactattactggctgcccatcatgaggaacccaataaccccaacgggtcatgtcttccagacctccatcctgggggcctatgtcatcgccagcggcttcttcagcgttttcgggcatgtgtgtgggacacgctctttcctctgcttcctggggaaggacctggggagcgttaacaacgggttccctggggaccggccctactacatgttccaagagcctttttaaagattctggggcaagaagaacgagggcgcccccggacaacaagaagaggaagaagtgacagctccggccctgatcccaggactgcaccccacccccaccgtccagccatccaacctcacttcgccttacaggtctccattttgtggtaaaaaaaaggttttaggccaggcgccgtggctcacggcccctgaatcaaacactttttagaggctgaggcgggcggatcacccttagtaggagttcgagaccaactctggccaacatggtgaaacctccccgctctattaaaaatacaaaaattagccgagagtggtggcatggcacctgtcatcccagctactcgggaggctgaggcaggagaatcgcttgaacccgggaggcagaggttgcagtgagccgagatcgcgccactgcactccaacctgggtgacagactcttgtctccaaaacaaaacaaacaaacaaaaagattttattaaagatattttgttaactcaggtaaacaaaaaaaaac

SEQ ID NO: 8077 - DNA, 499 bp, Homo sapiens
  SIMILAR (12)..(497): 981254mologous to Homo sapiens mucolipidin,accession number AJ293659,Smith-Waterman Score=842.
ggcacgagggcatcctcacctgctccctgcccttcctcctctgcgcccgctcactccttcgaggcttgctgctgcagaatgagtttgtggggttcatgtggcggcagcggggacgggtcatcagcctgtgggagcggctggaatttgtcaatggctggtacatcctgctcgtcaccagcgatgtgctcaccatctcgggcaccatcatgaagatcggcatcgaggccaagaacttggcgagctacgacgtctgcagcatcctcctgggcacctcgacgctgctggtgtgggtgggcgtgatccgctacctgaccttcttccacaactacaatatcctcatcgccacactgcgggtggccctgcccagcgtcatgcgcttctgctgctgcgtggctgtcatctacctgggctactgcttctgtggctggatcgtgctggggccctatcatgtgaagttccgctcactctccatggtgtctgagtgcctgttctcgctcat

SEQ ID NO: 8078 - DNA, 2092 bp, Homo sapiens
  SIMILAR (1220)..(1483): 781254mologous to Homo sapiens mucolipidosis type IV protein,accession number AF249319,Smith-Waterman Score=338.
gagatcagctgatgccggagggtttgaagccgcgccgcgagggagcgaggtcgcagtgacagcggcgggcgatcggacccaggctgccccgccgtacccgcctgcgtcccgcgctcccgccccagcatgacagccccggcgggtccgcgcggctcagagaccgagcggtttctgacccccaaccccgggtatgggacccaggcggggccttcaccggcccctccgacacccccagaagaggaagaccttcgccgtcgtctcaaatactttttcatgagtccctgcgacaagtttcgagccaagggccgcaagccctgcaagctgatgctgcaagtggtcaagatcctggtggtcacggtgcagctcatcctgtttgggctcagtaatcagctggctgtgacattccgggaagagaacaccatcgccttccgacacctcttcctgctgggctactcggacggagcggatgacaccttcgcagcctacacgcgggagcagctgtaccaggccatcttccatgctgtggaccaggtgctggtgggcgggcaggtgctggtgggcaggcaggtgcagtacctggcgttgcctgacgtgtcactgggccggcttgctctctgccagcggtactaccaccgaggccacgtggacccggccaacgacacatttgacattgatccgatggtggttactgactgcatccaggtggatccccccgagcggccccctccgccccccagcgacgatctcaccctcttggaaagcagctccagttacaagaacctcacgctcaaattccacaagtactgcctgctcactcgaggggggcccaggagtcagcacgtggcaggggacgctggcacttggggccggaagggacccgaagacgcccctgaccctcacccgagcctcctgcctaggctggtcaatgtcaccatccacttccggctgaagaccattaacctccagagcctcatcaataatgagatcccggactgctataccttcagcgtcctgatcacgtttgacaacaaagcacacagtgggcggatccccatcagcctggagacccaggcccacatccaggagtgtaagcaccccagtgtcttccagcacgggaggacaacagcttccgggctcctgtttgacgtggtggtcatactcacctgctccctgtacttcctcctctgagcccgctcactccttcgaggcttcctgctgcagaacagagtttgtggggttcatgtggcggcagcggggacgggtcatcagcctgtgggagcggctggaatttgtcaatggctggtacatcctgcttcgttaccagcgatgtgcttcaccatcttgggcaccattcatgaagatcggcatcgaggccaagaacttggcgaagcttacgacgttttgcagcatcctcctgggcacctcgacgctgctggtgtgggtgggcgtgatccgctacctgaccttcttccacaactacaatttccgctcactctccatggtgtctgagtgcctgttctcgctcatcaatggggacgacatgtttgtgacgttcgccgccatgcaggcgcagcagggccgcagcagcctggtgtggctcttctcccagctctacctttactccttcatcaagcctcttcatcctacatggtgctcagcctcttcatcgcgctcatcaccgggcgcctacgtacaccatcaagcattcccggcggcgcaggcgcaagaggagagcgagctgcaggccttacatcgcacagtgcccaggacagccccacctccggcaagttccgccgcgggagcgggctcggcctatagccattcttttgttgctgcggaagggacccctcggaggagcattcgctgctggtgaattgattcgacctgactgccgttggaccgtaggccctggactgcagagacccccgcccccgaccccgcttatttatttgtagggtttgcttttaaggatcggctccctgtcgcgcccgaggagggcctggacctttcgtgtcggacccttgggggcggggagactgggtggggaggtgtgttgaataaaagggaaaataaatgtgtcgttttcattttt

SEQ ID NO: 8079 - DNA, 4664 bp, Homo sapiens
  SIMILAR (784)..(1053): 701254mologous to Homo sapiens putative ankyrin-repeat containing protein,accession number AJ278120,Smith-Waterman Score= 332.
atgcaaaggccctgcctctgcgtggagcccatgcgtctttgttttgattcattccttcttctggtcaaccagggagaggaggaagagggagttgttccttgcctagaggaaaatggcagagcagcagcagatccaggtccacaagaccaggactgcctgctgcccacgcttactccctcactttccggtgacgaggccccagatagaacgcagagctcaggtgatccacgggagagatgtggctacctctctgtgacatgtgaagagggagataacaggtttgccgccttttgtttatgtggctcctggaggttaaaccatggccatgctgactggtgtgaccagaggaggtcacaaatcagcaacagactcccagcttccctgggcattattgtaggcaccagaggaagcaggcatctgttagctgctctgaggggtgtcaaagaagacaggcagaccaaggggtgtgtgcagacaccagcatcactgagcccttggctcccggggcttagctctgagacccgagctcagaagacatgtagtgttctgctgattgactatgccactttcttgaagcttgctaatgatgatgatgatggttgtttggattgtttgcagcccggggtgcggactgcttgggcttcctctcagcatggcatccgagctccaagaaagagtgttcaaggaagtgcaagcagcccatctcttaggacctgggccttgacatgcacacagaattggttctgctgtgttctgttggtcaaagctgtcacagagcccccgcagattgttagactgctgttggaacgcggctgtgatgtgaacctaagtgacaagcaaggccggacgcccctcatggtggctgcttgtgaagggcacttgagcaccgtggaattcctcctttcaaaaggtgcagccctttcttctctagacaaagagggtctgtcagcattaagctgggcttgtctgaaaggtcacagggcagtggtccagtatctggttgaagaaggagctgcaatagaccagacagacaagaatggccgcacaccccttggacctggctgccttctatggcgatgccgagactgtgctgtacctggtggagaagggagccgtgatcgagcatgtggaccacagcgggatgcggcccttggacagagccatcggctgccggaacacatctgtagtggtggcgctactcagaaagggagccaagttaggaaatgctgcttgggcgatggccacttccaaacctgatatcttgattatacttttacagaaattaatggaggaaggaaatgtgatgtacaaaaaagggaaaatgaaagaggcagcccagaggtaccagtatgccttaagaaagtttcctcgagaaggattcggagaggacatgagacccttcaatgaattaagggtttccctctatctcaatttgtcgcgatgccgaagaaaaacaaatgactttggcatggcagaggaatttgcttccaaggctctcgaattgaagcccaagtcctatgaagccttttatgccagagcaagagcgaagagaaatagcaggcaattcgtggcagctctggctgacctgcaagaggctgtgaaactctgtcccaccaatcaggaagtcaagaggcttctggcccgcgtagaagaggagtgcaaacaactccagaggagtcaacagcaaaaacagcagggcccgctaccagctccactcaacgactccgagaacgaagaggacaccccaacccctggcttaagtgaccactttcactctgaggagactgaagaggaagaaacttctccccaggaagaatctgtttccccaactcccaggtcccagccatcctcatctgtcccttcctcatacatccgaaaccttcaagaagggttacagtccaaaggaaggccggtatcgccacagagcagggcaggaatcggcaagtccctgagagagcctgtggcccagccagggctgctcctgcagccctccaagcaggcccagatcgtgaaaaccagccagcacctgggctctggccagtcggcagtgagaaatggcagtatgaaagttcagatctcttctcagaaccctcctccaagtcccatgccagggagaatcgctgccactcctgctgggagcagaacccagcatttagagggaacaggtactttcactacaagagctggttgtggccactttggggatcggctgggccccagccagaatgtccgcctgcagtgtggtgagaatggccctgcacaccctttaccaagtaagacgaaaaccacagagaggcttctgtctcattcctccgtggctgtggacgcagcccctccaaaccaaggtgggctggcgacctgcagcgacgtgcgacacccagcttccctcaccagctcaggctcttctggttctccatccagcagcataaagatgtcaagttcaaccagtagtttgacttcgagcagcagtttttcagatggcttcaaggtccaaggaccagatactagaattaaagacaaggttgtaacccacgttcagagcggtacagctgagcacagaccccgcaacacgccgttcatgggcatcatggataagactgcgaggttccaacagcagagcaatcctccaagccgcagctggcactgtccggcaccagaggggctgctgacaaacacgtcttctgcagctggcctgcagtctgctaacactgagaagccctctctcatgcaagtgggaggatataataaccaagccaaaacctgttctgtttctaccctgagtgcaagtgtccacaatggggcacaagtgaaggagctagaagaaagcaagtgccaaattccagtccactctcaagagaacaggataactaagactgtttctcatctgtaccaggaaagtatctccaaacagcagcctcatattagtaatgaagcccacaggagccacctcactgcagccaaaccaaagcgatcatttatagagtcaaatgtgtgaaccttaagaaagccccatttgtggaatttggaaacgtgtgttgactcctggtggtaaattaaatagtttttttcatcagaaaaattattttttagccattttttttctttggggtggatctgatgccattgatatatctaaaatgtgggataaaacttctttaatagctagaaatcaccataaataagaatgctaagcagaattggggattaatcaaacataaaaaaataggtcagcccagaagacattaatgactctcacttatgaaattgtttggcttttgccactttcctccttggcctttgctatatggtagaatcacagaacttacttagagaataaatatgtctattgttcaagagtaacaggtttaactcatgaccaagtgatgtacatccaagtgatgtattctggaaacgatggaattttacagttacagctccattgagtcaaatcccattttatatatacataaaaattaagttctgagtgagttctagctaaatataagtgcgactgtaaacgccacccattttttttagccagaatatgagaccacctaagtattctcttcatagcagttcctataaagggattaaacacttatttctgtgttatggttcttattcatatatttttatagcacctttttttggaacctatatttgtgcttgaaggtgtttttgatatttggaaacagtataagccatttggagtcatgattggtggtcaagtggattcaagctaaaatactaagaccagcattcttagtggcgcttataaattagctctcacctggtttccaaactgcttttaacaatggtagtgctcctgggaacaatccttccaagctcctctaaggacaatatttaattcaggatactaaaggtaaggactgggttgttacttttgttttgttgtacaattaggtactttattagtcacatgttgtatatatttaaatagccccgtttttattcagacttgttaaataggacctattttcaattgtaggttattctaaaaacaaaaaagaaaaccccagtcacgatttgcatgttctctgtaagcttcatccatgctggttattgcactgaatgatgtattattagggcatgttaacagtataccagtaacagcactttatctcatttatatgaacacctttgaggtgctactttaagtccaagctctgatgtattatttcatttgtaaagataaggtacaggaatgaaccttggtttaaaggtatttttatatgaaaatggtgtgttattggaagatgttaaagtgctaatttgagagaagtaggagtgtatctgttttatatgttgggatgtgaaatttattttctaaaattgaggagaaggaagttatatatttgcagaatgttttaaagtgaattgttgtaatgaagttcctgtgaacatcattatggttttgtacaaataggaacctctgatgtcattcttcaacgtttgttcctgtgtgtacaattgtactttgtatgaacagctttatcatttttataggctttccatgagttttgctgtaactactatggcttatttattttctttaatatttgtgaaagtcttactcctttgttagttttgtttctgcacaactactgtacttttccatatggaataaagaatattaatagaaa

SEQ ID NO: 8080 - DNA, 948 bp, Homo sapiens
  SIMILAR (179)..(442): 351254mologous to Homo sapiens bA145E8.1 (KIAA1074),accession number AL162272,Smith-Waterman Score=92.
gcaaatattctcatagattctggtgctgatccaaatattgtagatgtgtatggcaacacagctgtccattatgctgttaacagtgagaatttgtcagtggtggcaaaattgctgtcctgtggtacagacattaaagtgaagaacaaggctggccacacaccacttttattggccataaggaaaagaagtgagcaaattgtggaatttttactgacaaaaaaatgcaaatgcaaatggagttgataagtttaaatgcattcatcaacaacttttggaatataaacaaaagatatctaaaaattctcaaaatagtaatccagaaggaacatctgaaggaacacctgacgaggctgcacccttggcggaaagaacacctgacacggctgaaagcttggtggaaagaacacctgacgaataggatacagtgaattcctcttcaaagattttagcctgtaaacatcctttaaaattcaagaggggggaagattaagtacaatgagttcttgagttcctcatcaaagaacaaatatgtcagtatgttcagcttctctgttctttgttctccgttttaaagtttaacttcctcgttcgttatgcctccttgcccctagtttcattaaacaacccccttctagcctctaacacctgctttgtctttagtcattcttagtaacctgctctgtccttagtcatccttagacacctgctctgtaactgtctttcccgctgaaactactcaccctgccactccagctcatacccctgccctctttaaatagccaatctgaattggcttagagtgtgcagtccaaccctatccaatagggaaaagacacaacagtagggactagctgcgttagaaataagaacactttcccctcccttgtccggtgtgatcttgccattgctccatctgcaagaccactcttccatagaagtaaatttgcc

SEQ ID NO: 8081 - DNA, 1461 bp, Homo sapiens
  SIMILAR (679)..(960): 291254mologous to Mus musculus synapsin Ib,accession number AF085809,Smith-Waterman Score=61.
atggtttcaggaaccactcaccaggctcaaggaaggaaagaagacagctgcccacaagcagagacttgtgcattcaaatcacccagtctgcacaagtccaaatgcctcgtggagaggattttagtgcacagaaattatgaggctattcacaagagccttatacctgtgcttccagaagactcttctggattcgaggtagcacctactgtcattgggcagccttcaacggcaaacagagcaacccagtctaaaccgaaggcagataccagtatcagccacccagacgcctccttggcccaagcagggatgctccctgagtactctgaatctccttgtcgctacttcttcccaggcctcttggccacttatcctgagcactggtactaccacaaggctcaaataggaagagccaatagtccatgtgagaaaccacggaaggctaaagatagaaggaaatatttgggccacgttgaagaacaagttcaccagtttagggttgcagttgaccacagcctatcctgtcagctcaggatgcaatgtgggaaccagccctggacaggacgccatcgcattgccggtgcactcacacatacccacagttactcagactgggaccacacagacatgtcaatcgacctcacatgcacagccttgggaaaaggaacatctacaggaacacctgacgaggctgcacccttggcaggaagaacacctgacacggctgaaagcttggtggaaaaaacacctgatgaggctgcacccttagtggagggaacatctgacaaaattcaatgtctggggaaagcaacatctggaaagtttgaacagtcagcagaagaatatgcggtgcccggttcggtcccagacgcggccaccaaccgacgtaaagccggtgagccgctcggggaggagagaggatcggcgggcggcgggcggggaagggggcgcagacaggcaagggccggggaccgcgagggcaagggcacctgggagcccgcagaggggcggctgagggagaaacctcaggcatggccgggccaccaggaaaacacggccgcgggatcccaccgccacagacacgagggcggtcccgcggcgccccgcctgggacgccggaaggccctcggcacccaccaagacctgcctcacgagcccctggtcccgccaccggggccccgaagcgaccacagccacaaactcaacgccagggccacatcgctcgtgattctcgtccatcctccgacccggtcccgctccgggagaccggcgcgcccccaccgtgggacgctttcccagggccaggcggcccgaccacgtgccacgcaaacgccgtcgtccgcaccggtcgcgactcggcaagggagcgggcggagagctgactcgcggcggaggggggtcactcgccggacggaacgctgcgcgcagccatcgctcgctgtcagccgcgtcccaacccgctag

SEQ ID NO: 8082 - DNA, 424 bp, Homo sapiens
  SIMILAR (18)..(419): 291254mologous to Caenorhabditis elegans predicted using Genefinder~cDNA EST yk14g11.3 comes from this gene~cDNA EST yk14c11.3 comes from this gene~cDNA EST yk261h2.3 comes from this gene,accession number Z98866,Smith-Waterman Score=146.
gagaacatgcattagttctgtttgaaaagtgtgtgcaagataaatatttgcagcaggaacatatcataaaaaagttaattaaagaaaataagaagcatcaggagctcttcgtagacatttgttcagaaaaagacaatttaagagaagaactaaagaaaagaacagaaactgagaagcagcatatgaacacaattaaacagttagaatcaagaatagaagaacttaataaagaagttaaagcttccagagatcaactaatagctcaagacgttacagctaaaaatgcagttcagcagttacacaaagagatggcccaacggatggaacaggccaacaagaaatgtgaagaggcacgccaagaaaaagaagcaatggtaatgaaatatgtaagaggtgagaaggaatctttagatcttcgaaagga

SEQ ID NO: 8083 - DNA, 816 bp, Homo sapiens
  SIMILAR (403)..(747): 291254mologous to Cavia porcellus enterophilin-2S,accession number AF126832,Smith-Waterman Score=116.
atggtgcaaaaggaacttgaggaggagggaagaaaaagcacccctcaaagctggggaagagaaaatatggagaaagccctaaattcctcattgaaggccagtctcggaagtggaggggttatgatctgtgcttcagtcaaagctctcctcactgttgtgattgcaaaggtgcttggaaggttacttgatgagcctctttctgctgctccagacccagactgctctgtagcagacactggacatacaaacagaaatattagtcaccaatatcaagatgaaatcattatccttgatgggtcagatcttccgaggatgagtccgcgtaggaaatatgaaccccctgtcttcccggggcggaagacctacaagatctcaattagaggaaaggccaacaagaaatgtgaagaggcacgccaagaaaaagaagcaatggtaatgaaatatgtaagaggtgagaaggaatctttagatcttcgaaaggaaaaagagacacttgagaaaaaacttagagatgcaaataaggaacttgagaaaaacactaacaaaattaagcagctttctcaggagaaaggacggttgcaccagctgtatgaaactaaggaaggcgaaacgactagactcatcagagaaatagacaaattaaaggaagacattaactctcacgtcatcaaagtaaagtgggcacaaaacaaattaaaagctgaaatggattcacacaagtcctttaagaatcccttggtccgatgtaactttgccgccacttttggttactacaaaaaacttattccagaaattaagacaggttctagccattaa

SEQ ID NO: 8084 - DNA, 808 bp, Homo sapiens
  SIMILAR (9)..(122): 631254mologous to Drosophila melanogaster putative type III alcohol dehydrogenase,accession number U66411,Smith-Waterman Score= 127.
ataatgtgagagtggaaccaacggattcaagcttcatggaagctattgagtttgcccaaaagggagcttttgatgcctatgttgctgtcggtggtggctctaccatggacacctgtaaggcctgctaatctgtatgcatccagccctcattctgatttcctagattatgtcagtgcccccattggcaagggaaagcctgtgtctgtgcctcttaagcctctgattgcagtgccaactacctcaggaaccgggagtgaaactactggggttgccatttttgactatgaacacttgaaagtaaaaattggcatcacttcgagagccatcaaacccacactgggactgattgatcctctgcacaccctccacatgcctgcccgagtggtcgccaacagtggctttgatgtgctttgccatgccctggagtcatacaccaccctgccctaccacctgcggagcccctgcccttcaaatcccatcacacggcctgcgtaccaggggcagcaacccaatcagtgacatttggggctattccacgcgctggggattcgtgggttaagtatcttgaaggagggctgttcaggaaatcccgatggatctttgaaaggcaaggtctcatatgcacttggcaagtgcttttgctggcatcggctttggaaatgctggtgttcatctgtgccatggaatgtcttacccaatttcaggtttagtgaagatgtataaagcaaaggattacaatgtggatcacccactggtgccccatggcctttctgtggtgctcacgtccccagcggtgttcactttcacg

SEQ ID NO: 8085 - DNA, 1730 bp, Homo sapiens
  SIMILAR (2)..(277): 481254mologous to Drosophila melanogaster putative type III alcohol dehydrogenase,accession number U66411,Smith-Waterman Score= 233.
gattgatcctctgcacaccctccacatgcctgcccgagtggtcgccaacagtggctttgatgtgctttgccatgccctggagtcatacaccaccctgccctaccacctgcggagcccctgcccttcaaatcccatcacacggcctgcgtaccagggcagcaacccaatcagtgacatttgggctatccacgcgctgcggatcgtggctaagtatctgaagagggccgtcaacagcactgacaaatgaagaagaagaatgagtctcagggcaccttcctgggagtggccctcgccatccaggggaccagcgcgttgcctcccccggcgcttttacatcacatgaggcagctgacagcgttatttattatggcctttgcttgaaacagttgatgagaaatatgtttcccttcagttttcatttagaagacaaggcgtcgtttgaataacttgcctgatttttcttcctaccgagtagcatttctttttttttcaccatatctttccctaaggcagctccttattctgtaggaattgccaatgttgatgtgttattgttaggtatttatatcattcacagggctggcagaaatcccgatgatcttgaaggcaaggtctcatatggcacttgggcaagtgctttttgctgggcatcggctttgggaaatgctgggtgttcatctgtggccatgggaatgtctttacccaatttcagggtttaggtggaaggatgttattaaaggcaaagggatttacaatgtggggatccaccccactgggtggcccccatgggccttttctgtggtgcctcacgtcccccagcggtgtttcacttttcacggccccagatgtttcccagagcgaacaccctggagatggcaagaaatactgggagccgacacccgcactgcccaggatcccaagatgcagggctggtgttggcagacacgctccggaaattcttatttcgatctgggatgttgatgatggcctagcagctgttggttactcaaaagctgatatcccggcactagtgaaaggaacgctgcccccaaggaaagggtcaccagctttgcaccccgtccccagtcagaagaggatctggctgctctgtttgaagcttccaatgaaactgtattaaatgtccatcttaactgaaagaatttcccgctggccattgtagtgctgaagagcaagagctggatcttagcttagggctttggtcttttcatctttgtgccataacttacctgtttaccagttattaggtggggatataccatttatcttgcagggaaattccccaaaagctcagagtcccagttccttcccataaaacagggtgggacaaatggaccacttatgttaggacccccagggctcgacttcaggggtcagtgttcctggtcccaaaccccacacagaatactctggcctctggctttcatgtaggccaaatgaggcaaaaaacttcagtatctattcaaaagtgtaaattatatttcctaatgcctagtaattcacttcatgtctaaaaatttatctgatagaaacactagcaccagtacatacagaagcatggcaaggatgtttctggcagcacttttctaataataaaagatttgaaacaaccttaagtattcattattggtatatagatcacttatagtatactagacagtggaatactatggtactgttaataaagatgaagtaaatctcttggaaaaaaa

SEQ ID NO: 8086 - DNA, 993 bp, Homo sapiens
  SIMILAR (2)..(46): 661254mologous to Homo sapiens putative p150,accession number U93572,Smith-Waterman Score=71.
atgggaaaactggatatccatatgctgaagaatgaaactagaccctacttctcaccatatacaaaaatcaagtcaaaatggattaaagacataaatgtaaaacctcaaactatgaaactactacaagaaaacatcagagaaactctccaggacattggtctgggtgaagatttctcacaagcacaggcaaccaaagcaaaagtggacaaattggatcacgtgaagtttaaaaacttctgcacagcaaaagaaacaatcaacaaagtgaagagaaaacccaaagaatgggagaaaatactaatatttgcagactatccatctgacaagggattaataaccagaatattatttattgatcattcttgggtgtttctcggagaggggaatttggcagggtcatcggacaatagtggagggaaggcttggaagcacctgctgccacttctggcctctcgctgctccggcacccattccaatcttagagcaaagttgaggctgagccagggcactgtcgcgacctggccagttttgaagagagaaggagagaagagctgcggcccttcagagagcccagacctaggagctccccaagccagggatgtgacaccctgtttgggaatctgtagttcctggcttctccaagcttctgggcaccaccacattccctggtgccaactgtggaagctgtttgtggtatacctggtccagctgcagcctcacagggaggtagcgcttgtgccagcacctggagctgcccaccccaccacagccagtgtgcctgtctgtgcgcagtggctggaccccatggtcattcactcacacaccctttgctgctctgagcctgactcacccttggcaggcatgggattcaggccagtagcacaagccaagcacaaccctgccaggccgagtggatggaatgagtccagtaggcctgagcaaaacttggacaaaggtgccactagccacagaggtttctggctggcaaggtga

SEQ ID NO: 8087 - DNA, 400 bp, Homo sapiens
ggacaatacccgtggcctttagaaacaaaccctaggttcctgagggaatgaacactgccaaagtccttacagaaatcccttttatgagatagcccagtcccagaataaagcctttgcggtacttgtcaacaagcaagaagcctttctgaagaggtagatgaaagcagtatttcacagcaggtgtgctgcccgacgtgacgaaagacatgcatgcccctctcagcacagaccagaagatcatctgttgttgaaaacagtccgatggtggtgagaagagatgtcgaccacattactaggtgcattatttcaattttattgtattaagaacaggaatgactgccatttctttaaataaccaactaaacaaataaaaaggagcagaaatcctcgtgccaagctt

SEQ ID NO: 8088 - DNA, 690 bp, Homo sapiens
  SIMILAR (9)..(410): 801254mologous to Homo sapiens beta-adrenergic kinase 2,accession number X69117,Smith-Waterman Score=534.
agattacgctcgggaaggactgtattatgcacgggtacatgctgaactgggaaacccatttctgactcagtggcagcgtcgctattttaccctctttccaaagaacatttgatggagacgaaggggagaatccccgccaaaatttactgacaatggaacagattctctctgtggaagaaactcaaattaaagacaaaaaatgcattttgttcagaataaaaggagggaaacaatttgtcttgcaatgtgagagtgatccagagtttgtgcagtggaagaaagagttgaacgaaaccttcaaggaggcccagcggctattgcgtcgtgccccgaagttcctcaacaaacctcggtcaggtactgtggagctcccaaagccatccctctgtcacagaaacagcaacggcctctagcacccagaaacagggagggtcctcgaggaggacacaccagggtctcagccttttggggtgaacgaggatgaggcatctgatctattcgctaccgggactcctccaggctcccgagaggagtcgggacccttcggctttggggtcagctcagctccctgccttgtcacatttgtctgcattagaaactactgaagaaaataaaagttctttttctttgctacacactttggtaccctatgaacctagaacttgaagtgactcctacttatcacgtaaa

SEQ ID NO: 8089 - DNA, 4714 bp, Homo sapiens
  SIMILAR (1143)..(1829): 561254mologous to Homo sapiens bK407F11.2 (adrenergic, beta, receptor kinase 2),accession number AL022329,Smith-Waterman Score= 535.
tataaatgaatgttgactgtataaaacaataatgtcgtgtttctcgagcttatgatgcctacatcatgaaggaacttctttcctgttcacatgtaagtatttcttcttactctgttactttagtactgatgaataagggaccatgttcagcgtatggttgcaggaaagcagacactggaaaaatgtaagctttcaatgctcttatgttttactggcactattaaaattttaatatttgcatgaaagtggcttctgtccttcagaagcgaatcgagagaagcgacttggattactcacatccgaattgtccttttgagattgtccctagtcagcgtttcactggaaggtgatcttacctgcctctcactacctgctactctgtttatcagcctttccatttctagcacacctgtggcaagagctatggaagacaggcacacagtgctcggaaggcctttcgcagggtggagatggggtcagcgaatgcctttctgaagttgggggttacctggagaggagccagtgcacgtggctcctctgagcccaggcacgtgaggttgggggaatcagatgaggggccagggtctgcggtggtggggggagtcgtgcaagttcttcaacaacgacttcatggtcctgttttatcacagtttttttatggcgagttcctgcaaaatgtaagctattttgttgacttttagtaggaaatcaaagtagacagttccttgctcaagagtttcctggatctgatgaacggtaagcaaaacttggaaaatctgaatgccttgaaagactttgccatgatgttaaatcttagttatgccactgaaatcattctgggtctggaacacatgcacaatcggtttgttgtctacagagatttgaaggtgaggacgattgacagactcattctgcatagtaggtattgtgtgaatggtcctctagaagacaaagtcacggaaaaggactttccaggcaaccctgaaattaaaccttcccggaaaatggcttggatgtccctcatagaaatctccaacgctctcacagcgtggcctgatgaccttaccctgtcaaactttaggttcgggctgattgagctttccagaatgctggatttgccctgatggaccaacgcccattttgccgactggttctccctgggctgcatgcttttcaaacttctgagagggtgagttgaaatgcatccttctagtgctgtcctcatggcagcaggagcttggatgaaaactaccgtggtaaggggattcaaaactgtattcttgtctgtatggtaattgtcatgcttcattccgtcaaagcgagacgttagcaagcggctgggctgtcacggaggcgggtaggccattgttcctgcctttcggtatctttaccagaagagcaaaatagtgattttaaatttccagtacccaccacccttgattcctccccggggagaagtcaatgctgctgatgcctttgatattggctcatttgatgaagaggataccaaagggattaaggtacacatgtgatcatttatttctttatttttatttttggatgggatgatttctgttggaaagcaagaagtaacggaaacagtttatgaagcagtaaatgcagacacagataaaatcgaggccaggaagagagctaaaaataagcaacttggccacgaagaaggtaaaatagctcacgtgtctcaaaacatttctaatgcagtaaattttcaaaatttcttgtatctgactcagtggcagcgtcgctatttttacctctttccaaatagacttgaatggagaggagagggagagtcccgggtaagtctaaggcagcctcaccgagcatgtttcccagtacgtacaatggcatatggttattggctattgcgtcgtgccccgaagttcctcaacaaacctcggtcaggtactgtggagctcccaaagccatccctctgtcacagaaacagcaacggcctctagcacccctgctgtgaaatactgctttcatctacctcttcagaaggcttcttgcttgttgacaagtaccgcaaaggctttattctggactggctatctcataaaaggatttctgtaagactttgcagtgtcattccctcagaacctaggtttgtttctaaagccacggtattgtcagaaatccaaggtgacagtccccaagccacagctgcctgggcatgactgtcttcctgtaggtccgcgggtcactttgaaaacaagagtgtttcggtggaaggatttgagaacaaaatgctggggcaaatggacattcgtaagaatcactctcctcaggccccagctgttcgctaataatttttaaaaatgtgtttagataagacttccagggctgctgtggacccatggaaatgcaggaagcctgctgtgtgtaccctcatcaaccctttgcagagtgaaatgtccacttctgcggcagaaggcaggttagagaagtcccaggagactgagcattgttctgaagaaactaggagccatgtcccctgagtagggagcacaatgcctagtggtcagctcctggggcacacagcagtgtggcctgaaggtgacagaattctaaatgaagatccaattaataaagaaccaaatagtgacctaagccttgtggccagtggaggggagggcaggtgacagcgggtgtttgggtggaggctgcaggaggctgtcatagaatcctgcagggtgacaccgtggccccagcgcaagatccacaaggcgaccccagctggcctcccggtcggcaggggcgggtgtggggggggcgggggttgctggattggagaactttcatgtctagctgtaaaatggtccaatcggcaggatgtgggtggggtcagataagggaatgaaagcaggctgccagcaccagcactggtaacccgcccgggtctcccacctcatgggcttaaaacagcagctgacgaggcaggtgtatgttttgggcccggaccggagtatggcgataagaacacttgcttaaattaagtcttcctcactccaccttgtgcatgtgatttgatgagttggaggtgggagggtgagaaacttctttctggctgcctcctgcctgcccctgcccctgcccctcccagcctgatgaagcagttagctgtcgcctctccagaacgagaggtaagtggttcctaagaaggaggaccgtatgcgtttccatacccatcattctgtcttgtgagccagcagatctctcaggacgaccagtcaagctctcctgggagctcagacattctgggcaaggagagcgaggggtcccgcagccccgaccctgagcagatgacaagcatcaatggtgagaaggcccaggagctgggctccagtgcgacaccaaccaaaaagactgtccccttcaagaggggcgtgaggaggggtgatgtgttgttgatggtggccaagctggacccggactcagccaagccagagaagactcatccccatgacgcccccccttgcaagacctctccccccgccacagatactggaaaggaaaagaaaggggagacctctaggactccttgtggctcccaggccagcaccgagatcttggccccgaaagctgagaagacccggactgggggtcttggggacccaggccaaggaactgtggcactgaaaaaaggcgaggagggtcaaagcatagtggggaaggggcttgggacccccaagaccacagagctgaaagaggctgagccccagggcaaagacaggcaggggaccaggccccaagcccaagggcccggcgagggggtgcgaccagggaaagcagagaaggagggagcagagcccacaaacacggtggaaaaggggaatgtctctaaggacgtagggagtgaagggaagcacgtaaggccccaaatccctgggagaaagtggggaggtttcctgggaagaaggagtaagtgggacggtccccagaataagaaggacaaagaaggggtgctcttaagtaaggcagagaagacaggtgagcctcagacccagatggagaagacaagccaagtgcagggcgagttgggggacgatctgagaatgggggagaaagcaggtgagcttcggagcacgactgggaaggcaggtgagtcctgggataagaaggaaaagatggggcaaccccagggtaagtccgggaacgcaggtgaagctcggagtcagacagagaagggctgtgaagccccaaaggaggtgagcacaatggtggagtcgccagcagctcctgggaagggaggctggccaggaagccgtgggcaggaagcagaggagccctgctcaagagcaggtgatggggctggtgccctggagacagagctggaaggacccagccagcctgctctggagaaggatgcagaaaggcctcggatacggaaggagaaccaagacgggccagccccgcaggaggagggcaaaggaggccagagcagagactcagaccaggtgagggggctgcggccctgggagcgggaagcggcagacaggcctctccagagatgcagggatgggaaagatctgccccagggatggacaaggggtggacggggggtgggcagggaattggagaggggtggctggaactgcaaggcacccagaggaggggacgagcctcttggtaagtaggggtgttagcacctttggagggtctgagtcttctcctgtgccccctactgctg

SEQ ID NO: 8090 - DNA, 434 bp, Homo sapiens
  SIMILAR (310)..(59): 941254mologous to Homo sapiens breast cancer nuclear receptor -binding auxiliary protein,accession number AF126008,Smith-Waterman Score=411.
tctctcttctttttctttggctttgttaatccaaataggcgggtagtagtcagaggtgtgacgcaggggcctggctctgcctttctggtcctttgtttgtctggctggttgaactcagtatgtgaaaaggccccttatctttgtgtgtccgagagatgctgttcctttttggggacactgaaagttctgagtccaatgaccctgatttggctatggaaggtgcagatggcgaggggggctcctcaggactggggaagaacgatgggatcctcatcagcttggtatgtggatgggaaacctctgcgaactctacagagctcacgtctgtggactgcatagagcttgaaggtttcattagctgccctcccccaagtagtatctgacacaggtcccgttctgtctgccgctggctgagcgctctgcctcccggcgca

SEQ ID NO: 8091 - DNA, 184 bp, Homo sapiens
  SIMILAR (46)..(180): 1001254mologous to Homo sapiens non-ocogenic Rho GTPase- specific GTP exchange factor,accession number AF127481,Smith- Waterman Score=225.
  misc_feature (1)...(184): n = a,t,c or g
ggtgtggtgctgcagcaggacagctacattgaggaccagaaactgcgcgaggaggaggtgcagcaggggcagcaggacctggaaaaggagcgggaggagctccagcagaagaagggcacataccagtatgacctggagcgactgcgtgctgcccagaaacagcttgagagggaacaggagncag

SEQ ID NO: 8092 - DNA, 820 bp, Homo sapiens
  SIMILAR (505)..(594): 731254mologous to Homo sapiens non-ocogenic Rho GTPase- specific GTP exchange factor,accession number AF127481,Smith- Waterman Score=107.
atgagacgggcttgaaaaatgaggggagagttctagtccgtcatagtgcctggtgccccctgctgtggggtcgggagggatccagaagctcgctgtcgtcctggccagagttgcagggctcccctctgtgtgcctcccagggtgtggtgctgcagcaggacagctacattgaggaccagaaactggtgctgagcgagagggcgcttactcgcagcttgtcccgcccgagctccctcattgagcaggagaagcagcgcagcctggagaagcagcgccaggacctggccaacctgcagaagcagcaggcccagtacctcgaggagaagcgcaggcgcgagcgtgagtgggaagatcgtgagagggagctgcgggagcgggaggccctcctggcccagcgcgaggaggaggtgcagcaggggcagcaggacctggaaaaggagcgggaggagctccagcagaagaagggcacataccagtatgacctggagcgactgcgtgctgcccagaaacagcttgagagggaacaggacgcagctgcgccgggaggcagagcggctcagccagcggcagacagaacgggacctgtgtcaggtaatgggactccctgccgagagcaacctaatgatgatattaattaagaccccctgtgtattaagcaaggtaagaaagtgagcagaaatacagagcctgtttttggccagatgctcatgcctgtgatcccagcactttaggaggctgaggtgagagggtagcttgaccagcctgggcaacagagggagactctgtctctcctaaaaaaaaaacaaacaaacaaacaaac

SEQ ID NO: 8093 - DNA, 1390 bp, Homo sapiens
  SIMILAR (5)..(1132): 861254mologous to Homo sapiens breast cancer nuclear receptor -binding auxiliary protein,accession number AF126008,Smith-Waterman Score=1585.
tttcgtcctactcttgttggaagagaaggagatgattttccgggacatggctgagtgcagcacccctctcccagaggattgctccccaacacatagccctagagttctcttccgctccaacacagaagaggctctcaaaggaggacctttaatgaaaagtgcaataaatgaggtggagatccttcagggtttggtgagtggaaatctgggaggcacacttgggccgactgtcagcagccccattgagcaagatgtggtcggtcccgtttccctgccccggagagcagagacctttggaggatttgacagccatcagatgaatgcttcaaaaggaggcgagaaggaagagggagatgatggccaagatcttaggagaacggaatcagatagtggcctaaaaaagggtggaaatgctaacctggtatttatgcttaaaagaaacagtgagcaggttgtccagagcgttgttcatctttacgagctcctcagcgctctgcagggtgtggtgctgcagcaggacagctacattgaggaccagaaactggtgctgagcgagagggcgctcactcgcagcttgtcccgcccgagctccctcattgagcaggagaagcagcgcagcctggagaagcagcgccaggacctggccaacctgcagaagcagcaaggcccagtacctcgaggagaagcgcaagcgcgagcgtgagtgggaagctcgtgagagggagctgcgggagcggggaggccctcctggcccagcgcgaggaggaggtgcagcaggggcagcaggacctggaaaaggagcgggaggagctccagcagaagaagggcacataccagtatgaccttggagcgactgcgtgctgcccacaaacagcttgagagggaacaggagcagctgcgccgggaggcagagcggctcacccagcggcagacagaacgggacctgtgtcaggtttcccatccacataccaagctgatgaggatcccatcgttcttccccagtcctgaggagcccccctcgccatctgcacctttccataagccaaaatcagggtcattggactcaggaactttcagtgtccccaaaaaaggaacagcatctctcggacacacaaagataaggggccttttcacatactgagttcaaccagccagacaaactaaggttcagaactttgtgtgtccgagagatgctgttcctttttggcgacactgaaagttctgagtccaatgaccctgatttggctatggaaggtgcaaatggcgagaggggccttttcacatactgagttcaaccagccagacaaacaaaggaccagaagggcagagccaggcccctgcgtccacctctgcctctacccgcctgtttgggttaacaaagccttaggaa

SEQ ID NO: 8094 - DNA, 651 bp, Homo sapiens
  SIMILAR (514)..(612): 511254mologous to Hepatitis D virus hepatitis delta antigen,accession number AF008341,Smith-Waterman Score=81.
atgaacagaggtggttttgcggtaaagatccttgcactgctggatgctctgagtacagtgtgcagtcagagggtgcagaaggccaagaagcagcagcacctgcagaataaagagcattttaaagcactcctcaagcagaaggagaagctgaagcagcaagaggacctcagaagaagctcttctgaattcagggcatcaggtgcccccaagcgaccccccaccacgggcagtgcagcctctgatagtgcacctaccccaccacctttctaccaccctggccatgctgcagtctccgtcacagccagcaactgcagtgaggcgagccacgatgccacaggctacagcctccagggtttttctggctttgcccacactgctgcttcctaccaggagaaggaggatccacctgctggatattggaggctggaggctggagcctgtggtcctgcagcttgcctcgctcggctgctctgggtccctgaaagagggtgtggtgtggacgatctgggttctgaatcggattttgttgagtctgggttttatacgtccactagagctgcccgaggctttgcgccctggatccttggctttgcctccgacccacccctcagccgagtggtgatggtggtgatggtcccctccatcttctag

SEQ ID NO: 8095 - DNA, 942 bp, Homo sapiens
  SIMILAR (155)..(847): 281254mologous to Homo sapiens Human N-methyl-D-aspartate receptor subunit encoded by clone NMDA24,accession number W87504,Smith-Waterman Score=106.
atgcgagcagttgtgtggtcagggctgtcccgcctgggtgggtgtttgggggttccggtgtgggctgtgtgggccggactgcgagagcgggcttctgatttctggttcacggatgtttgccgggccccaaggacacccggggcaggcacagctgtcaccctcctggcagctggagaagaagggcttgagagttctacagctcagcacggctcaggcctttgcagcgaagagccgccaggtgccacgacgtcacgcgtggcaaggcaaatcctacagccggaactggctgcctccggctcgccccaggcctgcccttgctatgtcctcagacacccgggggcaggcacagctgtcaccctcctggcagctggaaaagaagggcttgagcagttctacagctcagcgaggctgcagggctttgcagggaagagccgccagtgccagacgtcacgcgtggcaaggcaaatcctacagccggaactggctggctccggctcgccccaggcctgcccttgctatgtcctcagacacccgggggcaggcacagctgtcaccctcctggcagctggaaaagaagggcttgagcagttctacagctcagcgaggctgcagggctttgcagggaagagccgccaggtgccagacgtcacgcgtggcaaggcaaatcctacagccggaactggctggctccggacagaggcccacgtggcggagaagcgtgtgcgatggccgtgcgagggccgcgtagtcatgagcagcgatgcccgtggagtgctggagcagactcagtgtcgtaggggcactgtgagggcacagacggccgagtggcaagcggtgcatgcctgcaggtcgactctagaggatccgcgggacagaacctacctctggaccctgaacattggcatgtcttctgctttgatttcccatgaaagaacgatctga

SEQ ID NO: 8096 - DNA, 1752 bp, Homo sapiens
  SIMILAR (654)..(1127): 291254mologous to Mytilus edulis precollagen D,accession number AF029249,Smith-Waterman Score=108.
atgggtccagggggcaagtctgtgtgtccgtgccagccgtgcacctctccctctggccaggccataggtccagggggcagaactaacacacccttggggcccggcagcacatccgtgaaccagaaatcagaagcccgctctcggcagctccggcccacacagcccacaccggaaacccccaaacacccacccaggcgggacagccctgaccacacactgctcggcatggcccagtgcaggagcatgggagggggcagcggggaccccatttacacaaaaccgaaacaccgcaggaggccacaccgtgagaagtcggctccatcgctactgaacaggcttggcttcctcacctgtgtctctagcgcccacctcccttccatcaagggcttttcccccgagggccgtgcatggaaggtgctcagcaaagagttgaaggatcatcaagtgcacaagggacccaagtgtgcatgggacccaaaactgctggtgactgggacggcccttggctcgtctgctggtttcactgaggagaggctgctgccagaatcctgcggccaggtctgggggtggctgtcaggccatcccctctggccccaaggaggtgggcagatgacagtgggttatggaggagccagtgaagcttgtggggctggggagctgttgatgcggagggcccctcctcagagtccaggcaaggcccgtgggcttcctgcccttactggcaccagggccagacagggcctcgaaaggcagaaatcggcacagaaggagggagacaggaggatggcccaggaagagcggatggtgttggagaagctgctctgtggacgggaagtgctaccagacccgcaggctcccaatttggcaaggaaggaaaaactaattatggcttcatgtcctgcaagaaagagcctgcagcggctcttcagaaacctgccgtcatggaacgtcagcaccagcaccttcgctgccctgctgtgcccatttcccagcgaggacactcaaggcgcgcagggcccagcagctgagctggaggacgaagcccgggtggacgctccacaccatggcctccagggagtgttcccgacctggaggaggcaggtcaccggggtggccctggtggagactgacctggagggagccaggctcccagtgcctctctctgacccagctgcaggaggggcgcctggtggcttgcgtgctgtgcccttgaggatcatctgtaaccagcaccagccccaccctgccctccggacaggacgcgcgggccagattccgttttgtaaaatcgagacagcggctcaggcgcacatgcagtgcgtggagtgcagaaggcctgggtactccggaagcttccagagacagcgtggggcggctgacgtgcggggagacacagacgtggaggacgccacggccgcctcgcccccagggctcccggagcgcggctggctgaggagccaagcagatggtgctgctgagcgtttcctgcctgggcgggaggaggtggggttgccgccggcggggcctgtgactggaaaacgatatctcttcatctttctgccctggacattggaaatcagcggtgagaacagtgctcttgctacaaaatgctcaggttctagaatgctcccatctttccttccattccacatggagtttatccaaagcacaaaggccagtcacggcactgacatccgtggtgcccgctcaccggggagtgggaagcacaagcctgtcctcagaggaccgtga

SEQ ID NO: 8097 - DNA, 759 bp, Homo sapiens
  SIMILAR (145)..(528): 391254mologous to Homo sapiens Human secreted protein, SEQ ID NO: 6063,accession number G01982,Smith-Waterman Score=134.
atggcggcggtggtagctgctacggcgctgaagggccggggggcgagaaatgcccgcgtcctccggggtaaggagagggaccccggggagggcaggactgcagaagatcccttttctttcacgtccagcccgacgatagcaggagggattctcggcaggagccacagcttaacaaggcttcttcataacaggacccgggcccttcaaaacccacagcttccccagagggcaaggaggaaccctgaaccccttatccccggaactggaaaatacattccccagaaaagaggggcaaagaacccccatggaaagctgtgggaacttgccctgggccatgcggctttcccttgtggttattccttcctctttcatccttcacccaagcggggaagtgggacaagggaccgtgttgaaggcagattgaaggcttcgggcagaacattgcggtttttccaacacggggcgagtatgaagagccagaaggttcagggctttcctcccagaagtggccccgttccccctgatgtttgggtctggggtgtctgggggtgcagacctgaggagcgtctgcgaccctccttaggctattgactgttaagtcctcaggttttggccagattccagtttcgtgcctctgaaggtccaccagaagggcgcatgaagcccaaggctgtttgccaaaaccctaccctgccccacaccaaggaagccagccaaaagggaaaataaagttattgagtgtttagtagaaagaaaaaa

SEQ ID NO: 8098 - DNA, 456 bp, Homo sapiens
  SIMILAR (435)..(310): 441254mologous to Homo sapiens PNAS-146,accession number AF279900,Smith-Waterman Score=74.
atggggcagagacagggaggcagctgggagcctgggggcgctggaatccagggcccaagcgctcagtgtggtcacatctctgtccttttcccggccactggatctggtgtctcattttatgttccctcttcagtgcctagggaactcgaggctctccaagtaaaaaaggagagagggtcagaagagatgcccagcagactgccacatggtagacaaggagcccagcctctggttgctttcaaatttgtgaaggaaacaagcaggatgaggcatgtgatgtgcgcgggctgcaacactgtgagaggcactcactggcaggaccccgagagtacatgccctaagtcttccaggcaggagagaaaggagaggcgaacgcctccctggagcatggcaccctgggtggagaagctgaggagcgcgagtatagaagaggtggatgattgggccatggaatag

SEQ ID NO: 8099 - DNA, 636 bp, Homo sapiens
  SIMILAR (124)..(534): 341254mologous to Homo sapiens nuclear autoantigen,accession number M60618,Smith-Waterman Score=162.
atgaaaaatagaagcagaaacaaaggaaatgtggaatggcaagcagaagggataagaagtaaaagaagcgtgggaaagcaaaggccaagcaaggcaaagattccctctggggacaagaatggagtatcactaacccacaatgaagtgatcaataatgacaaccctttagaatcaaatgatgaaaaggagggccaagaagccacttgctcacgaccccagattgtaccaggtttcagcagtagtgacttttcagacctgagtaatggagaagagcttcaggaaacctgcagctcatccctaagaagagggtcagtgcctagggaactcgaggctctccaagtaaaaaaggagagagggtcagaagagatgcccagcagactgccacatggtagacaaggagcccagcctctggttgctttcaaatttgtgaaggaaacaagcaggatgaggcatgtgatgtgcgcgggctgcaacactgtgagaggcactcactggcaggaccccgagagtacatgccctaagtcttccaggcaggagagaaaggagaggcgaacgcctccctggagcatggcaccctgggtggagaagctgaggagcgcgagtatagaagaggtggatgattgggccatggaatag

SEQ ID NO: 8100 - DNA, 619 bp, Homo sapiens
  SIMILAR (1)..(618): 661254mologous to Homo sapiens nuclear autoantigen,accession number M60618,Smith-Waterman Score=616.
ccagaggcagagctacacaaccatggaatccaaattaattcctgttctgtgcgactggtggatataaaaaaggaaaagccattttctaattcaaaagttgagtgccaagcccaagcaagaactcatcataaccaggcatctgacataatagtcatcagcagtgaggactctgaaggatccactgacgttgatgagcccttagaagtcttcatctcagcaccgagaagtgagcctgtgatcaatagagccaccccttgtgaactcaagtgttgaaaggagggcccaagaagccatttgttaaggccccgagatgttccgagagcccttggtttccggaaatttttctccattcgaggaaagttttaggaaagggttgttaggccaagacccggattttccggattccattgagaagaagccgcccgcagaagcctcgagcgggggcactgagaagcaagcatggtgagaaggctcctatgacttctagaagtacatctacttggagaatacccagcaggaagagaccgtttcagcagtagtgacttttcagacctgagtaatggaaaagagcttcaggaaacctgcagctcatccctaagaagagggtcaggtaaagaag

SEQ ID NO: 8101 - DNA, 1155 bp, Homo sapiens
  SIMILAR (22)..(534): 991254mologous to Homo sapiens aryl sulfotransferase,accession number X78282,Smith-Waterman Score=924.
atgagccaccgcatccggcccgtggtctatgttgcccgcaacgcaaaggatgtggcggtttcctactaccacttctaccacatggccaaagtgtaccctcaccctgggacctgggaaagcttcctggagaagttcatggctggagaagtgtcctatgggtcctggtaccagcacgtgcaagagtggtgggagctgagccgcacccaccctgttctctacctcttctatgaagacatgaaggagaaccccaaaagggagattcaaaagatcctggagtttgtggggcgctccctgccagaggagactgtggacctcatggttgagcacacgtcgttcaaggagatgaagaagaaccctatgaccaactacaccaccgtccgccgggagttcatggaccacagcatctcccccttcatgaggaaaggcatggctggggactggaagaccaccttcaccgtggcgcagaatgagcgcttcgatgcggactatgcgaagaagatggcaggctgcagcctcagcttccgctctgagctcatccttcggaaagctctggacaagatcgcggaaatcaagtctctgttggaagagaggcggattgcggccaagattgccggtctctacaatgactcggagccaccccggaagaccatgcgcagaggggtgctgatgaccctgctgcagcagtcggccatgaccctgcccctgtggatcgggaagcctggtgacaagccctctcagccttccagccccctcgttttggctgcctctaaggccctccaggtcctcctgggcttcctcctctacaatcttccctgtctttcccaccgccaccacccccagttcctcagccgcctgcgcctcccgctctacagtggggactgcatctcccaggagtgcctcaacctggtgttcctgctggcagacgtgtggttcggctttctgccaagcatctacctcgtcttcctgatcattctgtatgaggggctcctgggaggcgcagcctacgtgaacaccttccacaacatcgccctggagaccagtgatgagcaccgggagtttgcaatggcggccacctgcatctctgacacactggggatctccctgtcggggctcctggctttgcctctgcatgacttcctctgccagctctcctga

SEQ ID NO: 8102 - DNA, 717 bp, Homo sapiens
  SIMILAR (1)..(717): 981254mologous to Homo sapiens apolipoprotein B48 receptor; membrane binding protein 200; MBP200,accession number AF141332,Smith-Waterman Score=1245.
  misc_feature (1)...(717): n = a,t,c or g
gggctggatcccgcgggctcccagacagcgagggcagaggggttgggagccatggtggaggctggggggcttctagagaagtggacgctgttggaagaagaggctgttggatggcaggagagagaacagagggaagacagtgaggggcggtgtggggactaccaccctgagggagaggcaccaaggctccttgatgcagagggtctcatggtgaccgggggccggagggcagaggccaaggagactgagccagaaagcctggaacatgtcaggggccaggaggagcagccaacacaccaggcccctgcagaagctgcgccggagtcagtcggggaagccgagacggctgaggccatgggcagtgccagaggaggtgctgccaacagctggagcgaggccccgctccccgggtccctcctagacgtctctgtcccaaggagtcgcgtgcacctctcgagaagctcctcacagcgtcgctcccggccctcttttcgtcggactccggcctgggagcagcaggaggagcccccagcccccaaccctcctgaggaggagctgtcagctcctgagcagagacccctccagctggaggaacccctggagccaagccctctgaggcatgatgggaccccggtgccagccaggagaaagcccctgggacacgggtttggcctcgcgcaccctggcatgatgcangagctgcaagcccgtctgggg

SEQ ID NO: 8103 - DNA, 3054 bp, Homo sapiens
  SIMILAR (2955)..(1): 781254mologous to Homo sapiens 06-AUG-1998 cDNA encoding a human monocyte-macrophage apolipoprotein B receptor,accession number Z61226_cd1,Smith-Waterman Score=3727.
tcactggggcttaggccggcccagacgggcttgcagctcctgcatcatgccagggtgcgcgaggccaaacccgtgtcccaggggccttctcctggctggcaccggggtcccatcatgcctcagagggcttggctccaggggttcctccagctggaggggtctctgctcaggagctgacagctcctcctcaggagggttgggggctgggggctcctcctgctgctcccaggccggagtccgacgaaaagagggccgggagcgacgctgtgaggagcttctcgagaggtgcacgcgactccttgggacagagacgtctaggagggacccggggagcggggcctgcaggaaagggggcacagaggaccatggggccggcttcgggattccactcgttccccccgagaccccaccaagagccctcacctcgctccagctgttggcagcacctcctctggcactgcccatggcctcagccgtctcggcttccccgactgactccggcgcagcttctgcaggggcctggtgtgttggctgctcctcctggcccctgacatgttccaggctttctggctcagtctccttggcctctgccctccggcccccggtcaccatgagaccctctgcatcaaggagccttggtgcctctccctcagggtggtagtccccacaccgcccctcactgtcttccctctgttctctctcctgccatccaacagcctcttcttccaacagcgtccacttttctagaagccccccagcctccaccatggctcccatcccctctgccctcgctgtctgggagcccgcgggatccagcccacagctgtcctctgcgcctgcagattcctcggcctctacccgccctccccaaggtcctccctccctggactcaaaagcctctacttggctgcctctgccagtcacctcttcctctgctgagccctccagaccaaattcttgcccacctgcatgctctcctgctgctgcctcttccttttctttcgagtcccagccttgcccaagcgccccttccaaagcttcaccagcgccagcagcgctgatgtgtgggaccacatcaccccccataatcccagcagccacagagccagtctgtgcatcctcacggtccgggaggcccacagccaccgcttgcagcctccagcctcttctggatgttctgtcagcctccgcctcctcatcctcagtttctctggcataggcctctcccagtgacgggcaaggccctgcgtctgcccctgtgcttccgtccagctcctggttctctgagacagatgcctctccctcctcagttccacatcccgcgtcctgggttgtcagcccctccccgcctgcctctgggacttctgatagttcagactctcggtctccttcagcctcagccgccagggtctggcctcccgcagtctcctcctcctcccgctgctcgccatcggccgcatcctcctgagtatttcctctctccatgtcctttctcgtgcggttttcccaggctcctgggaaggcctcggaggcctcaggctttacagaccccgcgtgcctgggacctgcctccaggctcctctcctgctcctctttgctcagggccagaactcccatgagctccacctcccctgcctccctttcctcgggttgcttagttggggtctgggcgccccccatcagctcaggtccttggcctttggtgacgctgtgtgtgaggccaccccattccacgcccagtaggccacagctagtctgggccgcctcactctcctcccctgtgagctcctcctcaggcctggcctctggagttgcctccaagtcggcagtgccttcagcctctccatctgagggcagctcagccactggatccctgctgctccctctctcctcctgggcctcctctgcctgtaccagctcttccatcctggcccggtcggccctgatccccaagtcctgcctcatctcagcctccttaccacgcaggtctacctggccctcaaagctctcccctgcctcctggcctcccacagcttccctccctgcggtctggctctcagcagcctcttctgttctttcagtgcccaggacctggggctgtttggggaaagggctcacctcagcctctctctcctcatccccctcctcctctaggacccagacttttccagtagcctctaggagcctttctcctgggactgctccatattctgtctgtctgactcccagcaggtcagcctcctctttgcctggggttgtcctggcctcctctctgcctaagattccccagtcctcaggctctgcccctgggccccacgtcccccatgccctagtgctttcacaggccttctccaccactaccacctcttctcctttcccagccccttcggccccaggctcctcagtttcccctgcatctgcctccctgaccccctgctccatctcccggttgtcccctgccgcctttggcccaacagcaccagccttcccctccgtctccccatgccaggtccactctgactccgcccctctggccatccctggctctcttgccctgacctcttcctcctcctcctcctgttcccagcttctcagcctctcttctctgttcacttcctgctcatgggactcctgcctctcctgggcttggccgctcctgtcttggcaagccccagaccctgccttggatttctttctggcctccaagtgggcgcttggctcctggcacctggcagccttggctgtctccccagccccactgtcctgcctctctgcttgggacccatgggagctgccatctccccagccccaggtctgttctacagctgagctccccacttcatgtcttctgtcatctccaggccctctcagccttccagccccctcgttttggctgcctctaaggccctccaggtcctcctgggcttcctcctctacaatcttccctgtctttcccaccgccaccacccccagttcctcagccgcctgcgcctcccgctctacagtggggactgcatctcccaggaggtaggagacaaaggtgccaagggaatc

SEQ ID NO: 8104 - DNA, 3125 bp, Homo sapiens
  SIMILAR (205)..(1449): 751254mologous to Homo sapiens 06-AUG-1998 cDNA encoding a human monocyte-macrophage apolipoprotein B receptor,accession number Z61226_cd1,Smith-Waterman Score=1473.
gacacacagacagagacagacaggatggactttctccggctatacctccctgggctgcaccaggccttgaggggggcactggattccctcggcacctttgtctcctacctcctgggagatgcagtccccactgtatagcgggaggcgcaggcggctgaggaactgggggtggtggcggcgggaaagacagggaagattgtataggaggaagcccaggaggacctggagggccttagaggcagccaaaacgagggggctggaaggctgagagggcctggagatgacagaagacatgaaggggggagctcacctggagaacagacctcgggctggggagatggcagctcccatgggtcccaagcagagaggcaggacagtggggctggggagacagccaaggctgccaggtgccaggagccaagcgcccacttggaggccagaaagaaatccaaggcagggtctggggcttgccaagacaggagcggccaagcccaggagaggcaggagtcccatgagcaggaagtgaacagagaggagaggctgagaagctgggaacaggaggaggaggaggaagaggcccaggtcctgggcactgaaagaacagaagaggctgctgagagccagaccgcagggagggaagctgtgggaggccaggaggcaggggagagctttgagggccaggtagacctgcgtggtaaggaggctgagatgaggcaggacttggggatcagggccgaccgggccaggatggaagagctggtacaggcagaggaggcccaggaggagagagggagcagcagggatccagtggctgagctgccctcagatggagaggctgaaggcactgccgacttggaggcaactccagaggccaggcctgaggaggagctcacaggggaggagagtgaggcggcccagactagctgtggcctactgggcgtggaatggggtggcctcacacacagcgtcaccaaaggccagggacctgagctgatggggggtgcccagaccccaactaagcaacccgaggaaagggaggcaggggaggtggagctcatgggagttctggccctgagcaaagaggagcaggagaggagcctggaggcaggtcccaggcacgcggggtctgtaaagcctgaggcctccgaggccttcccaggagcctgggaaaaccgcacgagaaaggacatggagagaggaaatactcaggaggatgcggccgatggcgagcagcgggaggaggaggagactgcgggaggccagaccctggcggctgaggctgaaggagaccgagagtctgaactatcagaagtcccagaggcaggcggggaggggctgacaacccaggacgcgggatgtggaactgaggagggagaggcgtctgtctcagagaaccaggagctggacggaagcacaggggcagacgcaagggccttgcccgtcactgggagaggcctatgccagagaaactgaggatgaggaggcggaggctgacagaacatccagaagaggctggaggctgcaagcggtggctgtgggcctcccggaccgtgaggatgcacagactggctctgtggctgctgggattatggggggtgatgtggtcccacacatcagcgctgctggcgctggtgaagctttggaaggggcgcttgggcaaggctgggactcgaaagaaaaggaagaggcagcagcaggagagcatgcaggtgggcaagaatttggtctggagggctcagcagaggaagaggtgactggcagaggcagccaagtagaggcttttgagtccagggagggaggaccttggggagggcgggtagaggccgaggaatctgcaggcgcagaggacagctgtgggctggatcccgcgggctcccagacagcgagggcagaggggatgggagccatggtggaggctggggggcttctagaaaagtggacgctgttggaagaagaggctgttggatggcaggagagagaacagagggaagacagtgaggggcggtgtggggactaccaccctgagggagaggcaccaaggctccttgatgcagagggtctcatggtgaccgggggccggagggcagaggccaaggagactgagccagaaagcctggaacatgtcaggggccaggaggagcagccaacacaccaggcccctgcagaagctgcgccggagtcagtcggggaagccgagacggctgaggccatgggcagtgccagaggaggtgctgccaacagctggagcgaggtgagggctcttggtggggtctcggggggaacgagtggaatcccgaagccggccccatggtcctctgtgccccctttcctgcaggccccgctccccgggtccctcctagacgtctctgtcccaaggagtcgcgtgcacctctcgagaagctcctcacagcgtcgctcccggccctcttttcgtcggactccggcctgggagcagcaggaggagcccccagcccccaaccctcctgaggaggagctgtcagctcctgagcagagacccctccagctggaggaacccctggagccaagccctctgaggcatgatgggaccccggtgccagccaggagaaggcccctgggacacgggtttggcctcgcgcaccctggcatgatgcaggagctgcaagcccgtctgggccggcctaagccccagtgactgagacccggtgctctgggagccaggccctgagtgggtgccagaaggcttgctccaatgccactgagccctgctccctctgccactgtggacacatcctctccaccctctgggcctcagtgtcttgatgtatcattcatggagcaggcaaaaccagacgtctgagaagacccgtgaacttaaggagtctgattctccgacacaggctggtggaccacgtaccccactgagaccacctctcagggtgcctgccctggttcctccccagcctgagtcaactgtttggactgcaaagagggtggggacggggggttaaccctgttccccccaaacctttggaggcccaggtgggagggttgctttagacccggagtttgagaccagcctgggcagcatagcaagatccccatcttttaaaaacaaaataaaacaataaagactgcaaaaaaaa

SEQ ID NO: 8105 - DNA, 463 bp, Homo sapiens
  SIMILAR (51)..(461): 301254mologous to Homo sapiens Type III procollagen (prior art),accession number R28916,Smith-Waterman Score=89.
ggcgggggcggagggcgcgggcagcggggccgaccctcccggccgcggtacctgtgccctggcccggggccaaccggtggccgggcgcgtgcgcagcggggggggtcaccgttggaccctcggaggacaatgggcgcccattgttacctccccagcgccaccccccagtaggcgacttctctcggagaagatgccgctttcgactccctaagcacaaagaaaggtcgccggacgctcggtttaaagagggacccggaggtgctgccgcccgggtgcacggggacaataggactccgcccgcaccccggactcccgcactaaaactcgtgcgcccacctctcccgatcccaacaggccgacctagctgtgcgagtggcgggcggtgacccgcagggaagcgaggccacctgagtgcgccgccccggccaggccgcagctccccaggtccctctcagcccgggct

SEQ ID NO: 8106 - DNA, 2736 bp, Homo sapiens
  SIMILAR (922)..(1224): 941254mologous to Homo sapiens Similar to protein tyrosine phosphatase,accession number AB006621,Smith-Waterman Score=520.
atggctctacgccgtgctggggctgggcggactggctgcttcattgccattgacaccatgcttgacatggccgagaatgaaggggtggtggacatcttcaactgcgtgcgtgagtccgggcccaaaggtcaacctggtacgacagaggagcaatatgtgtttgtgcacgatgccatcctggaagcgtgcctctgtgcaacactgccatccctgtgtgaagctgcagaatctattccagaacacaaaatgcacagccatgagcaactacacactcactcagggattgctgcagcactggctgagctgaacgacttagttcatctggttggcaggtactatgaggctgtgtctgagcctgtgtgtggatgccgcttctgcgccttgggttttgaagaccctcaacattgtgacacccgtgtgcggcccgaggactgcagcattgctcgcccgaaccatgataagaatcgaagtatggacgtgctgcctctggaccgctgcctgcccttccttatctcagtggacggagaatccagcaattacatcaacgcagcactgatggatagccacaagcagcctgccgccttcgtggtcacccagcaccctctacccaacaccgtggcagacttctggaggctggtgttcgattacaactgctcctctgtggtgatgctgaatgagatggacactgcccagaggggtcagtcctttgtgggaccactggagtttggaggagcacagttagaaatactttctgtgcaggaagaccactggaaaagaaagggtaggagagagtacttactaggcaatgaagtggaaaaagtcagttggtctagactcttggctgaagaatttgaatctattcttggatcagccaacttcaaaagttttacatctaaggaagaaaatgtcaaggttgcattcaggttctgtatgcagtactggcctgagaagacctccgggtgctatgggcccatccaggtggagttcgtctccgcagacatcgacgaggacatcatccacagaatattccgcatctgtaacatggcccgggatggttatcgtatagtccagcacctccagtacattggctggcctgcctaccgggacacgcccccctccaagcgctctctgctcaaagtggtccgacgactggagaagtggcaggagcagtatgacgggagggagggacgtactgtggtccactgccttctaatgaattctggtgtcattacgctgggtggaggtcaggacctcgagaggacagtggctgacaagctgtgcaacgtcaagaaaatcactgaattttataagcctgagtttcctcgtctgttcattggaaatgggggaggccgtagtggaaccttctgtgccatctgcagtgtgtgtgagatgatccagcagcaaaacatcattgacgtgttccacatcgtgaaaacactgcgtaacaacaaatccaacatggtggagaccctggaaaatccaattactaatcctggagtggaggagatgtgtgttctgctcctctacgtcatggaaaagattgaggctcttgggggtcactgctctgctgccccctgcaacctccttcaggggcctctggcaccagacatttgcagtctggaccagtgtgaccttacgatgttccctaggccacaagagaggccccccatcctcacacctaacctgcatggggcttcgcccacaaccattctgtaccccttccccagcctgggccttgaccgtccagcattcactggccggccagctgtgtccacagcagtttttgataaaggctgtcaaatttctggcctgctaaagaaaaataacagcacatctcaactatcccttcccttttctggcccctccatgatgctctctggcagcccagaccccaactctgagcaagctcacaccttcgctttgggacctgcttctccggccctaatgatgaccagcaaggaggaactggttggcaaactgaaaagcgtgctaaccctcactccagaacagctactggaatgctacatgcaaagaccctgctctcttaaagcttgtgttctagaagcttatgatgcaccaggcaacatttgggacatcaggattctgcagtttgcaatcaaagaatcttccctcatgaaatattctaaaacgccaattatgtatgtgccctgctctgtgcatggcatgcatacagaggtgaacttgactgataaaatccttacctccatgggcttcccaatctggttgaggataagtgtaaagagagagaagaatcaaatagacgcaataaaaaatgataaaggggatatcaccactgatcccacagaaatacaaactaccatcagagaatactataaacaactctacacaaataaattagaaaatctagaagaaatggataaattcctggacacatacaccttcccaagtctaaaccaggaagaagttgaatccctgaatagaccaataacaagttctgaaattgagctagtaattaagagcctaccaaccaaaaacaaagcccaggaccagatggattcacagtcgaattctaccagagaagaaaacctaggcaataccattcaggacataggcatgggcaaagacttcatgactaaaacactgaaagcaatggcaacaaaagccaaaattgacaaatgggatctaattaaactaaagagcttctgcacagcaaaagaaactatcatcagagtgaacaggcaacctactgaatga

SEQ ID NO: 8107 - DNA, 490 bp, Homo sapiens
  SIMILAR (1)..(306): 971254mologous to Homo sapiens Human PRO1377 (UNQ714) amino acid sequence SEQ ID NO:95,accession number Y99367,Smith-Waterman Score=485.
cgaatcagaaagcccttgctggtctttgcattggcagcaccagttatgtccatggtgacatacttaggcctgagtaagagcagtaaagaagccctttcagaggtgaacgccacgggagtggccatgcttttctctgccgggacatttctttatgttgccacagtacatgtcctccctgaggtgggcggaatagggcacagccacaagcacgatgcctcgggagggagaggcctcagccgcctggaagtggcagccctggttctgggttgcctcatccctctcatcctgtcagtaggccaccagcattaaatgctcccggtccagccttggtccagggccgtttgacaaacagtgagaacagccggcacgtgacagctactcacttcctcagtctcttgtctcaccttgcgcatctctacatgtattcctagagtccagaggggaggtgaggttaaaacctgagtaatggaaaagcttttagagtagaaac

SEQ ID NO: 8108 - DNA, 972 bp, Homo sapiens
  SIMILAR (19)..(639): 951254mologous to Homo sapiens Human PRO1377 (UNQ714) amino acid sequence SEQ ID NO:95,accession number Y99367,Smith-Waterman Score=952.
atggtttattctgctctaggaaaacaccaccaagcaagtgaaacacataatgtgattgcatcagacaaagcagcagaaaaatcagttgtccatgaacatgagcacagccacgaccacacacagctgcatgcctatattggtgtttccctcgttctgggcttcgttttcatgttgctggtggaccagattggtaactcccatgtgcattctactgacgatccagaagcagcaaggtctagcaattccaaaatcaccaccacgctgggtctggttgtccatgctgcagtattttatgtttccttgtttccaaatatagctgatggtgttgctttgggagcagcagcatctacttcacagaccagtgtccagttaattgtgtttgtggcaatcatgctacataaggcaccagctgcttttggactggtttccttcttgatgcatgctggcttagagcggaatcgaatcagaaagcacttgctggtctttgcattggcagcaccagttatgtccatggtgacatacttaggactgagtaagagcagtaaagaagccctttcagaggtgaacgccacgggagtggccatgcttttctctgccgggacatttctttatgttgccacagtacatgtcctccctgaggaacgactgaagctggtgactgttttgggtgctggccttctctgtggaactgctctggcagtcatcgtgcctgaaggagtacatgccctttatgaagatattcttgaggtagtccccagtttctattattgccatctttatgtctatgagtacctgatgtttagttcccacttctgcagccctgatccctggcaggaccagctgctgaccctgcgtgtgtgtagctccacctctgcctcacttggtgagggctgcttgggagttagcagtatcagaaagggcatggaactgagtgtacaggctcaacaccatgtggaagttgccaaggcctga

SEQ ID NO: 8109 - DNA, 275 bp, Homo sapiens
  SIMILAR (37)..(162): 591254mologous to Simian SRV-like type D retrovirus envelope protein gp20E,accession number U16844,Smith-Waterman Score=113.
atgaacttagcatttttgaccaggagccccatgactcagacaagctttcagacagcttggaagatacacaatcaaatagactccttagcagcagttgctttacaaaatagaaggggactggatctcctaactgctgaaaaagggaccatcaaacttcagatgatcatgcaacaaggtttccagccagttccagctgaagacactactgttggccatcaagaagccaccctgtctccactagacagagagcggcgagagttctgtgatccccaatg

SEQ ID NO: 8110 - DNA, 1347 bp, Homo sapiens; identical to SEQ ID NO: 7941
  SIMILAR (100)..(417): 771254mologous to Homo sapiens ribosomal protein L19,accession number X63527,Smith-Waterman Score=413.

SEQ ID NO: 8111 - DNA, 491 bp, Homo sapiens
  SIMILAR (22)..(114): 511254mologous to Plasmodium lophurae histidine-rich protein,accession number X01469,Smith-Waterman Score=113.
cggacgcgtgggtgcctgtcccaccacaaccaccactaacacctccaccgccatcacctccaccatcactatccctactcctactaacaccaccactgcctcaattatcaccaccttaccttttccactggctctaccacctccacaccatcttaaccagcatgcccattacctccacctttattaccaccaccattataatcaccatcatcacctccatcaccaccaccgctcccactgccaccatcaccaccaccacctgaccatccatctcctctgccaacatcatcatcatcacttccatcctactaaacacctccttctagctcacccacaggcacttcaaactcatcatgaaccaccatgacatgctcaccaccgcccccttctaaacttctctgccttgggactgaagccaggaaccaccccctcattaaatcagtcaccgcgtcttgtctatgccacctccgaatatctctttcctaaacaaa

SEQ ID NO: 8112 - DNA, 1257 bp, Homo sapiens
  SIMILAR (1095)..(1187): 771254mologous to Homo sapiens dJ881L22.2 (novel protein),accession number AL117382,Smith-Waterman Score=122.
atggcagaggtgtctccgaggctccaagaaagatcaaatgatgctgtgactactgctccaattctccagggctacatttatcctcttccagcctccagcaaatactttcacaagcgctttttcccagaccagagcaagacgcggaggctcggggagaggaggcggccaggagagcgcagaggagacgagcgagttcggggaccgtcacgcgccagaggcagcagcggccacgagggggagcgcgcgggctccggagcccaagcacgcctcaagctgtgggactcgcgggcagtgcgcatgcgctcgaagggaggtggaggcgcaggtccgggcgaagggcgatacggtggccgagagggcacggagaggaggacggtggctgacgagatccggcatggagcatctggagcgctgcgagtggttgttgcgggggacgctggtgcgggcggccgtgcggcgctacctgccctgggccctggtggcctccatgctggcgggctccctcctcaaggagttgtccccgttgcccgagagctacctcagcaacaagcgcaacgtcctcaacgtgtattttgtcaaagtggcctgggcctggacgttctgtctccttctgcctttcattgccctcaccaactaccatctgaccggcaaggctggcttggtcctgcggcggctgagcaccctgcttgtgggcacggccatctggtacatctgcacctccatcttctccaacatcgaacactacacgggcagctgctaccagtccccagccctggagggggtcagaaaggaacaccagagcaagcagcagtgccaccaggaagggggcttttggcatggctttgacatctcaggtcactccttcctgctgaccttctgcgccctccatgattgtaagaagagatgtctgtgcctgcaatgaaggtgaaagacggaccgaagccactgcctccacaccgccatcaccaccctggttgtggccctgggcattctgactttcatctgggtgttgatgtttctgtgcacagctgtttatttccacaacttgtcccagaaggtgtttggcaccttgtttggtttgctgagctggtacgggacatacgggttttggtatccgaaagccttttcccccaggacttcctccccagagctgtagtttgaatttgaagcaagatagttacaagaaataaaagagtaacagaggggggacagaaggacaatggctaatctatttttcaaatatatattttgcttagt

SEQ ID NO: 8113 - DNA, 928 bp, Homo sapiens
  SIMILAR (116)..(793): 881254mologous to Homo sapiens dJ583P15.3 (novel protein),accession number AL121845,Smith-Waterman Score=976.
gcagtcctgcggcgacgattacgtcgctcgggaggaagtgccgatcggctgctggggcgaaaagggggcgccgggccgctctagcctccctggtccagcgcctccctctctcagcatggacgaagagagcctggagtcggccttgcagacctaccgtgcgcagctgcagcaggtggagctggccttgggcgccggcctggattcgtctgagcaggctgacctgcgccagctgcagggggacctgaaggagctcatcgagctcaccgaggccagcctggtgtctgtcaggaagagcaggttgttggccgcgctggacgaagagcgcccgggccgccaggaagatgctgagtaccaggctttccgggaggccatcactgaggcggtggaagcaccatgcagggcccgtgggtccggatcagagaccgttcctaaagcagaggcggggccagaatctgcggcaggtgggcaggaggaggaagagggagaggacgaggaagagctgagtgggacaaaggtgagcgcgccctactacagctcctggggcactctggagtatcacaacgccatggtggtgggaacggaagaggcggaggatggctcggcgggtgtccgtgtgctttacctgtaccccactcacaagtctctgaagccgtgcccgttcttcctggagggaaagtgccgctttaaggagaactgcaggacggctgagaccgtggtgggggtcctcctccccaaccttcgtggagagaaagagggaacaccagaaggggacacagccacggccccctccgctcaccagttcctgctttatccccagcaaagagctctgggggcgaacgcagccgggaaattcctgtcacctggtggcgtgacaggaatagccatcgccatcctagccatcgccatcctagccatcgccacatcctag

SEQ ID NO: 8114 - DNA, 1515 bp, Homo sapiens
  SIMILAR (388)..(1287): 601254mologous to Homo sapiens dJ583P15.3 (novel protein),accession number AL121845,Smith-Waterman Score=823.
tacccgtgagcgattttcagtagcgaaccgtgtgaccggatcagagaccgttcctaaagcagaggcggggccagaatctgcggcaggtgggcaggaggaggaagagggagaggacgaggaagagctgagtgggacaaaggtgagcgcgccctactacagcttctggggcactctggagtatcacaacgccatggtggcgggaacggaagaggcgcgggatggctccgcgggtgtccgtgtgctttacctgtaccccactcacaagtctctgaagccgcgccccgtctctctggagggaaagtgccgctttaaggagaactgcaggttctcccatgggcaggtggtctctctggatgagctgcgccccttccaggacccagacctgagctccctgcaggccggctctgcgtgtctggccaagcaccagggatggcctctggaacggcagcacgcatcaccgatgtgggacaacggctacttacacagtcaagtttgactcgctgctgctgagggaggccgtggttggagggggacggcatcctgcccccactgcgcacaagaggccacaagagtccgactcagacagcgacggtacgggtgactccagctatgccagagtggtggggtcagatgctgtggactctgggacctgcagctctgcctttgctgggctgggaggtgcacacgcgaggtataggctccagactcctcaccaagatgggctatgagtttggcaagggtttgggccgacacgcggaaggccgggtggagcccatccatgctgtggtgttgcctcgagggaagtcgctggaccagtgtgtggagaccctgcagaagcagaccagggttggcaaggctggcaccaacaagccccccaggtgccggggaagaggggccaggcctgggggccgcccagctcctcggaatgtgtttgacttcctcaatgaaaagctgcaaggtcaggctcctggggccctagaagccggggcggccccagcggggaggaggagcaaggacatgtaccattgccagcaagagtgccaagccgggccctgagcctgcggctctttccagactgaggagaagatcgagcgaacccagcgggacatcaggagcatccagggaggctctcgcccgcaacgctggccggcatagcgtggcgttcaccaagcttgcaggagaagctggcaggagcccagcgccagctggggcagctccgggctcaggaagccggcctgcagcagggagcagaggaaggcagacacccacaagaagatgactgagttctagagaccccacaagcactatggacgaagcgtgggaccccagcacgggctgccctcaggaagaccagtgttgcccgaggaggggccggcctgctggcctggggcgtgcggacactgctgagtggagacagagctgcggggtcccatctggacacttacttgcccacctgccagtgtcttgggcatttccttggcaaggacattaaagtgatttcatcacagtgtcaaa

SEQ ID NO: 8115 - DNA, 419 bp, Homo sapiens
  SIMILAR (105)..(335): 391254mologous to Arabidopsis thaliana contains similarity to protein kinase~gene_id:MBB18.10,accession number AB005231,Smith- Waterman Score=120.
  misc_feature (1)...(419): n = a,t,c or g
nnnnnnnnnnnnnnnnnnnnncagttggcccactctttattaaagccaggccctcctgctgacagctgcaggacagctgttggggcccaggagggacggaaacagcaaatcctgtcccgcagggagaggaaaaacccagggccgaggtcattacccagcaccccaatgcctccctgggacccctgttttcctaaccaccccgccccgaaacctcaccaacctcacccagccaggctaactgaccgccaccacccanggccttttcccacccaccaactaccgtgcctcctacccgcccccagccctggcagcctggttgttgcgctcagcccccaaggccatgtttacactaacgtggagggaactaggtctattagggaatgcagctgcaccaaaaatccgtttcctggccccattca

SEQ ID NO: 8116 - DNA, 1536 bp, Homo sapiens
  SIMILAR (561)..(1148): 301254mologous to Homo sapiens spiceosomal protein,accession number L21990,Smith-Waterman Score=148.
  misc_feature (1)...(1536): n = a,t,c or g
ggcattttgggtcctggggggctgtacaccttgccctggtactggagcaggtgagccctggatgagccacatggtgctggggcctctgaagaaagggctggggatgtgtttggaccaccacgaagggtacctggcccctcactctggcctctggaagcctggccaacatcttcacaaaaagtaatgccccaagtcaggtgtttacacttacatcaagtgtgggggcagcgtggggggccaccaaggaatacggtgggcatgggcagcacggggccacactggcctggggccaactcctcatgggccatcctaggacccattctaatttcttaaaagagaaaatcttttaaaaaatgtttgcagaaacaagttggacctgaggccaaacagagcctccccaacgggttcccaggagtggcgacagcatggagtccagtcagaagttcagtttgtccactctttattaaagccaggccctcctgctgacagctgcaggacagctgctgggacccaggagggacggagacagcagatcctggccatacagggctagagctgagattcccagagccccccaagcccaccttgcccttggccctttctgaggctcctgtcccgcagagagaggagaaaacacagggccgaggtcattacccagcaccccaatgccttcctggggacccttgctctcctcaccaccccgccccgcaacctcaccaacctcacccagccaggctaactgaccgccaccacccaggccttcttcccacccaccaactaccgtgcctcctacccgcccccagccctggcagcctggctgctgcgctcagcccccaaggccatgtctacactaacgtggagggaactaggtctattagggaatgcagctgcaccaaaaatccgtttcctggccccattcacagtggcctcaaaagcgtgaggggaatgggtcttcacatgaaatacaccccagctgcccgcccagtggcttccatgggcccagtccagagggtaggatgcccaccnaggcaggggccttgcatagttgggtgcctggtttgtcactgagccacggctcaggtccacaccnccccccgaggtggacagccactgtgcaagctgccaggccacgggtgcctccactaaccaatttgtgaaatgggactctaaacagaaacactacttgttctagtgtaatgacagaagcagagttaaagggacctgcgagtgtcctagggccctgattatgggatgtggggaaagatccttcgaccaacctcagtcgctctaagtgagcgctgggctccgagaacggggcgtctgcctgctcccggagaggggcagcccagggaagtgaaagctggggctcagggctgcgagggcctcgggcgcccgtagatgtctgagtttgccacctccggctgagggagacgaaagtaccaaggactgagaggacaagcagagaccaaaaccgaaccggtgcggagggtgccggggtgacctcggtgcaagtgtgggtagagaagaggaggcggc

SEQ ID NO: 8117 - DNA, 362 bp, Homo sapiens
  SIMILAR (215)..(361): 811254mologous to Homo sapiens putative p150,accession number U93569,Smith-Waterman Score=192.
ctctttgataatactgtttattgtccacggaccgagcgattgctcaagaatgatacaaagcatcagagacatgcgcagtctgcttgtcaactttcaacaactcttgtgtgttcccagcaccggaaggtctcagacttcatattccagcataaacacagtgctcccctcccccaaaaatccaaacggaaacaaaatcaacagagcttcatgctaaaaactctcaataaactaggcattgatgaaatgtataagagctatttatgacaaacccacagccaatatcatactgaatgggcaaaaactagaagcattccctttgaaaactggcacaagacaagggttctctctctcaccactcctat

SEQ ID NO: 8118 - DNA, 1233 bp, Homo sapiens
  SIMILAR (275)..(445): 871254mologous to Homo sapiens ORF2-like protein,accession number AF003535,Smith-Waterman Score=265.
atgattatctcaacagatgcagaaaaggcctttgacaaaattcaacagcccttcatgctaaaaactctcgataaacaaggtattgacggaacgtacctcaaaataataagagctatttatgacaaacccacagccaatatcatactgaatgggcaaaaactggaagcattccctttgaaaactggcacaagacaaggatgccctttctcacaactgctattcaacttaatgttggaagttctcaccagggcagtcagggaagagaaagaaataaaagagaataaaatacctaggaatccaacttacaagggatgtgaaggacctcttcaagaggaactagaaaccattgctcaacgaaataaaagaggacacaaagaaatggaagaacattccatgctcatggataggaagaaccaataccgtgaaaatggccatactgcccaagtttcgataatggacaaggtgacgacagttttcaacagtgcacaaagactagaagttgtcagaaactgtatctcattcatatttgaaaataaaattttggaaactgaaaagacccttcctgctgcactcagagcccttaaaggaaaggcagcaagacagtgtctcactgatgaattgggtttgcatgtccagcaaaaccgggcaatattagaccatcaacagtttgactacataataaggatgatgaattgtactctacagtactttgaaggttccaacagtgacatgtatctcatgcctgctgccatgttttgggaccccttccacaaggacctccacaagctggtgttctgtgaagttttcaagtgcaatcgaaagcctgcagagaccaatttgaggcacacctgtaaacggataagggacatgtggaaattccaaatcggaccctgtgaaggaatcagcatggaagatcatctctgggtgacctgtttcatcttacatcgtgtatgtgaagacttcggagtgatagcaacctttgatcctaagcccattcctgggaactggaatggtgcaggctgccataccaacattagcaccaaggccatgcgggagaatgcccatcatagtgccagcatacacattccccagactgttggccaggagaagaagggttactttgaagatcattgcctctctgccgactgtgacccattttcggtgacagaagccctcatctgcccgtgtcttctcaaaccggagttgagcccttccagtacaaaaactaagtga

SEQ ID NO: 8119 - DNA, 1936 bp, Homo sapiens
  SIMILAR (473)..(1936): 801254mologous to Homo sapiens putative p150,accession number U93572,Smith-Waterman Score=2049.
tgacaaacccacagccaatatcatactgaatgggcaaaaactgcaagcattccctttgaaaactggcacaagacagggatgccctctctcaccactcctattcaacatagtgttggaagttctggccagggcaatcaggcaggagaaggaaataaagggtattcaattaggaaaagaggaagtcaaattgtccctgtttgcagacgacatgattgtttatctagaaaaccccatcgtctcagcccaaaatctcccttaagctgataagcaacgtcagccaaagtctgaggatacaaaatcaatgtgcaaaaatcacaagcattcttatacaccactaacagacaaacagagagccaaatcatgagtgaactcccattcacaattgcttcaaagagaataaaatacctaggaatccaacttacaagggatgtgaaggacctcttcaaggagaactacaaaccactgctcaaccgaaataaaagaggacacaaacaaatggaagaacattccatgctcatggataggaagaatcaatattgtgaaaatggccatacttgcccaaggtaatttacagattcaatgccatccccatcaagctaccaatgactttcttcacagaattggaaaaaaactactttaaagttcatatggaaccaaaaaagagcccgcattgccaagtcaatcctaagacaaaagaacaaagctggaggcatcacactacctgacttcaaactatactacaaggctacagtaaccaaaacagcatcggtactggtaccaaaacagagatatagatcaatggaacagaacagagccctcagaaataatgccgcatatctacactattctgatcctttggacaaacctgagaaaaacaagcatgggggaaaggcatccctaatttataaaatggctgctggggaaaactggctagcccatatgtaggaagctgaaactggatcccttccttacaccttatacaaaaatcaattcaagatggattaaagatttaaacgttagacctaaaaccataaaaaccctagaagaaaacctaggcattaccattgaggacataggcgtgggcaaggacttcatgtccaaaacaccaaaagcaatggcaacaaaagccaaaattgacaaatgggatctaattaaactaaagagcttctgcacagcaaaagaaactaccatcagagtgaacaggcaacctacaacatgggagaaaattttcgcaacctactcatctgacaaagggctaatatccagaatctacaatgaactcaaacaaatttacaagaaaaaaacaaacaaccccatcaaaaagtgggcgaaggacatgaacagacacttctcaaaagaagacatttatgcagccaaaaaacacatgaagaaatgctcatcatcactggccatcagagaaatgcaaatcaaaaccactatgagatatcatctcacaccagttagaatggcaatcattaaaaagtcaggaaacaacaggtgctggagaggatgtggagaaataggaacacttttacactgttggtgggactgtaaactagttcaaccattgtggaagtcagtgtggcgattcctcagggatctagaactagaaataccatttgacccagccatcccattactgggtatatacccaaatgactataaatcatgctgctataaagacacatgcacacgtatgtttattgcggcactattcacaatagcaaagacttggaaccaacccaaatgtccaacaatgatagactggattaagaaaatgtggcacatatacaccatggaatactatgcagccataaaaaatgatgagttcatgtcctttgtagggacatggatgaaattggaaaccatcattctcagtaaactatcgcaagaacaaaaaaccaaacaccgcatattctcactcataggtgggaat

SEQ ID NO: 8120 - DNA, 1105 bp, Homo sapiens
  SIMILAR (810)..(1034): 761254mologous to Homo sapiens putative p150,accession number U93572,Smith-Waterman Score=287.
cttaccaaccaaaaagagtccaggaccagatggaatcacagccgaattctaccagaggtacaaggaggaactggtaccggtccttctgaaactattccaatcaatagaaaaagagggaatcctccctaactcattttatgaggccagcatcattctgataccaaagccgggcagagacacaaccaaaaaagagaattttagaccaatatccttgatgaacattgatgcaaaaatcccttaataaaaatactgacaaaactgaatcccagcagcacatcaaaaaagcttatcccaccatgattaaagtgggcttccatccccctgggatgcaagactggttccaacatacacaaatcaataaatcctaattcagcatataaacagagccaaagacaaaaaccacatgattatctcaatagatgcagaaaaggcttttgacaaaattcaacaacccttcatgctaaaaactctcaataaattaggtattggtgggacgtatttcaaaataataagagctatttatgacaaacccacagccaatatcatactgaatgggcaaaaactggaagctattccctttgaaatgttgaaagttatgtacagggcatttaggcagaataagcaaataaagggtattatattagaaaaagaagaagtcaaattgtccctgtttgcagacgacatgattgtttatctagaaaaccccattgtctcagcccaaaatctccttaagctgataagcaacttcagcaaagtctcaggatacaaaatcaatgtacaaaaatcacaagcattcttatacaccaacaacacacaaacagagagccaaatcatgagtgaactcccattcagcaattgcttcaaagagaaggaaatacctaggaatccaacttacaagggacgtgaaggacctcttcaagaagaactacaaaccactgctcaaggaaataaaacaggatacaaacaaatggaagaacattccatgctcatgagtaggaagaatcaatatcgtgaaaatggccatactgcccaagtaagatgtgcttgcttctccttcgcctttcaccatgactgtgacttgcaggaagcaagttcaggttcttag

SEQ ID NO: 8121 - DNA, 2763 bp, Homo sapiens
  SIMILAR (120)..(1079): 931254mologous to Homo sapiens glutamine synthetase, GS {EC 6.3.1.2},accession number S70290,Smith-Waterman Score=1635.
cgcgagagcaggttaggagaggagaggaggccgcagtactgctcacacgctccgctcttctcccactctcggcctacctttacccgcccgcctgctcggcgaccagaacaccttccaccatgaccacctcagcaagttcccacttaaataaaggcatcaagcaggtgtacatgtccctgcctcagggtgagaaagtccaggccatgtatatctggatcgatggtactggagaaggactgcgctgcaagacccggaccctggacagtgagcccaagtgtgtggaagagttgcctgagtggaatttcgatggctccagtactttacagtctgagggttccaacagtgacatgtatctcgtgcctgctgccatgtttcgggaccccttccgtaaggaccctaacaagctggtgttatgtgaagttttcaagtacaatcgaaggcctgcagagaccaatttgaggcacacctgtaaacggataatggacatggtgagcaaccagcacccctggtttggcatggagcaggagtataccctcatggggacagatgggcacccctttggttggccttccaacggcttcccagggccccagggtccatattactgtggtgtgggagcagacagagcctatggcagggacatcgtggaggcccattaccgggcctgcttgtatgctggagtcaagattgcggggactaatgccgaggtcatgcctgcccagtgggaatttcagattggaccttgtgaaggaatcagcatgggagatcatctctgggtggcccgtttcatcttgcatcgtgtgtgtgaagactttggagtgatagcaacctttgatcctaagcccattcctgggaactggaatggtgcaggctgccataccaacttcagcaccaaggccatgcgggaggagaatggtctgaagtacatcgaggaggccattgagaaactaagcaagcggcaccagtaccacatccgtgcctatgatcccaagggaggcctgggacaatgcccgacgtctaactgggattccatgaaacctccaacatcaacgacttttctgcttggtgtagccaatcgtatctgccagcattcgcattacccggactgttggccaggagaagaagggttactttgaagatcgtcgcccctcttgccaactgcgaccccttttcggtgacagaagccctcatccgcacgtgtcttctcaatgaaaccggcgatgagcccttccagtacaaaaattaagtggactagacctccagctgttgagcccctcctagttcttcatccctgactccaactcttccccctctcccagttgtcccgattgtaactcaaagggtggaatatcaaggtcgtttttttcattccatgtgcccagttaatcttgctttcttttgtttggctgggatagaggggtcaagttattaatttcttcacacctaccctcctttttttccctatcactgaagctttttagtgcattagtggggaggagggtggggagacataaccactgcttccatttaatggggtgcacctgtccaataggcgtacgtatccggacagagcacgtttgcagaagggggtctcttcttccaggtagctgaaaggggaagacctgacgtactctggttaggttaggacttgccctcgtggtggaaacttttcttaaaaagttataaccaacttttctattaaaagtgggaattaggagagaaggtaggggttgggaatcagagagaatggctttggtctcttgcttgtgggactagcctggcttgggactaaatgccctgctctgaacacgaagcttagtataaactgatggatatccctaccttgaaagaagaaaaggttcttactgcttggtccttgatttatcacacaaagcagaatagtatttttatatttaaatgtaaagacaaaaaactatatgtatggttttgtggattatgtgtgttttggctaaaggaaaaaaccatccaggtcacggggcaccaaatttgagacaaatagtcggattagaaataaagcatctcattttgagtagagagcaagggaagtggttcttagatggtgatctgggattaggccctcaagaccccttttgggtttctgccctgcccaccctctggagaaggtgggcactggattagttaacagaccaacaccgttactagcagtcacttgatctccgtggctttggtttaaaagacacacttgtccacataggtttagagataagagttggctggtcaacttgagcatgttactgacagagggggtattggggttattttctggtaggaatagcatgtcactaaagcaggccttttgatattaaattttttaaaaagcaaaattatagaagtttagattttaatcaaatttgatgggtttctaggtaatttttacagaattgcttgtttgcttcaactgtctcctacctctgcctcttggaggagatgggacagggctggagtcaaaacacttgtaattttgtatcttgatgtctttgttaagactgctgaagaattattttttttcttttataataaggaataaaccccacctttattccttcatttcatctaccattttctggttcttgtgttggctgtggcaggccagctgtggttttcttttgccatgacaacttctaattgccatgtacagtatgttcaaagtcaaataactcctcattgtaaacaaactgtgtaactgcccaaagcagcacttataaatcagcctaacataag

SEQ ID NO: 8122 - DNA, 452 bp, Homo sapiens
  SIMILAR (9)..(275): 981254mologous to Homo sapiens cytokeratin 8,accession number M34225,Smith-Waterman Score=438.
caacattccaggccgtgcgcacccaggagaaagagcagatcaagaccctcaacaacaagtttgcctccttcatagacaaggtacggttcctggagcagcagaacaagatgctggagaccaagtggagcctcctgcagcagcagaagacggctcgaagcaacatggacaacatgttcgagagctacatcaacaaccttaggcggcagctggagactctggcccaggagaagctgaagctggaggcggagcttggcaacatgcaggggctggtggaggccgctatgcagggtagcactgggaacaggagacccacctgagctcagccctagccctcagcccacctggggagtttactacctgggaccccccttgcccatgcctccagctacaaaacaattcaattgctttttttttttggtccaaaataaaacctcagctactctgccaataaa

SEQ ID NO: 8123 - DNA, 1448 bp, Homo sapiens
  SIMILAR (987)..(1445): 831254mologous to Homo sapiens Keratin 8,accession number X74929,Smith-Waterman Score=607.
atgtccatcagggtgacccagaagtcctacaaggtgtccacctctggcccctggttcttcagcagctgctcctacttgagtgggcccagtgcccacatcagctccttgagcttctcccgagcgggcagcagcagcttccagggtggcctgggcagaggctatggtggggccagcggcatggaagtcatcactgctgtaatggtcaaccagagcctgctgagccccattaacctggaggtggacctcaacatccaggccatgcacacctaagagaaggagcagatcaagaccctcaacaagtttgcctccttcattgacaaggtacagttcctggagcagcagaacaagatgctggagaacaagtggagcctcctgcagcagcagaagatggctcagagcaacctagacaacatgttcgagagctacatcaacaaccttaggtggcagctggagactctgggccggaagaagctgaagctggaggcagagcttggcaacatgcaggggctggtggaggatttcaagaacaagtatgaggatgagatcaataagtatacagagatggagaatgaatttgtcctcatcaagaaggatgtggatgaagcttacatgaacaaggtagagctggagtatcgcctggaagggccgactgatgagatcaacttcctcaggaagttgtatgaacaagagatccgggagctgcagtcccagatcctggacatgtctgtggtgctgtccatggacaacagccactccctggacatggacagcatcattgctgaggtcaaggtgcagtacgaggagatcgctaaccgcagctgggctgaggctgagagaatgtaccagaactagtatgaggaactgcagatgctggctggggagcacggggatgacctacttagtacaaagactgagatctccacgataaaccagaacatcagctggctccaggctgagattgagggcctcaaaggccagagggcttcctggagtccaccataacagatgtggaacaacgtggggagctggtcattaaggatgccaatgccaagctttcccagctggaggctgccctgcagcgggccaagcaggacatggcactgcagctgcatgagtaccaggagctgatgaacttcaagttggctcaggacatcgtgatcaccacctacaggaagctgctggagagcgaggggagctggctggagtctgggatgcagagcatgagtatccatatgaagaccaccagtggctatgcaggtagtctgagctcggcctatgggggcctcacaagccccagcctcagctacagcctgggctccagctttggctctggcgctggctccagctccttcagccacaccagctccaccagggccgcggttgtgaagaagattgaggcccagaatgggaagctcgtgtccaagtcctctgacgtcctgcccaagtga

SEQ ID NO: 8124 - DNA, 2077 bp, Homo sapiens
  SIMILAR (362)..(586): 961254mologous to Homo sapiens Keratin 8,accession number X74929,Smith-Waterman Score=357.
ctgcctgcgccaagcttggcacgaggaaaatctgtcttcctccctagacagtaagctctctgaagtcaagaaccatagttgttttgttcactactgtatactcagcacctaatagtacttggcacataagtactcagggactatttgtcaaatgcaagaacatatgcccctaaagcagaagtcaggaaaaccagaaaaaatgcctttaagtattacagaaatgccacaggcctccacttaaattgaaaagcaagctaacccctcttgataaaaatgtggattgagatcaagaagcagcttctctgctccttctaggatctccgcctggttcggcccgcctgcctccactcctgcctccaccatgtccatcagggtgacccagaagtcctacaaggtgtccacctctggcccccgggccttcagcagccgctcctacacgagtgggcccggttcccgcatcagctcctcgagcttctcccgagtgggcagcagcaactttcgcggtggcctgggcggcggctatggtggggccagcggcatgggaggcatcaccgcagttacggtcaaccagagccctgctgagcccccttgtccttgaggtggaccccaacatccaggccgtgcgcacccaggagaaggagcagatcaagaccctcaacaacaagtttgcctccttcatagacaaggtacggttcctggagcagcagaacaagatgctggagaccaagtggagcctcctgcagcagcagaagacggctcgaagcaacatggacaacatgttcgagagctacatcaacaaccttaggcggcagctggagactctgggccaggagaagctgaagctggaggcggagcttggcaacatgcaggggctggtggaggacttcaagaacaagtatgaggatgagatcaataagcgtacagagatggagaacgaatttgtcctcatcaagaaggatgtggatgaagcttacatgaacaaggtagagctggagtctcgcctggaagggctgaccgacgagatcaacttcctcaggcagctgtatgaagaggagatccgggagctgcagtcccagatctcggacacatctgtggtgctgtccatggacaacagccgctccctggacatggacagcatcattgctgaggtcaaggcacagtacgaggatattgccaaccgcagccgggctgaggctgagagcatgtaccagatcaagtatgaggagctgcagagcctggctgggaagcacggggatgacctgcggcgcacaaagactgagatctctgagatgaaccggaacatcagccggctccaggctgagattgagggcctcaaaggccagagggcttccctggaggccgccattgcagatgccgagcagcgtggagagctggccattaaggatgccaacgccaagttgtccgagctggaggccgccctgcagcgggccaagcaggacatggcgcggcagctgcgtgagtaccaggagctgatgaacgtcaagctggccctggacatcgagatcgccacctacaggaagctgctggagggcgaggagagccggctggagtctgggatgcagaacatgagtattcatacgaagaccaccggcggctatgcaggtggtctgagctcggcctatgggggcctcacaagccccggcctcagcttacagcctgggctccagctttggctctggcgcgggctccagctccttcagccgcaccagctcctccagggccgtggttgtgaagaagatcgagacacgtgatgggaagctggtgtctgagtcctctgacgtcctgcccaagtgaaacagctgcggcagcccctcccagccttacccttccttgcgttgccccagagctgggggaagggagggccgttattgcagggtagcactgggaacagggagacccacctgaggcttcagcccttagccctcagcccacctgggggagtttaattacctggggaccccccttgcccatgcctccagctacaaaacaattcaattgctttttttttttggtccaaaataaaacctcagctagctctgccaaaaaaaaaaaaaaa

SEQ ID NO: 8125 - DNA, 3522 bp, Homo sapiens
  SIMILAR (2456)..(2623): 621254mologous to Homo sapiens Human secreted protein clone dd428_4 protein sequence SEQ ID NO:104,accession number Y94949,Smith-Waterman Score=135.
atgcacaaggagctgcctgcgttggctgcctgtggtcttgttgctgactttgaccccgtgggggaggaggaaactgcagactttggcccattggtgctagattcagacagtgacgattccgtggaccgggacattgaggaggccatccaggagtacctgaaggtgggatccagcaaggaccagggctctgcctccccagtcagcatgagcagagcagactcctttgagcagagcatcagggcagaaatagaacagtttctgaatgagaaaagacagcatgagacccaaaaatgtgatgggtcagtggagaagaaaccagacacacatgaaaattcggcgaagtcactctcgaaatcccaccaagagccggctacaaaggtggtgcaccggcagggcctgatgggcgtccagaaggagttcgccttctgcagacctcccccggttagcaaagacaaacgtgcagcccagaagcctcaggtccaaggtcacgaccacgaccacgcaggagaaggagggcagcacaaagccagcaacccccaccgcccttcagaagcagtacagaataaaagtgggattaaaaggagcgccagcaccgcaaggaggggaaagcgagtcacgagcgccgtacaggctcccgaggcgtccgactccagcagcgacgacggcattgaggaggccatccagctgtaccaggtgcagaaaacacacaaggaggccgacggggacccgccccagagggtccagctccaagaggaaagagcacctgcccctcccgcacacagcacaagcagcgccacaaaaagtgccttgccagagacccacaggaaaacacccagcaagaagaagccagtgcccaccaagaccacggaccctggtccaggggatctggacgctgaccattcccccaagatcccaaaggaaaccaaagctccacctccaacgagcccggcttccaggagcaagtttgtggaatggtcctcttgccaggcagacacctccgctgagctgataagcagtcctggacattttcaagacgatcctgccggccctatggagggcagcgatgggtccctgtccgcaagcccactcttctactcccccaacgtgccttcccgctctgatggtgacagtagctccgtggacagcgacgacagcattgagcaggaaatctggacgtttttggccctcaaggtgcagtctagaagtttgctggccagaggtgagagctgccctcaggctgcccagggcccactttcaccacctggcctcagcagccagaccggcagccccaaggcccctctctctaaaacactggacccactcctggctgcaaaaggaagcatagaggcggctgccaaggcacagccagcgaggccccgggatgggagggcgccgctagggtgggacctttccatccagggcacagccagcgaggccccgggaggagagggcgccgctagggtgcccggtgacactcgcacgtcacagggccagggtaagacagacgaggcaaggcacctagacaagaagaagagctccgaagacaaaagcagttccctggacagtgacaaggacctggacacagccatcaaggacttgttaagagagtcccagggcccagctcccagccctggctccttgtctgacaacagcagttcagtggacagcgacgatagcatcgaactggagattaggaagtttttggtggaaaaggccaaggagtcgggagtcccaggccaggcccagccttgtctttggaagcccacacttgctggcgaagaaggactgcgatcaccggccaagcaggaaggtgcctggtgctacgactcccaggaccccaagtgtggtgactcgaagaagccttccaaaaagcgtgtgaaaaggaagccctactctactaccaaggtgacttcagggagcacattcaatgagaatacaagaagatatgctgtgcacaccaaccagtgtaggagacctcatggctcccgggtaaagaagaagaggtacccacaagaagatgacttccatcatacagtcttcagcaaccttgaaagattggacaagcttcagcccactcttgaagcctctgaggagtctctagttcacaaggacagaggagatggagagaggccagtcaacgtgaaggtggtgcaggtggcccctctgaggcgtgaatctagtaagtattctggaatcacttaccaagaaaacaatctggatgccaagaaagctccccatgaggacaccgtacacaacatcactaacgaggatgcctcacacgatatcactaacgaggacgctgtccacggcatcgctaacgaggccgccgacaagggcatcgccaacgaggacgccgcccagggcatcgccaacgaggacgccgcccacggaatcgccagcgaggacgccgcccagggcatcgccaacgaggtcgccgcccagggcatcgccaacgaggacgccgcccagggcatcgccaaggaggacgccgcccacggcatcgccaacgaggatgctgcccacggcattgctaacgaggatgccgtgcacggcatcgctaatgaggactccgtatacgacatcgctaatgaggatgccatatatgacatcgctaatgacaccgtacaaggcacactaacgaggacgctgtacacgacatcgctaatgaggacaccatacaaggcattggtaatgaggacgttgtatatgacatcgctaacaaggacactctacaagccgtcgctaacaaggacactgtacacaacatcgctaatgacggcaccatacaagacatcaccaatgagggcgctttatacgacattgctaatggcaccgacaaggcacgctaacgtggacactgtacacgacattgctaatgaggactccgtatacgacatcgctaatgagggtgccgtatatgacatcgctaatgacaccgtacaaggcacgctaacgaggacgctgtacacgacatcgctaatgaggacaccatacaaggcatcggtaatgaggacgctgtatacgacatcgctaacgaggacaccatacaagccgtcgctaacaaggacactgtacacaacatcgctaatgatggcaccgtacaagacatcaccaatgagggcgctttatacgacattgctaatgataccgacaaggcacgctatcgtggacgctgtacacgacatcgctaatgaggactccgtatacgacatcgctaatgagggtgccgtatatgacatcgctaatgacaccgtacaaggcacgctaacgaggacgctgtacacgacatcgctaatgaggacaccatacaaggcatcggtaatgaggacgctgtatacgacatcgctaacgaggacaccatacaagccgtcactaacaaggacactgtacacaacatcgctaatgacggcaccgtacaagacatcaccaatgagggcgctttatacgacattgctaatgataccgacaaggcacgctaacgtggacgctgtacacgacattgctaatgaggacaccgtataa

SEQ ID NO: 8126 - DNA, 445 bp, Homo sapiens
  SIMILAR (3)..(218): 371254mologous to Homo sapiens dJ309F20.1.5 (isoform 5 of guanine nucleotide binding protein (G protein), alpha stimulating activity polypeptide 1),accession number AL121917,Smith-Waterman Score=81.
tcttggctcccagtttccttctgggcagacattgcccctctgccctgaggacctgcttgtttgggggaagaggcctttagaggcaccagggtcatgccaggtgttggacatggtgaactgggaagtgctctccatctggccacagcgcagaagtatcaccgtgctgggggatggggaacagggctgtgaatgggcctatttgcataagcagcatgtgtctggagagaaagacatcacagagcagaagagtgcgggtgcccaggagtgcacttgccacccctacttcatccctgaaagagtaaatggcctggaaggtgtctctgagaggtaatgccgcacaccaccctccctgggggcagggtcaggctacacctgccttatgtggggggctgcagcagcctgagagctctcagtagggccttagtagcctgggagggagcagggg

SEQ ID NO: 8127 - DNA, 2142 bp, Homo sapiens
  SIMILAR (1020)..(1589): 271254mologous to Leishmania major L8453.1,accession number AC008054,Smith-Waterman Score=121.
atggatatgttcaggtctggaatccggcgggatgggggactgggcgacggcattgtgagggctcggcggaggcgccagggggcgctagctggctcctcgcagccgatccaggccgcggcggttccacgaggtccggcgccccgcgccccgcgacccgcggtcctggccaagctgtcagggaagctcaggagaggcttgaccctactggaagctcgagggcgcaggcctggaggaaagagaggaacagaaatccgggctgtgggggagcagctggaaagctggagaagctggaggaaggatgttgctggctgttcttcccccacccccattcctgagtttggggctgcagcccccacaaaatctgccctgcaggtccaagtagtacccagcagccaagcagtagaatttgggcagcaccccggaagaggcttgcaggataggacacagcccacaagaatcatccgaggctgcaccgtgaccagcccctcaagacagagcgagacccaaataacccccgcgggcggacccgcagcgttctgtgactccaccgcggagtccaaaaggcagctgaggctctccattcttcccaaagcagctcggatccctaagtctggagctgccagcgaggcttccaacccgctgcttgccatcacctcccaggtcgttggtggctccgagtctgaaacccgagttgagggtctgatgaaggaggagtctgtgcgggagggcaacgcggcattttcccgctttctacgaaaatctgttgatgcaaacctcccgcttcagagaaagatcgcggcagcagggctgcggagggcgatgagcatgccagttctaatctccaggagcccatcccacaccttccttaaacggccctcggagagaggccagaggccagaggccaacccatccgatttcggcctcctggagagccctgttctcacccgaggtctgttaatgagctggggacaggtgagcctcacacgttccaacttggctgccttcagcggcatccaggagcagtggatcaggccggcccccgcgggcctggagctggatccagagctagggaaactggaaaaacaggcacaaactcggaagccgcggtacggcaagagcctaagcaaagaatcctttccaagattcacacctcgtctacaccagggcaccgcctgggcctacggccttccgaacccgaagcgcccgcagcccagagctggcatcaggccatcaggccgggaaggtcgtcgcaggccccagagtgcgggcgcggggggcgcgcgcccacaggacgcccggggttggccgcgcggcccacagaagcggaacgcgcgtcgagagcgccctgtccgctcgccccagacagatgcccggttattcattaccgcgaggcctagaggaaagagtggctgccgtcttcctgcccacagcccgccggaccctccgtcgcggctgcccggtccccggagccgcagccgccgagcccggctgtgcgtgtcgtggctgctggggagaaagaggcttccggggcggaaacggccttccccgcgtggggaacaatggcgttattttggagtctgcaaccgcgagcgcttcaagctctttgattattttcgaggagtgttaggacatgctctggagtcagaagacagcgaaaagagaagcagaagccccggtggcaagagtctgaagcgcagaagtatcaccgtgctgggggatggggaacagggctgtgaatgggcctatttgcataagcagcatgtgtctggagagaaagacatcacagagcagaagagtgcgggtgcccaggagtgcacttgccacccctacttcatccctgaaagagtaaatggcctggaaggtgtctctgagagcctaaattcggggccccctaccgaggccggccatgatcttgagggcggcataggggaggccgcgctctgtccaccccagcctggtgatgccgttcgcttcttgtgcccgctccacggcggccgcgggctttgtgagctggggccgcgcgccgcgctgcacctgcccggatttaagtaccttggcgaggcagcgcaggcggctgttctaatcgccgtctccaagtacctgctcatgaataaacaccaaccccatttatcaggtacttag

SEQ ID NO: 8128 - DNA, 707 bp, Homo sapiens
  SIMILAR (1)..(672): 991254mologous to Homo sapiens cell surface receptor,accession number AF146747,Smith-Waterman Score=1219.
atgagcgcggtattactgctggccctcctggggttcatcctcccactgccaggagtgcaggcgctgctctgccagtttgggacagttcagcatgtgtggaaggtgtccgacctgccccggcaatggacccctaagaacaccagctgcgacagcggcttggggtgccaggacacgttgatgctcattgagagcggaccccaagtgagcctggtgctctccaagggctgcacggaggccaaggaccaggagccccgcgtcactgagcaccggatgggccccggcctctccctgatctcctacaccttcgtgtgccgccaggaggacttctgcaacaacctcgttaactccctcccgctttgggccccacagcccccagcagacccaggatccttgaggtgcccagtctgcttgtctatggaaggctgtctggaggggacaacagaagagatctgccccaaggggaccacacactgttatgatggcctcctcaggctcaggggaggaggcatcttctccaatctgagagtccagggatgcatgccccagccagtttgcaacctgctcaatgggacacaggaaattgggcccgtgggtatgactgagaactgcaataggaaagattttctgacctgtcatcgggggaccaccattatgacacacggaaacttggctgcatgtatctgataaaacaaaaactgtcctttaaa

SEQ ID NO: 8129 - DNA, 677 bp, Homo sapiens
  SIMILAR (464)..(246): 361254mologous to Bos taurus cyanogen bromide,accession number L28918,Smith-Waterman Score=75.
  misc_feature (1)...(677): n = a,t,c or g
gcagatgcagtggtcggtaggagcgagtgttcgttgaagctgtaggtgttcgtggcgcgttggctttctggtaattcctccggctgcactagacatgccgcactgtgtgtccttccgtancattgagagagaagagggaggatgcccaggtaaaagatgggaaatagcctagaatatcaactgtgatggtccctggtggggctaatggtggcaaacttttctgcttttttgtaaagaaataacacagggtcctaaaagcccgtgtatcctggaagcagagggtctgcgtcggaacagccgactctggaagggcgttggctatgtccctggacgtctcctgcagctccttccatctcccctgagtctggcccagctggaaaggatgtgggggccacaggttaagtggccaccctggggcctgctgttcccagactgcctggctgtgctgggagttctgtcccgggagagacacagcttcgtctcggctgcggccgtggtccccaaggctctgttccctgtgtgcaaaggtggatatgtcttcctttagtctcctcatggccacaatttaatttttttgaaaagtttttggccaaataacctggctaccaaccccgggcccccattgttggaggaaggtgatgtggggaaagacgtgactcttggacagtgcctgcctt

SEQ ID NO: 8130 - DNA, 427 bp, Homo sapiens
  SIMILAR (82)..(315): 941254mologous to Homo sapiens Similar to ubiquitin- conjugating enzyme E2I (homologous to yeast UBC9),accession number BC000744,Smith-Waterman Score=395.
acgccaagcttggcacgagggtggctgaggccgagtctcacggtgtctccctttcaaactggtcacacccgtcttgtgtttttgtctctggcacagatcctattaggaatacaggaacttctaaatgaaccaaatatccaagacccagctcaagcagaggcctacacgatttactggttagtagcagccctggccccgctggtggcagctcctccccgtcccagccaaggccgcctggcaggacgggagtggagcacacaggctcaccctagggacagccagggtccgcgcctctgtggggaaggtcggggggcataaaccctgtgggcagcaggcaccgttgcacaccgtctgcggtgggcatggatggcgccggagccgtgtccaggggagggagcaggccacgtgacaggggctgtcttgtgct

SEQ ID NO: 8131 - DNA, 1053 bp, Homo sapiens
  SIMILAR (16)..(336): 341254mologous to Arabidopsis thaliana putative extensin,accession number AC005819,Smith-Waterman Score=103.
tcacgacctgtgcaggccgggcctaaggcaaccgggacccctcagcctcccccctcctgaccagagccggtggagaggcctctcagcatggcctcctctggcacccacgcccagggtccttcccctcctagctggccacaactcactggggcagtggcccaagacagcccgtcacctggcctgctccctccccgggacacggctccggcgccatccatgcccaccgcagacggtgtgcaacggtgcgccaggcagtctgggaacacaggccccagggtggccacttaacctgtggcccccacatcctttccagctgggccagactcaggggagatgggaggagctgcaggagacgtccagggacatagccaacgcccttccagagtcggctgttccgacgcagaccctctgcttccaggatatacgggcttttaggaccctgtgttatttctttacaaaaaagcagaaaagtttgccaccattagccccaccagggaccatcacagttgatattctttttacctgggcatcctccctcttctctctcaatgctacggaaggacacacagtgcggcatgtctagtgcagccggaggaattaccagaaagccaacgcgccacgaacacctacagcttccccgaacactcgctcacactccctggggaacgcgaagacaccaccgcagaccgtcccacaccgcgaccatcccacaccgcaggagcacacgggcgacaccagcagctgcgtggctgtcctgagtgcgaacacgcgtgagcgcgctgctgtggaatgtggggtgacggtgttgaatctcgactgactcaagtgaacagccaggtcctacagcatgagctcagcttccactggtgtggcaggcagcgtccaggggaaacgttcagaacatccgctctctccagcggtggctgaggctcccgctgccctgcgccgcggctccgtctgctcccctgtgcgctacggcagatcccactggggaggctttcactctttggcaaagccaggcatccctgccgcatttgctggctgggtggaggc

SEQ ID NO: 8132 - DNA, 3567 bp, Homo sapiens
  SIMILAR (1180)..(2013): 821254mologous to Escherichia coli Alpha-amylase (EC 3.2.1.1), cytoplasmic,accession number D90833,Smith-Waterman Score= 1196.
atgaagacgatgtcggttggttttcatagccatcctgagaggcctgaagaagaaaggcattcaccacccaacacccattcagatccggggcatccccaccatgtgagtgtgcgactgtgcacgcgaggtggagtgggtagggatttgacactgaacgctgtcttctcggcagtgccacagcaggcccacgggactggaatcctgtcggaagggggcttgcaggagctttcgggacactttgagaaccagaaggtgatgtacggcttttgcagtgtcaaggactcccaagctgctctgcaaaaatacgtgctcatcaactgggtgggcgaagatgtgcctgatgcccgcaagcacatcaccgtaggagaaaccaccgcacgcgaccagggcgtggaaatcttccaggcccgtgcgtccggtcagcaggtcactcatatgcacgtcgatagcatcaaagcctgcacggtggaaagctgccgccatttcaacatgagagttcacgccctgctcacgcagtacggcaactttcggacgtgcgccagtggcaatatacggtgctgccacatcttcgttgatatcgaacgacagttttacattcaggcccggatcggcgtcgttagatttcgcctgatgctcctgatcggcacactccgggttgtcacgcaggcgctgcatctgccaggtagtttctgcccaccagacacgcaacgtggtgcggctttcgctgaatacagtctgcccgttggcggtaatcacaaaacggtcaccggaaaccgcctgccctacataatggacacaatcagcaagcccatgctgtgccagtacggactcgaccgcttcacggtcagcggcacgaacctgaatcaccgcacccagttcttcgttaaacaacgccgccaggcgatcgtcacccagagtggcgatatttaccatttcagcattgtttcccatcggcacagcggtaagctctggcctgaactggcccagcgcgccgacggttttaatgatattggtatcaatatggactggttgccgcccgcctataaaggcgcatcgggcgggtattcggtcggctacaactcctatgatttatttgatttacgcgagcttgatcagaaaagcagcctccctactaaatatggcgataaagcacaactgctggccgcctttgatgctctgaaacaaactattctcgtgcggcgtgttaatgctgatgaccgtacgctaattgacgaaaaaattattgagtgtgaagggtggacgcgttacacctttccccgccgtgccgggcaatactcgcagtttatctgggatttcaaatgttttaccggtatcgaccatatcgaaaaccctgacgaagatggcatttttaaaattgttaacgactacaccggcgaaggctggaacgatcaggttgatgatgaattaggtaatttcgattatctgatgggcgagaatatcgattttcgcaatcatgccgtgacggaagagattaaatactgggcgcgctgggtgatggaacaaacgcaatgcgacggttttcgtcttgatgcggtcaaacatattccagcctggttttataaagagtggatcgaacacgtacaggaagttgcgccaaagccgctgtttattgtggcggagtactggtcgcatgaagttgataagctgcaaacgtatattgatcaggtggaaggcaaaaccatgctgtttgatgcgccgctgcagatgaaattccatgaagcatcgcgcatggggcgcgactacgacatgacgcagattttcacgggtacattagtggaagccgatcctttccacgccgtgacgctcgttgccaatgacgacacccacccattgcgatcacataatgttgtcgagacggttacggaattccggtgtaaagatcttcttgatctcttccatcgcatcggtgctgttatcctggtggataagaccaatggatttgcgctcagtttcccgtaccccggcgttggtggtcatcaccagcaccacgttacggaagtctgctttgcgtccgttgttatcggtcagcgtaccgttatccatcacctgcaacagaatattgaacacgtccgggtgcgctttctcgatttcgtccagcagcagcaccgcatgtggatgcttgatgaccgcatcagtcagcaaaccgccctgatcaaaaccaacgtatcccggaggcgcaccaataagacggctgacggtatggcgttccatatactcggacatatcaaagcgcagaagctcaatgcccaaagctttcgaaagctgtaccgtcacctctgttttcccgaccccgaccagcattttcaagcgatcgccgaggtttttcagggtatcacgatcactctgagaaacactcttctctggaatgcgtgcaatacgggccaccacggactcaatatccgccacattaacggttttcttgcgtttgcttaccggcatcaggcgtgcgcgagcgcccgcttcgtcgataacatcaatggctttatccggcagatgacgatcgttaatgtatttcaccgccagctctaccgccgcacgcaccgcttttgcggtataacgcacgtcgtggtgcgcttcatacttcggtttcaggccattgatgatttgaacagtttcttcgatcgacggttcagtaatatcagaccactagaagctggcgataacagaactttccatcagtgtattcatcgcatccacggtgcggctaacatcctgaatttgcaaaagttgattaatattagccatcagttagaaataacacctgtttcagatgacaatccgcttctgcgagcaaatttgtttttggatggtcttgaggggacagtgcaggtgttcgtcctgttcagggatcccgggtgcaaggggcacaagtttgcacacagtggcctggcttgccagctgccccagccctgcgaggcagatgaggggctgggtgaggaagaggatagcagctctgagcgaagctcctgcacctcatcctccacccaccagagagatgggaagttctgtgactgctgctactgtgagttcttcggccacaatgcgagaagtgaacgcttgggagtgatgaaggcagagtggaagcaaaaaggctctcagtcccccaagtgtgacagccagccgagggacaggcccctgcccgcacgggctaaaatgatgcataccgacgtggatctcaaagcaacagcttgcctggcggagccaatgctgctgatgagcgtactggataatctttactccaatgcggtgcactacggggctgaatccggtaacatttgccttcgcagcagtttacatggtgcgcgggtttatattgatgtcatcaatacaggcacgcccattccgcaagaggaacgcgccatgatcttcgaacccttttttcagggaagccaccagcgaaaaggggcggtgaagggcagcggtctgggattaagcattgccagggattgtattcgccgtatgcaaggggaactgtatctggtcgacgagagcgggcaagacgtttgtttccgcattgaattaccgtcgtcgaaaaacacgaaataa

SEQ ID NO: 8133 - DNA, 445 bp, Homo sapiens
  SIMILAR (160)..(255): 961254mologous to Homo sapiens Human secreted protein sequence clone hb1041_2,accession number Y22498,Smith-Waterman Score=162.
ggaattcgctactatgcctgctcaaccgtatcacctgagaggcaaagaggttctggagagaacctggtctcttagagatggggacatgggaccttaggagaccagagaccacccgagggaacctctgagtgtgcttgtcatgggtccctctgacccaacaggttctgtttggattctgcaaagcacactcgtcagaaagttgctgtgaactggaccaacttcagcctcaagaaaaccactcctagcacagctcagtgaggtacagagaccccaagagttacatccactgcctctccctgtgcttggccaccctatctgtacgctcaccagaccattctgtgctctggggcacagggagttggacttggggcatgggatccctggcttctgtctgcatcttcacagcaatggctggctacagcctccaaaggtcaaggccccatcg

SEQ ID NO: 8134 - DNA, 1449 bp, Homo sapiens
  SIMILAR (613)..(774): 981254mologous to Homo sapiens DEAD-box protein abstrakt,accession number AF195417,Smith-Waterman Score=273.
atgcagggcctctttgccttcagcaccccctgtgcccctgacctgtgcagggctgtggccggggccatcgcccgccagcgggagcggctgccagagctgaccaggccccagccctgccccctgccacgggccacctctctgccctccctggacacccccggagagcttcgggagatgccaccaggacctgagccacccacgtccaggaaaatgcacctggccgagcccggaccccagagcctgccgctactgctagatctcatggtgttgcatggaacaaaaaaaaaggttacccattttcaaagcgggaaggggccctatgaattcatcatctgcccttcggaggacagttccccactcttgcgatgcgccttctgcattgggggcatgtccgtgaaagagcagatggagaccatccgacatcctctgcagaccaccagaggccctggaccaggccctctgttcacagatgggccagaccccatcccggaggccttcctccacggacttctgagtattagggagatggtgagcacagaaaaggtgaagccagtgggccaggaaagcgagcccagagtaaagcctctggagcttgatgacagcgcttctggcggtgtacacatgatggtggccaccccggggcgcctcatggatttgctgcagaagaagatggtcagcctaaacatctgtcgctacctggccctggacgaggctgaccgcatgatcgacatgggcttcgagggtgacatccgtaccatcttctcctacttcaagcacacttccgcagctgccatcggcctgcagcttgctctggacggagggacgggaagtggccagaaggggaagtgtgaggagttcccgtccagcatgtcagcagtctccacaggtcttgaagcgtcggcctgctgcctgtccgtgaccatggaccctctggagaccctatcaaggatggcatcctctaccagcagcatgtcaagtttggcaagggcctggctctctcccgagcctggagactcaccggggatggtaggaggactcccaagagagctgcctggcatggccccactggaatgtggggaattccagaggcccgagagcttatgtgccgacaggaacgagctaggatcccagtctcccgagttcccagggcaggaagaggaggacgaggatgaggatgatgacggcggaagacgaggcacgacatgagcagtcatctccacaagaacgccactgcatgttctcgaccttctgcctttcatcttcctccatgctctttcggcaactctggcagacccaagaggcatctcgcctaggagattcttgacgagcctgcaacaccagtccattttgagaagggccttctcccagccttgcgttcccggtgacacagcaggcagcaagtctgcacaggcggctggaggcgggggggacgcgggcgcggtagctcat

SEQ ID NO: 8135 - DNA, 1311 bp, Homo sapiens
  SIMILAR (164)..(1258): 271254mologous to Homo sapiens Human secreted protein sequence clone hb1041_2,accession number Y22498,Smith-Waterman Score=167.
atgcctgctgtgactgtcagaggatcccgggtgcaaggggcacaagtttcacacagtggcctggcttgccagctgccccagccctgcgaggcagatgagggctggccacccgcgccccgacgagtcggaactataccgagatccgggagaagctccgctcgagctgaccaggcggaaagaggagctgcccatgaaggggggcaccttgggcggatccctggggagcccgccgtggaccaccgagatgtggatgagctgctgaattcatcaacagcacggagcccaaagtccccaacagcgccagggccgcaagcgggcccggcacaagctgaaaaagaaggaatggaaagagctcagtgtctctctgctcccttctcccactgccagcccggacactctcaccttgtctttgtgtcttctgtctacacgaaggaaaaggagaaggcccagttggcagcagaagctctaagcaggcaaatcgtgtttctggaagccgggagccaaggcctgccaggggaggctcttggagtggcccgaccgggaactggatcgggtcaacagcttctgagcagccgtctgcaggagatcaaaaacactgtcaaagactccatccggccagcttcagtaaccacacgttacaagctccaggcgagccagcccaccatgggcagaaatgagaggcccccacccaccatggacagagctaaaagaccaccaggtaacgagccctccagcatctccttccataggtggttcttgagccattactgggtgccagctgccccggccgcgggtccccgagtgacgctggcggcacctgagagtgtggcgcggcccggggccacgcagcggagcccagtgtccagtgaagcgtctgaggaccgccgcccgtgccgccgccatggtgatgtcccagggcacctacacgttcccacgtgcttcgccggcttctggctcatctggggtctcatcgtcctgctcgctgcttctgcagcttcctgcgccgccgcctcaaacggcgccaggaggacgactgcgcgagcagaacctgcgcgccctagagctggagcccctcgaaccgagggcagtctggccgggagccccccgggcctggcgccgccgcagccacaccacaccgtagccgcctggaggcgccggctcacgcgcactcgcatcccacgtgcacgtgcacccgctgctgcaccacggcgaaagaaggggtgtcgcaacgcgaaaaggtttaccccgttcaaaggggattgggcccaaaggggaggtaaccgccgagacataggaaaggccacgggttga

SEQ ID NO: 8136 - DNA, 3172 bp, Homo sapiens
  SIMILAR (686)..(2377): 941254mologous to Homo sapiens Human secreted protein sequence clone hb1041_2,accession number Y22498,Smith-Waterman Score=2826.
  misc_feature (1)...(3172): n = a,t,c or g
ggaggcaggagaatgggaagaaggcccttctcaaaatggactggtgttgcagggtgagaagctgccccctgacttcatgccaaagctcgtcaagaatctcctaggcgagatgcctctgtgggtctgccagagttgccgaaagagcatggaggaagatgaaaggcagacaggtcgagaacatgcagtggcgatctccttgtcacacacatcctgcaaatcacagtcttgtggagatgactctcattcgtcctcgtcttcctcctcatcatcctcatcctcgtcctcctcttcctgccctgggaacttcggagactgggatcctagctcgttcctggcggaacataaacgtctcggcctctggaattccccacattccattggggccatgccaggcagctctcttgggagtcctcctaccatccccggtgaggctttccccgtctcggagcaccaccagcactcagacctcactgctccccctaacagccccaccggccaccacccgcagccagcatctctaatcccgtctcaccccagctcctttggctccccaccccacccacacctgctgcccaccaccccggcagcacctttccctgcccaggcttcagagtgccctgttgctgctgccactgccccccacactccagggccatgtcagagctcccatctaccctccaccagcatgccgctcctgaagatgcccccaccattctcggggtgcagccacccctgcagcgggcactgtggtgggcactgcagtgggcctctcctcccacccccgagctctcagccactccctagcactcacagggatcccgggtgcaaggggcacaagtttgcacacagtggcctggcttgccagctgccccagccctgcgaggcaaatgaggggctgggtgaggaagaggatagcagctctgagcgaagctcctgcacctcatcctccacccaccagagagatgggaagttctgtgactgctgctactgtgagttcttcggccacaatgcgccacccgctgccccgacgagtcggaactataccgagatccgggagaagctccgctcgaggctgaccaggcggaaagaggagctgcccatgaaggggggcaccctgggcgggatccctggggagcccgccgtggaccaccgagatgtggatgagctgctggaattcatcaacagcacggagcccaaagtccccaacagcgccagggccgccaagcgggcccggcacaagctgaaaaagaaggaaaaggagaaggcccagttggcagcagaagctctaaagcaggcaaatcgtgtttctggaagccgggagccaaggcctgccagggagaggctcttggagtggcccgaccgggaactggatcgggtcaacagcttcctgagcagccgtctgcaggagatcaaaaacactgtcaaagactccatccgtgccagcttcagtgtgtgtgagctcagcatggacagcaatggcttctctaaggagggggctgctgagcctgagcctcagagtctagccccctcaaagctcagtggctcctcagagcagcagcctgacatcaaccttgacctgtcccctttgactttgggctcccctcagaaccacacgttacaagctccaggcgagccagccccaccatgggcagaaatgagaggcccccacccaccatggacagaggtgagggggccctctcccgttttcgtccccgagaacggactcgtgaggagactgagcaccgtgcccaacctatcccgggtgatctgggtcaagacacccaagccgggctatcccagctccgaggaggcaagctcaaaggaagttcccagttgcaagcaggagctgcctgagcctgtgtcctcaggtgggaagccacagaagggcaagaggcagggcagtcaggccaagaagagcgaggcaagcccagccccccggcccccagccagcctagaggttcccagtgccaagggccaggtcgctggccccaagcagccaggcagggtcctagagcttaccaaagtaggcagctgtgctgaagctggagaggggagccgggggagccggccaggaccaggttgggctggcagtcccaaaactgagaaggagaagggcagctcctggcgaaactggccaggcgaggccaaggcacggcctcaggagcaggagtctgtgcagcccccaagcccagcaaggccacagagcttgccccaaggcaaggggccncagccgccggagccgcaacaagcaagagaagccagcctcctcctttggacgatgtgttcctgcccaaggacattggacggggtggagatggatgagactgaccgagaggtggagtactttaagaggttctgtttggattctgcaaaacaaaattcgtcagaaagttgctgtgaacttggaccaacttcagcctcaagaaaacactccaaagcccagctcaagtgaaggccctgccccaggctgagctgccttcaggggcgtcctgaggccctgactgcccagctgaaggccgtataatttttccctccgtgtgcccccaccctacccgtccaaggaccctctgtgctcccccacccatccctggaccaacccaaaagctgaacgggatgcccacactgtgctggggccccttgaccctcagcagagccgctttcctggtgctacggagccttccacattcagagcccgtggaactgggctggcctaagggccaggggctgatggtactgctggcccaacactgctctctttgtgtttggtttttttgtttttgtttttattttgtttttttccaattctttacttttgatactgtgaagatctttcgtgccgaaagataaaagcaacatttggacacagagttggcatgttggtgatttgtgggtctgggcggggagggagttgagggtgtgctcagaagcatgggctctcccttagtcactaaccctagcatgcaccatgcatcagcagtttggtgctattgtcccattttacaggtgaggaaactaaagccgataggaaagtgactcagctcaacttagtctggctgattagcattgagcgcagactggtatgattatggcatctgtgcccttttctccttttgggaggtctctggtatgtgagcctggggcagccccttccccactctttcctgtttccctc

SEQ ID NO: 8137 - DNA, 434 bp, Homo sapiens
  SIMILAR (301)..(420): 551254mologous to Schizosaccharomyces pombe putative mitochondrial membrane protease subunit 2,accession number AL031788,Smith-Waterman Score=150.
cgacttcggcggggcccaggtgagaaaggcccacctgtgtcctggttgagggtctccagggttctttggggcccgaggccaatggtggcagagtctacatagaactatgcttcgtggtgttctggggaaaacctttcgacttgttggctatactattcaatatggctgtatagctcattgtgcttttgaatacgttggtggtgttgtcatgtgttctggaccatcaatggagcctacaattcaaaattcagatattgtctttgcagaaaatcttagtcgacatttttatggtatccaaaggtgccaatgggtcatgtttggttagaaggtgacaatctacagaattctacagattccaggtgctatggacctattccatatggactaataagaggacgaatcttctttaagatttggcctctgagtgattatgg

SEQ ID NO: 8138 - DNA, 360 bp, Homo sapiens
  SIMILAR (93)..(158): 541254mologous to Homo sapiens PRO0657,accession number AF090942,Smith-Waterman Score=63.
taaaaattggccagtcacgttggtgtctgcctgtggtcccagctactcgggaggctggggcacaagaatcacttgaacccaggaggcagagtgagccgaggttgtgccactgcactgcagcctgggctacagagagcaagactctgtctcagaaaaaataaaataaaataaataaaaaaagatatagtattaatgcctgtatttatgaagacagggccattgcactgctgctatgtatttaatattttgtgtacagtaaaagtcagaactcatttaaagaactttaagggatcctttagaaacatttttacttaatttcaaatgagtgggctgagcatgtagactagcagctttttatca

SEQ ID NO: 8139 - DNA, 219 bp, Homo sapiens
  SIMILAR (190)..(158): 811254mologous to Homo sapiens PRO0657,accession number AF090942,Smith-Waterman Score=45.
gagacagagtcttcgctctctgtagcccaggctgcagtgcatcggccaacctcggctcactctgcctcctgggttcaagtgattcttgtgccccagcctcccgagtagctgggaccacaggcagacaccaacgtgactggctaatttttaaaaaaattatttttagtagatatggggtttcaccatgctgggcatgggctcgggcacgtgtaatcccag

SEQ ID NO: 8140 - DNA, 615 bp, Homo sapiens
  SIMILAR (28)..(441): 401254mologous to Schizosaccharomyces pombe putative mitochondrial membrane protease subunit 2,accession number AL031788,Smith-Waterman Score=290.
atgcttcgtggtgttctggggaaaacctttcgacttgttggctatactattcaatatggctgtatagctcattgtgcttttgaatacgttggtggtgttgtcatgtgttctggaccatcaatggagcctacaattcaaaattcagatattgtctttgcagaaaatcttagtcgacatttttatggtatccaaagaggtgacattgtgattgcaaaaagcccaagtgatccaaaatcaaatatttgtaaaagagtaattggtttggaaggagacaaaatcctcaccactagtccatcagatttctttaaaagccatagttatgtgccaatgggtcatgtttggttagaaggtgacaatctacagaattctacagattccaggtgctatggacctattccatatggactaataagaggacgaatcttctttaagatttggcctctgagtgattttggatttttacgtgccagccctaatggccacagattttctgatgattagtaagcatttattcttttgacttgattattgtctccttttcatgtgaatttattactcccgttgaaaccgtgtacttaccaataaactatttgctattcaaaaaaaaaaaaaaaa

SEQ ID NO: 8141 - DNA, 1181 bp, Homo sapiens
  SIMILAR (870)..(814): 471254mologous to Schizosaccharomyces pombe putative mitochondrial membrane protease subunit 2,accession number AL031788,Smith-Waterman Score=71.
gtgagccgaggttgtgccactgcctagcagcctcgggctacagagagcaagactctgtctcaaaaaaaaataaaataaaataaataaaaaaagatatagtattaatgcctgtatttatgaagacagggccattgcactgctgctatgctgaaatgaacttttataaagtattattgactatagccaactacagatggcatatgcccttaaagatgcatttttctatgtatttaatattttgtgtacagtaaaagtcagaactcatttaaagaactttaagggatcctttagaaacatttttacttaatttcaaatgagtgggctgagcatgtagactagcagctttttatcaaacctggcattgtcaggttgaacttataaatacgaataattactactctgacttgtaaatgtagctgctaaagtatgaggtatatttaagaagaatagattagtttcattatacctataagaacaagaattcaaaagtgaggtagtcatccaggttccccctcccacaatatttttgtatcataaaatttagatgacttttttgggttacatttttatccatatattttgaactaacagaacttgggcagaatgtgtgttgaatattctttacatttaacaattaaaaacaactaaaactgaatagcaaatagtttggtgggttattacacggtttcaacgggagtaataaattcacatgaaaaggagacaataatcaagtcaaaagaataaatgcttactaatcatcaaaaaatctgtggcccattagggcctggcacgtaaaaatccaaaatcactcagaggccaaatcttaaagaagattcgtcctcttattagtccatatggaataggtccatagcaccctggaatctgtagaattctgtagattgtcaccttctaaccaaacatgacccattggcacctagaattagagaagaaatgcagcctcttaaagataaaacctaatttgggtactataattaaaaagcatgtcattcagaggtagggagaaatgtcctaaggctctcttttatagaatagatacaaatcctaatattgcatttttgcttttatttcttgcacaataacttttactaaatatcaaaggtttcaacttttttaaaaacctatcatctttttttgtccgaacgcgtgggcggacgcgtggg

SEQ ID NO: 8142 - DNA, 1623 bp, Homo sapiens
  SIMILAR (948)..(989): 421254mologous to Homo sapiens sialic acid-specific 9-O- acetylesterase I,accession number AF300796,Smith-Waterman Score=41.
atgtggggtgtaggcaaaataacagaccccaaagacgtcgacacactcatccctggaacctgtggctgtgttaccttgcatggcgaaaggcactttgtagatgtgattaaggctggccctacaagaagtgttcaaggaaatcctaaacttggaagcaaaaaaatggaagttagcatcatgaaaacacaggaaagtataaaactcactgttaaagcgaccacacaaaggaggaacagaaatgaatcaaatgggcccactacagaattccaccagtccacaatgacaaacactcactctgatacgtggatggtggtactggatcctatgaagcctggaggacctttcgaagtgatggcacaacagactttggagaaaataaacttcaccctgagagttcatgacgtcctgtttggagatgtctggctctgtagtgggcagagtaacatgcagatgactgtgttacagactctttcctgtggcgttgttactgtgatcttcattatgaccctggctggtgcacatggttccactttgtcttctgggatattctcaatatatcaaagtgactctttgaagtgtaagtcgggtcggaaggctccagtgggtccccgtgtgctgaggacaggttacacatggtctcaagaaaattccacaggaaatccagacctgtttgttcaggatcatacctggcagttctgcactaagcactcaggatcctatgttgcttccatggaaacagtggatgaaactgctttcattctctccacccacactagcttccgcactgactgggaactcaagtgcttcatcacagtgagacgccagcttgggaggcagtatgagagaacatgctacttgtcttttagacccgttgctaacactgtagagtactgtattggttttcgctttgcttcatacatcaataatgatatggtgctgcagaaggagcctgctggggcagtgatatggggcttcggtacacctggagccacagtgaccgtgaccctgcgccaaggtcaggaaaccatcatgaagaaagtgaccagtgtgaaaggattgatctcattgctcgtttgtctttctcagtttgaaattgttcctgaagatgacccccagaatgccattgtcagctcttctgcagatgcttgtcatgcagaactgctcaggactataagcactactatggggaaactaatgcctaacctgcttccagctggagctgacttttttggattttctcatccagccatccacaacctgatccagagctgtccaggagctcgaaaatgcatcaacctgcctgcttctcgaccagtagggctcagtattggcccccttagccctctggacagttaccagtgggtgaaatttgatgtgtgcaaacctggagatgggcagctacctgaggggctgccggagaatgatgcagctatgagctttgaagcctttcagagacagatctttgatgaagatcagaatgatccccttctgccagagcttcagcctgcagcctttgtgtcttcttaccagcccatgtacctgacacatgaacccttggtagatactcacctgcagcacttgaagtctccatcacagggtagcccaattcagtcttcagattga

SEQ ID NO: 8143 - DNA, 903 bp, Homo sapiens
  SIMILAR (1)..(150): 1001254mologous to Homo sapiens sialic acid-specific 9-O- acetylesterase I,accession number AF300796,Smith-Waterman Score= 278.
atgtcagcagtgtgctggctctttggacgtcacctttatgacactctgcagtatcccatcgggctgatcgcctccagctggggcgggacacccattgaagcctggtcatctggacggtcactgaaagcctgtggggtccctaaacaagggtacttgctaaagaagctcctccagcttcaggctctaactgaaggggaagtacaggctgcagctccttcccacagttccagtttgcccctgacttatggtgtggccagctctgtgggaactatacagggagctgggcctatttcagggcccagcactggggctgaggaaccatttgggaagaaaactaagaaggagaaaaaagaaaaaggcaaagagaacaacaaactggaagttctgaagaaaacatgcaagaaaaagaaaatggcgggaggtgctcgcaagctggttcagcccattgccctggatccctcaggacggcctgtgttccccatcggactagggggtctaacagtatatagcctgggggagatcatcaccgaccgacctggctttcatgatgagagtgccatctaccccgtgggctattgcagtactcgaatatatgccagcatgaagtgcccagaccagaagtgtctatatacctgtcagatcaaggatggtggtgtgcagcctcaggcagttcttaccaagaagatgtcgattccattctccaacacccactaccgaattccacaaggatttgggaatcttcttgaagggctgacacgcgagattctgagagagcaaccggacaatataccagcttttgcagcagcctattttgagagccttctagagaaaagagagacagagctcaaaatctctgccaatttcctgaatgttgctggtcttttccatatccggtcagggtga

SEQ ID NO: 8144 - DNA, 1188 bp, Homo sapiens
  SIMILAR (894)..(760): 461254mologous to Takifugu rubripes All-1 related protein,accession number AF056116,Smith-Waterman Score=123.
ctaagcaaaaaagattacatcccgattaccaagatgaaagtaaacagaattgacaagagaaatttattactaaaaataaagcagctgaaggttttcccagggaaaaccatcaccaccaggaccttccatgatgaaataccgttagtatcttctttaccttctgaattgctgccttctttcatataccccaaaattttagtttaagttaaattaatcacgacaaaaacgatgtggcatctgatcccttcttgttcaatctgaagacctgaattgggctaccctgtgatggagacttcaagtgctgcaggtgagttatctacccaagggttcatgtgtcaggtacaatgggctggtaagaagacacaaaggctgcaggctgaagctctgggagggtccaaggatcctgggcagaagggggatcatttctgatcttcatcaaagaatctgtctctggaaaggcttcaaagctcatagctgcatcattctccggcagcccctcaggtagctggcccatctccagggtttggcacacatcaaatttcacccactggtaattgatgcattttcgagctcctggacagctctggatcaggttgtggatggctggatgagaaaatccaaaaaagtcagctccagctggaagcaggttaggcattagtttcccccatagtagtgccttatagtcctgagcagttctgcatgacaagcatctgccagaagaagctgacaatggcattcctgggggtcatcttcaggaacaatttcaaactgaggctgcacaccaccatccttgatctgacaggtatatagacacttctggtctgggcacttcatgctggcatatattcgagtactgcaatagcccacggggtagatggcactctcatcatgaaagccaggtcggtcggtgatgatctataaaaaacattcccccaacctgggattgaggtcactgaagaatttagaagtccagtttcctgtggtagcctttagaaccactttggggctcccccaggctatatactgttagaccccctagtccgatggggaacacaggccgtcctgagggatccagggcaatgggctgaaccagcttgcgagcacctcccgccattttctttttcttgcatgttttcttcagaacttccagtttgttgttctctttgcctttttcttttttctccttct

SEQ ID NO: 8145 - DNA, 414 bp, Homo sapiens
  SIMILAR (3)..(227): 961254mologous to Homo sapiens NY-REN-45 antigen,accession number AF155110,Smith-Waterman Score=381.
atggtacacagcctgttctctctggaacgggagaagaaactgttaggctaggatttcctgtggatccacgaaaggtgctaatagtagctggccatcacaactggattgtagctgcatatgcccattttgctgtgtgttacagaatcaaagaatcttcaggatggcagcaagtgtttacgagcccatatttggattggactatcgaacgagtagctttattagcaagggcaagaaggactgagagctttcacagttatagggacttccagactattaatttgaacagaaatgtagaaagagctgtccctgaaaatggtaacttgggtccaatacaagctgaagtgaaaggggcaacaggggaatgtaatatatctgagagaaagtctcctggagtagaaataaaaagtttgagag

SEQ ID NO: 8146 - DNA, 2448 bp, Homo sapiens; identical to SEQ ID NO: 5149
  SIMILAR (1)..(2445): 1001254mologous to Homo sapiens NY-REN-45 antigen,accession number AF155110,Smith-Waterman Score=4250.

SEQ ID NO: 8147 - DNA, 248 bp, Homo sapiens
  SIMILAR (207)..(248): 711254mologous to Homo sapiens Human cancer associated antigen precursor from clone NY-REN-45,accession number Y92338,Smith-Waterman Score=52.
gaaaatggtaacttgggtccaatacaagctgaagtgaaaggggcaacaggggaatgtaatatatctgagagaaagtctcctggagtagaaataaaaagtttgagagaattggatagtggattggaagtgcataaaatagctgaaggtttttcagaatccaagaaaaggtcatcagaagatgaaaatgaaaataaaatagagtttaggaagaaggaggattttaagggggaggattccttcgaagaaag

SEQ ID NO: 8148 - DNA, 512 bp, Homo sapiens
  SIMILAR (25)..(276): 981254mologous to Homo sapiens Human cancer associated antigen precursor from clone NY-REN-45,accession number Y92338,Smith-Waterman Score=418.
ttctccgaagggcggaatcgctttctgaacgtagggccgaccagatttagtacctcaagacaaactcttatgtggattccagattcttttttttccagtttgctgagtgggagaatttcaacacttcgagatgaaactggcgctatatttattgatagagatccagcagcatttgcacccattttaaattttcttcggacaaaagaactagacttaaggggagtgagtattaatgttctcaggcatgaagcagaattttacgggatcactccattagagaaaataaaaatggagtactgtttttctgtttgcatgtactcttgacaagtttgctttgaaatgtttttagtaagaaggcttctcttatgtgaagaattggagcgttcctcttgtggcagtgtccttttcatggttacttgcccccaccaggtattcctagtcgaaaataaacaacacagtcagatctgctgattctaggaatggtctaaattctacagaaggtgaagcccggg

SEQ ID NO: 8149 - DNA, 678 bp, Homo sapiens
  SIMILAR (133)..(255): 971254mologous to Homo sapiens Human cancer associated antigen precursor from clone NY-REN-45,accession number Y92338,Smith-Waterman Score=215.
atggatgaagctggaaaccatcattctgagcaaactattgcaaggacagaaaatcaaacacgtcatgttctcattcttgtgcagtactctgctaaagagagacaagtgtataaggccaatatgccgcaccaaggagtgttcagcctgggtgttcctgtagatgctctcttctttattggtaaccagttggtggccacgagtcatacagggaaagtgggagtgtggaatgctgtcactcagcactggcaggttaggacaggcttgagcacacttgtagctagagaggagagttgccagaaggacctgaagactgaaagaatggagattatttccggtcccataaaagtcaagagtgtatatgggatctacagcacagctagaaagctatctactgtacttaatagtattaaggatactttacctgttaaaaagagggaaaatgcaacaaaatatgagctccagggttatgctgtgcctcagtaccgagccccattttcggtggacagcaatttgtctgtggtgtgtgtgaactggagtgacaccttcctcctgaacggccaactgaaggagtacgtgttaaccgacggagggcgacgcgtgtacagcggcttggacaccaccctctacataccgagaacggcggacaaaactttacgggatgctaaatctgaaagctga

SEQ ID NO: 8150 - DNA, 981 bp, Homo sapiens
  SIMILAR (722)..(805): 1001254mologous to Homo sapiens Human cancer associated antigen precursor from clone NY-REN-45,accession number Y92338,Smith-Waterman Score=147.
tcaggcaccagtgacggcatcagtgagctgagtatgcctgtccttctgtcccaggttggcatacactgacactggttttagcagatctaggcaggtcaatttttgggcctccagatagcctgtgtgagttccagaaatggcagcagtggggtgggcaggtgggtagattcttgagccctcagtagtaggcatggtgtgagtgatggcagttgcagtagtggaacaatgctctgggacccaagctgtcagtgctgttgttgtcagtggctctaggattagtttttcctttcccaatccatgttgacaaagtgggtcataaagatccgtagatcgtttgcccagatctgccctcaatctgcgaatcagcttcctcgttttagaaaatcgtgtatagggctgtttcacgcactgccgcttgcatttgacctgtgggtccccttggttatcgctcgccgctgttgttttattggcggtttcatggatcctttcatttctatcaacgagttgtatggtgccttggtcaagtgtcgagaggtccacttgctccatgaaataatgcgctgcgtacataggcggatagcgctcccaggtactacggtagcgtcgatctagaggatccccctggccctgcagccgtcgccgctgcctcaggctacagccccgggctcggcggtcccggctggggatgtgagggcggcgagcgcgtccggagccgccggagatggcgggagggcactgcggcagcttccccgcggcggcggccggcagcggcgagatcgtccaactgaacgtaggggggaccaggtgagtcggcgggtagcgggcttgcagcggggatgccttggcggcctcctcctttggtgtcgacggggaccgagagtcgcaggaacgagggcgagcgtgggaggccaagcctggaggggaacgtgggggcctccaggcggcaagaacgtcgggcggattttggagctggtgaagcat

SEQ ID NO: 8151 - DNA, 3204 bp, Homo sapiens
  SIMILAR (1193)..(1288): 531254mologous to Homo sapiens NY-REN-45 antigen,accession number AF155110,Smith-Waterman Score=82.
  misc_feature (1)...(3204): n = a,t,c or g
cctggaacgggagaagaaactgttaggctaggatttcctgtggatccacgaaaggtgctaatagtagctggccatcacaactggattgtagctgcatatgcccattttgctgtgtgttacagaatcaaagaatcttcatgatggcagcaagtgtttacgagcccatatttggattggactatcgaacgagtagctttaaatgcaaaggtggttggagggccacatggagacaaagacaaaatggttgctgttgcctcagagagtagcatcatcttgtggagtgttcaggatgggggaagtggaagtgaaattggagtgttcagcctgggtgttcctgtagatgctctcttctttattggtaaccagttggtggccacgagtcatacagggaaagtgggagtgtggaatgctgtcactcagcactggcaggttcaagatgttgttcctataactagttatgacactgctggatcattccttctgcttggatgtaacaatggatcaatatattacatagatatgcagaagttccccttgcgaatgaaagataatgatcttcttgtaactgaactgtatcatgatccttcaaatgatgctattactgctctgagtgtttacctcacacccaaaacaagtgtcagtggtaactggatcgagatcgcttatggtacgagctctggaccagtacggagtgattgtacaacacccagagacagttgggtcaggtcctcagctttttcagactttcacagttcaccgaagtcccgtaacaaaaatcatgctatcagagaagcatcttgtatcagtctgtgcagataataatcatgtccggacgtggacagtaacacgattcagagggaatgatctctactcagcccgggttctactcctttagcgtcattcaagatactatccctggaggagacagaaagtcatggtagctattcctctggaaatgacataggaccttttggagagcgagacgatcaacaggtgtttatccagaaagttgttcccatcaccaacaaactatttgtaagactctcatcgactggaaaaagaatatgtgagatccaggctgttgactgtactacaatatcctcatttacagtgagggaatgtgagggatccagtaggatgggctcaagaccaaggcgctacttgttcacaggccatacaaatggcagtatttcaaatgtggggatctggaccactgctatgggatatggttaacaaaagtgaagataaggatgtaagtggtccaacccgaagaagagctactcaaattactcgatcaatgtgatttgagcacatctcgctgtgctactcctaacatcagtccagcaacttccgtagttcagcatagccacttacgagaatcaaattctagccttcagcttcagcaccatgataccactcatgaatctgctacttacggctccatgaggccttacagagaaagtcctttattagcaagggcaagaaggactgagagctttcacagttatagggacttccagactattaatttgaacagaaatgtagaaagagctgtccctgaaaatggtaacttgggtccaatacaagctgaagtgaaaggggcaacaggggaatgtaatatatctgagagaaagtctcctggagtagaaataaaaagtttgagagaattggatagtggattggaagtgcataaaatagctgaaggtttttcagaatccaagaaaaggtcatcagaagatgaaaatgaaaataaaatagagtttaggaagaaaggaggatttgaagggggaggattccttggaagaaagaaagttccctatctggcatcatcaccaagtacttcccgatggaggaactgactcacctggtactgcgtccccatctcctacaaagactactccatctcctcggcataaaaaaagtgattctttcaggtcaggagtacagcttgtgaaaactcaccaaaatgaataagttgtttcgttacatttagatgaaagttaaactttactgaatttcagtaccattagtttttacactaaaactttacaagataaaattgggacttccatttagtatctttttaacagaattacttgggaataatggagatacaataatcatatctcttttggacattttgggaaatttttttaattttacaagtacatttaacagatcatttataaagcaggagtccattttaacacttaccgactttttttggtttgggaaacatattaccacgtcttaataggatggtgcccatataggtgagcatccctttagatcatgggaaccagcagactgcattcctaatcttcattaatgcctgagaacttgtcttacaatgttaactttaagtgaatcacataattgtctttggaacttgggctcccaacacttattgtgattggcaaagtggttacccagatatttggatgaggtgctatgtttgtgaaaaacatattcatgtaattgcaaaaacactatttgatattggantacccagattaccactatgtagtaagtcttttagggtggattttaatttagtccgtgcgtcattttctgatttctcatcattgggagatcttaaatcttagcaagcattagcaatattaaatgccaaaattcccatggaaacctttccaagtttgggagcaattgtctggtgtttgaaaaggatgaaataaaaataataatcaagggccaaagctttggagtgccccagaacgggaaagctgtacccagttgcctaccctgtcttgttnccgggagcccacccatgtttttttttcccagtgttaaaccaacaatccatgataattaaattaaaaacacctagtttgttccacttgtaggacctgcagtttctgaattttggggtaaagggtttggctgctggtaagaatgtgaatttgaatgtattttgaattgtaagagcaaaagaacgtttttgtacaatttttttttcatttaattggaatgatctttcaggtttctacaaatagggtaattgtaaatttaaagcattagcgatttattggtgaataatgtatatatccccattcccaagaaatataagtgagtgaagttgaaataaaatctttaaaatttactatattgccaagtggtttcacaacagttctcttgtatttatttatcaattaaatcaaataaaaatgattatgtcaaaaaaaa

SEQ ID NO: 8152 - DNA, 383 bp, Homo sapiens
  SIMILAR (11)..(283): 811254mologous to Rattus norvegicus putative,accession number X74226,Smith-Waterman Score=403.
ggcacgaggcccaaagagcgctctactcacccagaatggcacgggcagccttcctcgcaacctggcagccacactgcaggacatcgagaccaagcgccaactagctctgcagcagaagggacaacaagtgattgaagagcagcggcggcgactggctgagctgaagcagaaagcggcagctgaggcacagtgccagtgggatgcccttcacggggcagcacccttcccagcgggcccctcgggcttcccccctctcatgcaccactctatcctacaccacctgctctccttcccagcattgagcccttggttgcctgggcccaggctgggggttttcagtatttgtaagcatttcagcaaaacaatcacacctttggactacg

SEQ ID NO: 8153 - DNA, 357 bp, Homo sapiens
  SIMILAR (312)..(76): 341254mologous to Streptomyces coelicolor A3(2) putative lipoprotein,accession number AL118514,Smith-Waterman Score=89.
  misc_feature (1)...(357): n = a,t,c or g
tttttttcgtagtccaaaggctttattgttctgctgaaatgcttacaaatactgaaaacccccagcctgggcccaggcaaccaagggctcaatgctgggaaggagagcaggggaggtgggcttagtgttaaggcgtgaagggcgaggccagacagctggaggcctggtcctccactctccatttccatcacccttcggaggctgaaggaagggcggcggcaccacagggcccttcccctctgctgcatcataacccttctagcttcctctcccaactgcatcgctcctcctctgttccatagatcccccggcttcatcccttctggctctaagcaaggcaccantggaagggagagg

SEQ ID NO: 8154 - DNA, 1842 bp, Homo sapiens
  SIMILAR (817)..(1737): 821254mologous to Human endogenous retrovirus K gag protein,accession number Y17832,Smith-Waterman Score=1306.
atgcggggcacctcgcccatgcccccagcccctgtgccaggcctttctccctgggcctccgcctcccgggacctggttcccaccacctgccttcctcccatgctgccctcctcctcgttcgcttccatcacgccttcacctaagatggagaagctgctgctccctgctgtagacttagagcagtggtaccaggagctgatggccgggctggggactggccccgctgcagcctcccctcactcttctcccccgcctctgcccgccaaagcttcccgtcagctgcaggtcagtcaaatttgcatccaggtcagcaaacacatgggaggggccaaagtgatggcaaccacaggaggaaccaatttacgagatgacataatgaggcttgatgatacagccccatacaacgcatgcccctgtggcctggtcttccaggcccagagtggcattgcaagcaccacccaaccccctttgtcactgtcgttgaaggaggcagaggccctggagactgagacaaagctctttgaggacttggagttccagcagttggagcgggagagccgcgtggaggaggagcgcgagctggccggccaggggctgctccggagcaaggctgagctgctccgcagcatcgccaagaggaaggagcgcctggccatcctggacagtcaggctgggcagatccgggctcaggccgtgcaggagtcagaacgcctggcccgggacaagaatgcctccttacagctgctgcaaaaggagaaggagaagctgactgtgctggaaaggagataccactcactcacagggggcaggcctttcccgaagaccacatcgaccctcaaagaggttagagaaaataagagccaaccaccagtagcttatcaatactggccgctggctgaacttcagtatcagccacccccagaaagtcagtatggatatccaggaatgccccagcaccacagggcagggcgccataccctcagccgcccactaggagacttaatcctacggcaccgcctagtagacagggtagtgaattacatgaaattattgagaagaaaggaaggagatactgaggcgtggcaattcccagtaacgttagaaccgatgccacctggagaagaagcccaagagggagagcctctcacagttgaggccagatacaagtcttttttgataaaaatgctaaaagatatgaaagagggagtaaaacagtatggacccaactccccttatatgagtacattattagattccattgctcatggacatagactcattccttatgattgggagattctggcaagatcatctctctcaccctctcaatttttacaatttaagacttggtggattgatggggtacaagaacaggtccgaagaaatagggctgccaatcctccagttaccatagatgcagatcaactattaggaagaggtcaaaattggagtactattagtcaacaagcattcatgcaaaatgaggccattgagcaagttagagctatctgccttagagcctgggaaaaaatccaagacccaggaagcgcctgcccctcatttaatacagtaagacaaggttcaaaagagccctaccctgattttgtggcaaggctccaagatgttgctcaaaagtcaattgccgatgaaaaagcccataaggtcatagtggagttgatggcatatgaaaacgccaatcctgagtgtcaatcagccattaagccattaaaaggaaagggttttcagggacaaaaacccccactgtcccaagtgtttcagggaataagccagttaccacaatacaacaattgtcccccgccacaagcggcagtgcagcagtag

SEQ ID NO: 8155 - DNA, 580 bp, Homo sapiens
  SIMILAR (4)..(363): 961254mologous to Rattus norvegicus putative,accession number X74226,Smith-Waterman Score=627.
gatgatacctgcctgcacgtggagctcagcagcaaggactgccgtggctacttggtcaagatgggcggcaagattaaggcatggaagaagcgctggtttgtcttcgaccggctcaagcgcaccctttcctattatgtggacaagcatgagacgaagctgaagggagtcatctatttccaggccattgaggaagtgtactacgaccacctgcgcagtgcagccaagagcccgaacccagccctcaccttctgcgtaaagacccatgaccggctgtactacatggtggccccatctgcagaggccatgcgtatctggatggatgtcattgtcacaggggctgagggctacactcagttcatgaactaactggccggggccctcctgggccagagccacaacttgggggcttttgtataagaagactttaatattctgtaaggagcttggtcctgtgagtttctgggctctgggcttcctgaagaaccagccagaagaagaaaagttaggaggtggctttgttgcctcctggggagcccagaacttgcagtaaccctttagggtcctgccccaggcccagcca

SEQ ID NO: 8156 - DNA, 5011 bp, Homo sapiens
  SIMILAR (1398)..(2609): 751254mologous to Rattus norvegicus putative,accession number X74226,Smith-Waterman Score=1418.
gcatgattccagcagggggccgagcccctgggcccccctacagccctgttcctgcagaatcagaaagtctggtaaatgggaaccacaccccacagactgcaacacggggaccctctgcctgtgccagccacagttccctggtgagctctattgagaaggacctgcaagagatcatggactcactggtgctagaggagcctggagctgctggcaagaagcctgccgcaacctctccactgtcaccgatggctaatggtgggcgctacctgctgtctcccccaaccagccccggcgccatgtctgtgggctccagctatgagaacacctctccagccttctctccactctcttcaccagccagcagtggaagctgtgccagtcactcacccagtgggcaagagccaggaccttctgtgcccccgctggtacctgcccgttcctccagctaccatctggccctacagcccccacagtcccgcccaagtggtgctcgctccgagagtcctcggctgagcaggaaagggggccatgagaggcctcccagccctggcctccggggtctgctgacagacagcccctgcactactggtcttggcggaggccccggagagccacctgaaaccccccggctgggtgggcagctgcctgtggtggccatcagcctgagtgaatacccagcttctggtgctctcagtcaacccaccagcattcctggcagccccaagtttcagcctccagtccctgctccccgaaacaagattggcacactccaggaccgccctcccagccctttccgtgagcctccaggcagtgagcgggtgctaacaaccagcccctcacgccaactggtgggccgaacattttcagatgggttagccacccgtaccctgcagcctcctgagagtccccgcctgggccggcggggcctggacagtatgcgagaactaccccccttaagtccatctctgtcccggcgagctctctccccgctgcccacccggaccaccccagatcccaagctaaacagggaagtggcagagagtcctcggccccggcgctgggcagcccatggggcttcaccagaggacttctccctgacgctgggggcacggggccgtaggacacggagcccctcacccacactgggtgagtctctggcaccccacaagggcagcttcagtggcaggctgagcccagcctacagtctgggctctcttactggggcttcaccctgccagagtccctgtgtccagaggaagctctccagcggggacttgcgggtgcctgtcacaagggagcggaaaaatagcatcacagagatcagtgacaatgaggacgacctcctggagtaccaccggcgacagcgccaagagcggctccgggagcaggagatggagaggctggaacgccagcgcctggagaccatcctgaacctgtgtgccgaatacagccgggctgatgggggacctgaggctggggagcttcccagcattggggaggccaccgcagcattggcactggcaggccggaggccctcacgaggccttgcaggggcctctgggcggagcagcgaggagcctggcgttgccacccaacgcctatgggagagtatggagcgctcagatgaggaaaatctcaaggaggagtgcagcagcactgagagcacccagcaggagcacgaagatgcacctagcaccaagctccagggagaggtgctagccctggaagaagagcgggctcaggtgctggggcacgtggagcagctcaaggtccgtgtgaaggagctagagcagcagctgcaggagtcagcccgagaggccgaaatggagcgggcactgctgcagggagagagggaggcagagcgggcactgctgcagaaggagcagaaggcagtggatcagctgcaggagaagctggtggccttggagacaggcatccagaaggagagggacaaggaggcagaggccctggagactgagacaaagctctttgaggacttggagttccagcagttggagcgggagagccgcgtggaggaggagcgcgagctggccggccaggggctgctccggagcaaggctgagctgctccgcagcatcgccaagaggaaggagcgcctggccatcctggacagtcaggctgggcagatccgggctcaggccgtgcaggagtcagaacgcctggcccgggacaagaatgcctccttacagctgctgcaaaaggagaaggagaagctgactgtgctggaaaggagataccactcactcacagggggcaggcctttcccgaagaccacatcgaccctcaaagagatggagaagctgctgctccctgctgtagacttagagcagtggtaccaggagctgatggccgggctggggactggccccgctgcagcctcccctcactcttctcccccgcctctgcccgccaaagcttcccgtcagctgcaggtttaccgctccaagatggatggcgaggccaccagcccccttccccggacccgcagcggccccctcccctcctcctctggctcttcctcctcctcctcccagctcagcgtggctaccctggggcgtagcccctccccaaagagcgctcctactcacccccagaatggcaccgggcagccttccttgcaacctggcagccacactgcaggacatcgagaccaaagcgccaactagctctgcagcagaagggacaacaagtgattgaagagcagcggcggcgactggctgagctgaagcagaaagcggcagctgaggcacagtgccagtgggatgcccttcacggggcagcacccttcccagcgggcccctcgggcttcccccctctcatgcaccactctatcctaacccaccttggccttgcggggcgggagcgtggggaggagggtgagcacgcctatgatacgctgagtctggagagctctgacagcatggagaccagcatctccaccgggggcaactcggcctgctcccctgacaacatgtccagcgcgagtggtctggacatggggaagatcgaggagatggagaagatgctgaaagaggctcatgcagagaagaacccggctcatggagtcgagggagcgggagatggagctgcggcggcaggccctggaggaggagctggcggaggctgtgagcaggtataacggaggctgcagagtgagagtgcccggaggcagcagctggtcgagaaggaggtcaagatgcgggagaaacaattttcccatgcacgacccctgacccgctacctgccaatccggaaggaggactttgacctgaagacacatattgagtcatcgggccatggtgttgatacctgcctgcacgaggtgctcagcagcaaggtctgccgtggctacttggtcaagatgggcggcaagattaaatcatggaagaagcgctggtttgtcttcgaccggctcaagcgcaccctttcctattatgtggacaagcatgagacgaagctgaagggagtcatctatttccaggccattgaggaagtgtactacgaccacctgcgcagatgcagccaagaagaggtttttccgcttcactatggtgactgagagcccgaacccagccctcaccttctgcgtaaagacccatgaccggctgtactacatggtggccccatctgcagaggccatgcgtatctggatggatgtcattgtcacaggggctgagggctacactcagttcatgaactaactgccgtgggcctcctggcagagcacaactggggcttttgtataagaagacttaaatattctgtaaggagcttggtcctgtgagtttctgggctatggcctcatgaagaaccagccagaagaagaaaagtagaggtggctttgctgcctcctgggagcccagaacttgcagtaaccctttaggtccctgcccccaggcccagccagggctggaggagctgtcacagagagggcctcagctctgacctgacacctggctcttccccagcctgttttcttcttttcttaaaagacaattatgggtaccataagctgccaaagatcccctcctgcctcagacccctttgccaggggcttttgggggctgagaagaggcacatacagagtggggtaatagctcattcggcccgctttccatttctcaaaccccgctgtggcccattggtctcctttccctttatactttttatttaccttgctcaaggggccagaggattttcaagtgttcaaccttggagggtcccagctccatcccctagttgcagactcatcaccatggttaccatagtgactgcttcattgccatggttacatactaattgctgcagctctgtggcccagcccactgcttcagctgtgcgcgagtctgaggggacgttgcaaccatctcccaagcccaggcccctgggcatcatcatgctggggggaagggacttgaatacctttttccttcccccgtgccatgtgtctttcagccctgatgcacaaggctgccagccccccacgtccaggcctctcccttccactggtgccttgcttaagagccaagaagggaatgaagccgcgggaatctatggaacagaggaggagcgatgcaagttgggagaggaagcttagaagggtttatggttggagttcttgtacagtgttgagtttccgacagggaatagaggattcctccgaatgcatccttagagagaaaggcctgagcaggagatgatgcaagcagaggggaagggccctgtggttgccgccgcccttccttcagcctccgaaggttgatggaaatggagagtggaggaccgaggcctccagcttgtctggcctcgcccttcacgccttaacactaagcccacctcccctgctctccttcccagcattgagcccttggttgcctgggcccaggcttgggggttttcaggtatttgtaagcatttccagcagaacaataaagcctttggactacggaagcaaaaaaaaaaaaaaaaaaaaaaaaaaaagtcgtatcga

SEQ ID NO: 8157 - DNA, 415 bp, Homo sapiens; identical to SEQ ID NO: 7752
  SIMILAR (31)..(123): 871254mologous to Homo sapiens ubiquitin conjugating enzyme,accession number L22005,Smith-Waterman Score=144.

SEQ ID NO: 8158 - DNA, 307 bp, Homo sapiens; identical to SEQ ID NO: 7753
  SIMILAR (189)..(1): 361254mologous to Nicotiana tabacum extensin (AA 1- 620),accession number X13885,Smith-Waterman Score=84.

SEQ ID NO: 8159 - DNA, 1515 bp, Homo sapiens
  SIMILAR (1)..(861): 681254mologous to Homo sapiens ubiquitin conjugating enzyme,accession number L22005,Smith-Waterman Score=905.
attgcggcggcgccagagctgctggagcgctcggggtccccgggcggcggcggcggcgcagaggaggaggcaggcggcggccccggtggctcccccccggacggtgcgcggcccggcccgtctcgcgaactcgcggtggtcgcgcggccccgcgctgctccgaccccgggcccctccgccgccgccatggctcggccgctagtgcccagctcgcagaaggcgctgctgctggagctcaaggggctgcaggaagagccggtcgagggattccgcgtgacactggtggacgagggcgatctatacaactgggaggtggccatcttcgggccccccaacacctactacgagggcggctacttcaaggcgcgcctcaagttccccatcgactacccatactctccaccagcctttcggtttcttaaccaagatgtggcaccctaacatctacgagacggggtacgtgtgtatctccatcctccacccgccggtggaacggacccccagagcggggagctgccctcagagaggtgggaaccccacggcagaacgtcagggaccattcttcctgagtgtgatcttccctcctggaacggaggcccaacacctttcttcggcccgcaaacgtgggacggcttccgtggatgttacagggaagttgggaaagagagcaagggggaaggattcgggagttacacagaacatcattccggaagcaggtcctggggaccaaggtggacgcggagcgtgacggcgtgaaggtgcccaccacgctgccccgagtactgcgtgaaagaccaaggccgccgggcgcccgacgagggctcagacctcttctacgacgactactacgagggacgcgagggtggaaggaggaggccgacagctgcttcggggacgatgaggatgactctggcacggaggagtcctgacaccaccagaataaacttgccgagtttacctcactagggccggacccgtggctccttagacgacagactacctcaacggaggttttgtgctggtccccgtctcctctggttgtttcgttttggcttttttctccctccccaatgtctgttctgggttttcaacgttgctttcaagaagaaagaaggggcttgccccccacccgcccaactcacgttcacttcggggctcggttggacggggccccagggtgggagcggccggcccaccttgtcccctcgggaggggagcttgagcccgacttctaccggggtcccccagcttccggactggccgcaccccggaggagccacgggggcagctgctgggaacgtgggcggggggcccgtttttctgacactacccagcctgggaagccccaggtgtaagcggtccgaggggcccggtcctgcctgtcagctccaggtcctggagccacgtccagcacagagtggacggattcaccgtggccgactcttttccctgctttggtttgatatgaaatctaaataaaactactttatgagaggccaaaaaaaaaaaaaaaaa

SEQ ID NO: 8160 - DNA, 599 bp, Homo sapiens
  SIMILAR (246)..(389): 371254mologous to Hydra sp. mini-collagen,accession number X61048,Smith-Waterman Score=62.
  misc_feature (1)...(599): n = a,t,c or g
cggaattcccgagtcgacgatttaggtgaaaaagctggagcaaccaaacacggcttacaattctaggacggctgtttaaatagcgcaggggccattttaccctccaggttggccctgctcaggaccaggaggaaacacctccagcccgcgacctcctcccacagggggaaaaggaaagcaggaggaccacagaagctttggcaccgaggatccccgcagtcttcacccgcggagattccggctgaaggagctgtccagcgactacaccgctaagcgcagggagcccaagcctcccgcaccggattccggagcccaagcctccgcaccggattccggagcacaagctccaccgcgcatgcgcacacgccccagacccaggctcaggaggactgagaattttcttgaccgcagtgcaccatgggaagctctgaagtttccattaattcctggggcttccagaaaggaaggaaaaggcggccgtgggagagacgaagatttcatgttgcttgaaagttcttgaaaggaagtttaagggtttgagggttgattgagggccccatttttttgttgttgttngggtttcaggcnggaggattttt

SEQ ID NO: 8161 - DNA, 862 bp, Homo sapiens
  SIMILAR (537)..(641): 1001254mologous to Homo sapiens dJ79C4.1.2 (Homeobox protein PMX-1 (PHOX1) isoform 2),accession number Z97200,Smith-Waterman Score=175.
acttctccgtcagtcacctgctagacctggaggaagccggggacatggtggcggcacaggcggatgagaacgtgggcgaggctggccgcagcctgcatggagtcgccgggactcaccagcggcacggctaccccgcagcaggacaatgaccagctgaactcagaagaaaaaaagaagagaaagcagcgaaggaataggacaaccttcaatagcagccagctgcaggcttatggagcgtgtctttgagcggacacactaaaccccttcttctttgtttttcctctctttccttatgccttcttgcctcctaacaatcctccaggtgtggtttcagaaccgaagagccaagttccgcaggaatgagagagccatgctagccaataaaaacgcttccctcctcaaatcctactcaggagacgtgactgctgtggagcagcccacagacttgcagctttgtgaaactaatgcctgttattctccctgctctctcctttgtccctacagcgccatggctacttattctgccacatgtgcccaacaatagccctgcacagggcatcaacatggccaacagcattgccaacctgagactgaaggccaaggaatatagtttacagaggaaccaggtgccaacagtcaactgagtgaaaaaaaataattaaacaggccctaaggaagaaatcaaaaaccataagacacctatcctgctctgttatttcttcatctgctggggggaaaaagtaaattacaaacaaacaaacaaagcagaactaaaatattgggaccatggcagagaaaagcaggagaggagcaaaatgaaaattagttaacaaatgttccgtcgctcctctgggataccacc

SEQ ID NO: 8162 - DNA, 1903 bp, Homo sapiens
  SIMILAR (102)..(470): 981254mologous to Homo sapiens F-box protein FBX30,accession number AY007380,Smith-Waterman Score=670.
aacgggtcgacgatttcgtggcggtgcagcttgggcggcctatcggatcgtgcttcggcggccgagcgcagctacaggagggtgtccagaagccacaagccatggctgtggggaacatcaacgagctgcccgagaacatcctgctggagctgttcacgcacgtgcccgcccgccagctgctgctgaactgccgcctggtctgcagcctctggcgggacctcatcgacctcgtgaccctctggaaacgcaagtgcctgcgagagggcttcatcactgaggactgggaccagcccgtggccaactggaagatcttctacttcttacggagcctgcacaggaacctcctgcacaacccgtgcgctgaagaggggttcgagttctggagcctggatgtgaatggaggcgatgagtggaaggtggaggatctctctcgagaccagaggaaggaattccccaatgaccaggtcaagaaatacttcgttacttcatattacacctgcctcaagtcccaggtggtggacctcaaggccgaagggtattgggaggagctgatggataccacacggccggacatcgaggtcaaggactggttcgcagccaggccagattgcgggtccaagtaccagctgtgcggtcatctttctgtatgccgcgcagggccctcatgggaccttccagccagacccggcgaccatccagcagaagagcgatgccaagtggagggaggtctcccacacattctccaactacccgcccggcgtccgctacatctggtttcagcacggcggcgtggacactcattactgggccggctggtacggcccgagggtcaccaacagcagcatcaccatcgggcccccgctgccctgacaccccctgagcccccatctgctgaaccctgactggtaaacaactgctgtcagaaaagggctgggcttgggaaggggaggtggaggccaggtgtccccagacctctaacccttgcccctagcaagctcttcttttgtggagcctctcagtgtgggcagccctcgcatgctggggtcgggccagctctccccgaaaggtcttgacctgaatgatggccggggaagcctgcgtgtgcccctttcagagacggagcacctgagatgtgggaggtgcagcatgttcccctgggcccctcaaaaagtcgagcttggaggccagcctggatctgtctctcccttcccctcctgggaccattctacctgtgttctttgaccctcggagcagggacaggcaagacaactggcaagcttgcagctgccctgatggtgcaggtgcagggaggtgaccatgtaactctgaccaatctgggaagtggagggtgggctcatgggccgtgctctgcccctgtctgctgctcccagtctctcgctctgcctgcctgctcagaagaggtggctttggcccagaggctcaggccgggactgagatggacagacccagggtggggtggggtcccaggtcgggtgtggactgtcctcactgtcaatggagcccccagaaagctaagatgggtacccaggtggggttaaggttccccagaggactgagggaatcctgtacaggatgtcccagggtagatggggagcaggattgggacctgctctgacagctggacacatgagccctggatgagtatggtaagggggtttgaagaatcccctgtccacctcccaaatccaggcccggccccctctggcttggagagcattccaagcccccaccccacccctagaactgccattcccaagacctctgtctccccagcccaacccacccttggaacttgcctcttgtccttgctggaaggttaccagtgttctcctgacttcgcccttactgcatgcagccaaataaaaggtgtgcccagtgtatt

SEQ ID NO: 8163 - DNA, 453 bp, Homo sapiens
  SIMILAR (57)..(452): 841254mologous to Homo sapiens unnamed protein product,accession number AK001559,Smith-Waterman Score=594.
  misc_feature (1)...(453): n = a,t,c or g
nnnnnnnnnnnnnnnnnnnnnnnnnnnnntccaaactgtgtagacatagtctaaaatgtttggagtgtaatgaagtcttccaggacgagacatcactggctacacatttccagcaggctgcagatacgagtggacaacaaatgaagaaacacccctgccgccagtgtgacaagtctttcagctcgtcccacagcctgtgccggcacaaccggatcaagcacaaaggcatcaggaaagtgtacgcctgctcgcactgcccagactccagacgtacctttaccaaacgtttgatgctggagaagcacgtccagctgatgcatggcatcaaggaccctgacctgaaagaaatgacagatgccaccaatgaggaggaaacagaaataaaagaagacactaaggtccccagtcccaagcggaagttggaagaaccagttctggagttcaggcctcccc

SEQ ID NO: 8164 - DNA, 3066 bp, Homo sapiens; identical to SEQ ID NO: 3612
  SIMILAR (1504)..(2685): 871254mologous to Homo sapiens KIAA1629 protein,accession number AB046849,Smith-Waterman Score=1892.

SEQ ID NO: 8165 - DNA, 1191 bp, Homo sapiens
  SIMILAR (46)..(1188): 621254mologous to Homo sapiens KIAA1629 protein,accession number AB046849,Smith-Waterman Score=1176.
atgcccctagatgaagacccctccaagctgtgtagacataatctaaaatgtttggagtgtaatgaaatcttccaggacaagacatcgctggctacacatttccagcaggctgcagatatgagtggacaaaagacttgtactatctgccagatgctgcttcctaaccagtgcagagaatccatcagcacaaatctccttaaacctgccctgagtgcagggccatctgcaggttctcactgtgaagtcttctacaagtgtcctatttgtccaatgacgtttaagtctgccccaagcacacattcccacacctacacacagcatcctagcatcaagataggagaatcaaaaataatatataagtgttccatgtgcaacactgtgttcaccctgcaaaccttgctgtatcgccactttgaccaacacattgaaaaccagaagagagatgtgtacatatcccacgtcaggaaggagcatgggaaacaaatgaagaaacaaccctgctgccagcgtgacaagcctttcagctcgtcccacagcctgtgctggcacaaccggatcaagcacaaagtcatcaggaaagtgtacacctgttcacactgctcagactctagaggtacctttaccaaacagttgatgttggagaagcatgtccagctgacgcatggcatcaaggaccctgacctgaaagaaatgatagacgccatcaatgaggaggaaacagaaataaaagaagaccccaaggtccccagtcccaagtggaagttgaaagaaccggttctggagttcaggcctcccagaggagcaatcactcaaccaaagctggaaatcaatgtttttaaggttcacaagtgtgccgtgtgtggcttcaccaccgaaaacctgctgcagttccacgaacacatccctcagcacaaatcggatggttctttctaccagtgccgggagcacctctttgttgcacacaagttaaaggaacctcagccagtgtccaagcaaaacggggctggggaagataaccaacaggagaacaaacccagtcacgaggatgaatctcccaatggcgccatgtcagacagaaagtgcaaagtgtgcgcaaaaacttttgaaactgaagctgccttaaaaactcacatgcagacacatggtatggccttcatcaaatccaaaaggatgagctcagacgagaaatag

SEQ ID NO: 8166 - DNA, 3342 bp, Homo sapiens; identical to SEQ ID NO: 3545
  SIMILAR (1786)..(2649): 541254mologous to Homo sapiens unnamed protein product,accession number AK001559,Smith-Waterman Score=754.

SEQ ID NO: 8167 - DNA, 438 bp, Homo sapiens
  SIMILAR (229)..(438): 921254mologous to Homo sapiens KIAA1629 protein,accession number AB046849,Smith-Waterman Score=370.
atgcccctagatgaagacccctccaagctgtgtagacataatctaaaatgtttggagtgtaatgaaatcttccaggacaagacatcgctggctacacatttccagcaggctgcagatatgagtggacaaaagacttgtactatctgccagatgctgcttcctaaccagtgcagagaatccatcagcacaaatctccttaaacctgccctgagtgcagggccatctgcaggttctcactgtgaagtcttctacaagtgtcctatttgtccaatgacgtttaagtctgccccaagcacacattcccacacctacacacagcatcctagcatcaagataggagaatcaaaaataatatataagtgttccatgtgcaacactgtgttcaccctgcaaaccttgctgtatcgccactttgaccaacacattgaaaaccagaag

SEQ ID NO: 8168 - DNA, 530 bp, Homo sapiens
  SIMILAR (2)..(253): 861254mologous to Homo sapiens unnamed protein product,accession number AK001559,Smith-Waterman Score=383.
cctgtgccagcacaaccggatcaagcacaaaggcatcaggaaagtgtatgcctgctcgcactgcccagactccagacgtacctttaccaaacgattgatgctagagaagcacgtccagctgatgcacagcctcaaggaccctgacctgaaagaaatgacagatgccaccaatgaggaggaaacagaaataaaagaagacaccaagttccccagtcccaagcacctcttcattgtacacaagttaaaggaacctcagccagtgtccaagcaaaatggagctggggaagataaccaacaggagaacaaacccagccatgaggatgaatcccccaatggcaccgtgtcagacagaaagtgcaaagtagacactgatgaagctgcttttgagccagattataatgaaagtgacagtggaagttatgtatctgtaaaagatgaggaaacttcaggaaacacttctaaggtcctgaaagataagataatggagaaagcaggagaaagcaaaagaaagcctggacacagttggccag

SEQ ID NO: 8169 - DNA, 2682 bp, Homo sapiens
  SIMILAR (927)..(1022): 811254mologous to Mus musculus Pro-Pol-dUTPase polyprotein,accession number Y12713,Smith-Waterman Score=134.
atgaggctccctgctcagctcctggggctgctaatgctctgggtctctggatccagtggggacattgtgatgacccagactccactctccctgcctgtcactcctggagagccagcctccatctcctgcagatctagtgagagcctcttggatactgatgatgaatacacctatttgaattggtacctgcagaagccaggccagtctccacagctcctgatctatgaggtttccaaccgggcctctggagttccagacagagcacagccccctgccctgaagactttttataggctggtcacacccggtgcaggagtcagccccagtcaggacacagcacggatgcaaggtcccccactcagctcctggggctcctggtgctctggttgccagatttgtgaggacagcacctgcatctttgaagagccctgtaaaggctcttctctgtatgtcagatctaatgagacagctcttgtcctatactgggcttttgtggaaactgaacatttgactatgagtcaacaagtcaccatgcgacctgaactgcctatcatgaactgggtgctttctgactcatctagccataacgtgggtcatgcacagcagcattccatcatcacatggaaatggtgtataagtgattgggctcaagcaggtcctggggggcacaaggatggaggctatgcatggattcagcaatgtggacttccactcaccaaggctgaactgtctgtggccactgctgagtgcccaatttgccagcagcagcagagactaacagtgaaccctttgtatggcatcattccctggggtgatcgaccagctacccagtggcaggttgattatattggacctcttccaccatggaaaggagagaggtttgtcctcattggaacaggcacttactcaggatatgggtttgcctacctgcatgcaatgcttctgccaagactaccatttatggactcaaggaatgccttatccactatcacggtattccacacagcattacctctgaccaagcactcactttacagccaggattcacagatccaggattcaaggggtggatgtgaaagtggaaccactcactatgatgcactagcaaaatgtttgctttctgttcccacgacattaggttctgctttactagtcatcttagctccagagggaagaacgctgctaccaggagacacaataatgattccattaaactggaagttaagatggccacttggacgctttggggtcctcctacctttaagtcaacaagctaagaatggagttacagtgttggcggcagtgattgacccagactatcaagatgaagtcagtccgttactccacaacggaagtgaggaagagtatgcatggaatataggagatccattagggtgtctcttggtattatcatgcactctgattaaggtcatttatttcccctgggttgcctacactcgcttcttcccactcccctatgaaggacaatataagcctctggacctcactaggcagacagtaatccagataaataagtgcaagggcaaattgggggaaaaattggaatggagagctcagaatctggccccagagaagggcagagggaaaggggacccagttcagaatctcgacacaagaatcagggagcgcaccctgatggtaacatttttttcaggggcctattttggggatcctggtgagaacctgagtccgtcactgaccacggcagcccagcatgctccccagaacactggggcacagaaacactggcccactgaaggggcagctaaggaacacagtgtaagtggtgactcagagcactttgaaagctggagggcagcacagttgtttgaatcagtggatgcagaacccatgaatatggagagtcaattgcatttcattatgcccaaagctctcagaactaaaaaggcggcttcagactcctccaaagaacaagtggccaattcgagggaatcctccccgtcaccaaaagaagtaaacgacagtccgagagccgccaccaagtctcctgaatcccagaatctcatcgatgggacaaaaaaaccatccctaaagcaaccagacagtcccagaaacatctcaagtgacaacagcagcaagggaaccccgtcctctcctgcaggatccacaacagcaatccccaaagtccgcataaaaaccattaagacatcttctggggaaatcaagagaacagagaccagggtattgccagaagtggatcttgactctgggaagaaaccttccgagcagatggtgtctgtgatggcctctgtgacatcccttctgtcatctccagcatcagccgctgccctttcctctccccccagggtgcctctccagtctgcagtggtgaccaatgcagttttccctgcagagcccacccctaaacaggtcacaatcaagcctgtggctactgctttcctcccagtgtctgctgtgaagacagcaggatcccaagtcattaatttgaagcttgctaacaacaccacggtgaaagccacggtcatacctgctgcctctgtccagagtgccagcggcatcatcattaaagctgccaatgctatacaggagcaagctgtcatgatgccagcatccagcctggccaatgccaaacttgtgccaaagactgtgcaccttgccaaccttaaccttctggcttag

SEQ ID NO: 8170 - DNA, 1212 bp, Homo sapiens
  SIMILAR (7)..(960): 331254mologous to Homo sapiens similarto human ZFY protein,accession number D86966,Smith-Waterman Score=422.
gctgcagatacacgtggacaaaagacttgcactatctgccagatgctgcttcctaaccagtgcagttacgcatcacaccagagaatccatcagcacaaatctctctacacctgccctgagtgcggggccatctgcaggtcggtgcacttccagacccatgtcaccaagaactgtctgcactacatgaggagagttggttttcgatgtgtgcattgcaatgttgtatactctgatgtggctgccctgcagtctcacattcaaggttctcactgtgaagtcttctacaagtgtcctatttgtccaatggcatcaaatcagaacaaagaggacaccaaatccatgaatgggaaagagaaattggaaaagaaatctccatctcctgtgaaaaaatcagtggaaaccaagaaagtggccagtcctgggtggacgtgttgggagtgtgaccgcctgttcattcagagagatgtgtacatatcccacgtgaggaaggagcaagggaagcaaatgaagaaacaaccctgctgccagcgtgacaagcctttcagctcgtcccacagcctgtgctggcacaaccggatcaagcacaaagtcatcaggaaagtgtacacctgttcacactgctcagactctagaggtacctttaccaaacagttgatgttggagaagcatgtccagctgacgcatggcatcaaggaccctgacctgaaagaaatgatagacgccatcaatgaggaggaaacagaaataaaagaagaccccaaggtccccagtcccaagtggaagttgaaagaaccggttctggagttcaggcctcccagaggagcaatcactcaaccaaagctggaaatcaatgtttttaaggttcacaagtgtgccgtgtgtggcttcaccaccgaaaacctgctgcagttccacgaacacatccctcagcacaaatcggatggttctttctaccagtgccgggagcacctctttgttgcacacaagttaaaggaacctcagccagtgtccaagcaaaacggggctggggaagataaccaacaggagaacaaacccagtcacgaggatgaatctcccaatggcgccatgtcagacagaaagtgcaaagtgtgcgcaaaaacttttgaaactgaagctgccttaaaaactcacatgcagacacatggtatggccttcatcaaatccaaaaggatgagctcagacgagaaatag

SEQ ID NO: 8171 - DNA, 420 bp, Homo sapiens
  SIMILAR (108)..(4): 821254mologous to Homo sapiens putative p150,accession number U93574,Smith-Waterman Score=144.
tcaattcccatctatgagtgagaacatgcggtgtttggttttttgtccttgtgatagtttgctaagaatgatggtttccagcttcatccatgtcccgagccgcttcatggtcccaaaccaggacccaaagtgctgcttgggcttaaggttgtaattatttgcagccaactggagcagcggacctccttgcttactttgaattcctgggtccagagggaaaaactgggtggtgacagggactggacagggatgccacaggggccccgccgagtccgacggcccggcaggggtgggcaaggcactgggaacagccgccagcttgatacctagttttattcctttgtagtcaaagaagatggccagggagacagcagcgtggtcagagtggtaggagctggccatcggtgagagctgctccat

SEQ ID NO: 8172 - DNA, 2235 bp, Homo sapiens
  SIMILAR (769)..(1077): 601254mologous to Homo sapiens PINCH protein,accession number U09284,Smith-Waterman Score=279.
atgatcatcaacaccatcatcaccaccaccaccaccatcaccattatcttcatcatcaccatcatgtcatcatcaccaatcaccatcaccaatatcatcaccatcatccaacatcatcaccaccacaatgaccgaacggctatccccttcccccaaggtggagctgacagccactgcctgtgccttgttgtctgcctggcaggccagcactccatggctgggagcaacctgcagtgccccctgggcttttactgctggaatggagtgatggctttgtggctgggccccaacagcacctgcagtcggctcccagaactcacagacagcgaggactgccagccagcagactccccaggggatgaggaccccaagccctggtgggacccaccccatgaggcccccctcacaggctacttccacccatatggtgctgcctttgtgccacgccatgccggaaacttcaaggacaggagagaggtgccccaccaggacaccagcttctgctcagcaggtcagttctggattctgccttctgcttgcaagacaggaagagtggccttgactctgaccttgctgattggtgcttatcaaacgctaacagaagctgatgttaagggactgacagcagcccgggcagcgagtccaggggcgaagtggaggacacagttcccctgcccagcaggcacctgcagctcccaggcaggcaacggccagctcgaggactgtctgccctaccccccggggccttctgccccagtggggtccctgagccggagctctgccaacggcacgaagtacgccacccagttcccctgccctcggagctactacgacccagacccactgacccagagcctggacagctgcctgccctgtcccccaggccactgctgcggtattaagctgggtgtctttctcacagacaggaaggatctgactgccgatgcacaggagctgaaaggggagctatactgcctgccatgccatgataaaatgggggtccccatctgtggcgcttgccgacggcccatcgaagggcgtgtggtgaacgccatgggcaagcagtggcatgtggaggtgctgtggctgaggtcccttgtaggcccggctcctactgtgggcctcagacggggctgcccccactctgccccggggggctatgcctgccctgtcagctcctccacctacagtggcctggggcagcgctgtgtctttccccattactgccccccgggcagtgcccaacctcgtgcctgccctgggggctccgaagccctgaatgggaccagcctcaggtctctgaggagatatgctgcctgccgcctctgtgaagcgggcacctaccgcagccgggccctggatgctctacccttacagccctgcccgcctggattcagctgcccccaggctctcagcactaaaaaggtggcatcagactcctccaaagaacaagtggccaattcgagggaatcctcctcgttatcaaaagaagtaaacgacagtccgagagccgccgacaagtctcctgaatcccagaatctcatcgacgggaccaaaaaaacatccctaaagcaactggatagtcccagaaacatctcaagtgagaacagcatcaaaggaaccccggcttctcccgcagggtccacaccaccaatccccaaagtccgcataaaaaccactaagacgtcttctggggaaatcaagagaacagtgaccagggtattgccagaagtggatcttgactctgggaagaaaccttccgagcagacggtgtctgtgatggcctctgtgacatcccttctgtcgtctcccgcatcagctgccaccctttcctctcccgccagggtgcctctccagtctgcagtggtgaccaatgcagtttcctctgcagagcccacccctaaacaggtcacaatcaagcctgtggctactgctttcctcccagtgtctgctgtgaagacagcaggatcccaagtcattaatttgaagctcgctaacaacaccacggtgaaagccacggtcgtacctgctgcctctgtccagagtgccagcagcaccatcattaaagctggccaatgccatccagcagcaaactgtcatgatgccagcatccagcctggccaatgccaaacttgtgccaaagactgcatcttgccaaccttaaccttctgcctcaggttgccccagccacctctgaactctgcccagtgtcaatcaaaactcaaccacagataa

SEQ ID NO: 8173 - DNA, 3769 bp, Homo sapiens
  SIMILAR (628)..(2445): 671254mologous to Homo sapiens KIAA1629 protein,accession number AB046849,Smith-Waterman Score=1880.
atgatcatcaacaccatcatcaccaccaccaccaccatcaccattatcttcatcatcaccatcatgtcatcatcaccaatcaccatcaccaatatcatcaccatcatccaacatcatcaccaccacaatgaccagcggccatctctgggcaaatgcaggggcctctacattcgagtccggaaggtccctggggagcgggccacagcaaacagcaggtgcccaataaatgcccagggcattgaaagctgctggaatggagtgatggctttgtggctgggccccaacagcacctgcagtcggctcccagaactcacagacagcgaggactgccagatttatggggatacagagagaaagaggagacactccaggaagacgtgcaggtgggagtaccaggttgaaaccaaggacaccttcctggaggagctgctgtttgagccagctctgagaacaggaattcaaagtaagcaaggaggtccgctgctccagttggctgcaaataattacaaccttgagcccaagcagcactttgggtcctggtttgggacgatgaagcagctcggtgagactgagagtatcttctcctttgcttatgaagtttgtttgactgtatatgaaatttttgggctccccggcattgcgccatcaaaaacaaagtcgttctccaacttcttgtcctgcatcactgccatcgcagctctcagcactaaaaaggtggcatcagactcctccaaagaacaagtggccaattcgagggaatcctcctcgttatcaaaagaagtaaacgacagtccgagagccgccgacaagtctcctgaatcccagaatctcatcgacgggaccaaaaaaacatccctaaagcaactggatagtcccagaaacatctcaagtgagaacagcatcaaaggaaccccggcttctcccgcagggtccacaccaccaatccccaaagtccgcataaaaaccactaagacgtcttctggggaaatcaagagaacagtgaccagggtattgccagaagtggatcttgactctgggaagaaaccttccgagcagacggtgtctgtgatggcctctgtgacatcccttctgtcgtctcccgcatcagctgccaccctttcctctcccgccagggtgcctctccagtctgcagtggtgaccaatgcagtttcctctgcagagcccacccctaaacaggtcacaatcaagcctgtggctactgctttcctcccagtgtctgctgtgaagacagcaggatcccaagtcattaatttgaagctcgctaacaacaccacggtgaaagccacggtcgtacctgctgcctctgtccagagtgccagcagcaccatcattaaagctgccaatgccatccagcagcaaactgtcatgatgccagcatccagcctggccaatgccaaacttgtgccaaagactgtgcaccttgccaaccttaaccttttgcctcagggtgcccaggccacctctgaactccgccaagtgctaaccaaagctcagcaacaaataaagcaggcaataatcaatgcagcagcctcgcaaccccccaaaaaggtgtctcgagtccaggtggtgtcgtccttgcagagttctgtggtggaagctttcaacaaggtgctgagcagtgtcaatccagtccctgtttacattccaaacctgagtcctcccaccaatgcagggatcacgttaccaacgcgtgggtacaagtgcttggagtgtggggactcctttgcagttgaaaagagtctgacccagcactatgacagacagagcatgcgcatcgaagtaacatgcaaccatggtacaaagaacctcattttttacaacaaatgcagcctcctttcccatgcccgtgggcataaggagaaaggggtggctgcagatacacgtggacaaaagacttgcactatctgccagatgctgcttcctaaccagtgcagttacgcatcacaccagagaatccatcagcacaaatctctctacacctgccctgagtgcggggccatctgcaggtcggtgcacttccagacccatgtcaccaagaactgtctgcactacatgaggagagttggttttcgatgtggtgcatttgcaatggttgtgtactctgatgtggctgccctgcagtctcacattcaaggttctcactgtgaagtcttctacaagtgtcctatttgtccaatggcatgtaagtccgccccaagcacacattcccacacctacacacagcatcctggcatcaagataggagaaccagaaataatatataagtgttccatgtgcgacactgtgttcaccctgcaaaccttgctgtatcgccactttgaccaacacattgaaaaccagaagttgtctgttttcaagtgtccagactgttatcttttatatgcacagaagcaacttatgatggaccatatcaagtctatgcatggaacattgaaaagtattgaagggcctccaaacttgggtataaacttgcctttgagcattaagcctgcaactcaaaattcagcaaatcagaacaaagaggacaccaaatccatgaatgggaaagagaaattggaaaagaaatctccatctcctgtgaaaaaatcagtggaaaccaagaaagtggccagtcctgggtggacgtgttgggagtgtgaccgcctgttcattcagagagatgtgtacatatcccacgtgaggaaggagcaagggaagcaaatgaagaaacatccctgccgccacctgtgccagcacaaccggatcaagcacaaaggcatcaggaaagtgtatgcctgctcgcactgcccagactccagacgtacctttaccaaacgattgatgctagagaagcacgtccagctgatgcacagcctcaaggaccctgacctgaaagaaatgacagatgccaccaatgaggaggaaacagaaataaaagaagacaccaagttccccagtcccaagtggaagttggaagaaccagttctcaagagtgccatgtgtggcttcaccaccgaaaacctgcttcagttccacgaacacatccctcagcacaaatctgatagttcttcctaccagtgccaggagtgtggcctctggtacacgtctcacgtctctctgtccaggcacctcttcattgtacacaagttaaaggaacctcagccagtgtccaagcaaaatggagctggggaagataaccaacaggagaacaaacccagccatgaggatgaatcccccaatggcaccgtgtcagacagaaagtgcaaagtgtgcgtgaaaacttttgaaactgaagctgccttaaatactcacatgcggatacatggcatggccttcatcaaatccaaaaggatgagctcagccaagaaatagccacagatgctccatgattaaaatccctgtccacattggaataaaaaagacatttttgttacaaagtttgcagtatgctgagagttacacagtactgtctagggctgttgcaatattattcttcttttcaatgttaccttccttcacctcgtcgtatatatcctcgataagtattaaaacagtatttgagtttaaaagagtttgtatatatttaaatgaataactttttatactctttgttacatgtttgtatcagtatttagtggaaaaccatttgagttgttttgggttagaatttttctttttgtactgtttctttaaaacagagttcttagtaacaggggcagttcctgaattcaaataaaccattttgtatgtttggaaaaaaaaaaaaaaa

SEQ ID NO: 8174 - DNA, 438 bp, Homo sapiens
  SIMILAR (139)..(426): 321254mologous to Mus musculus N-copine,accession number AB008893,Smith-Waterman Score=122.
atggggagctccagactggcagccctgctcctgcctctcctcctcatagtcatcgacctctctgactctgctgggattggctttcgccacctgccccactggaacacccgctgtcctctggcctcccacacggaagttctgcctatatcccttgccgcacctggtgggccctcttctccacaaagccttggtgtgtgcgagtctggcactgttcccgctgtttgtgccagcatctgctgtcaggtggctcagttcgtcccattccgagactatgttgaccggtcggggaaccaggtgttgagcatggcccgactggccaaggatgtgctggccgagatcccggagcagctgctgtcctatatgcgcaccagagacatccagcctcggcccccaccccctgccaaccccagcccgatcccagctccagagcagccctga

SEQ ID NO: 8175 - DNA, 597 bp, Homo sapiens
  SIMILAR (10)..(348): 971254mologous to Homo sapiens Arp2/3 complex 20 kDa subunit,accession number AF019888,Smith-Waterman Score=542.
atgcattcactgactgccactctccgcccctacctgagtgccgtgcgggccacattgcaggctgccctctgcctggagaacttctcctcccaggttgtggaacgacacaacaagccggaagtggaagtcaggagtagcaaagagctcctgttacaacctgtgaccatcagcaggaatgagaaggaaaaggttctgattgagggctccatcaactctgtccgggtcagcattgctgtgaaacaggctgatgagatcgagaagattttgtgccacaagttcatgcgcttcatgatgatgcgagcagagaacttctttatccttcgaaggaagcctgtggaggtccacgatcacgtcgcgcccgccgcccagcgctgcccgtatcagttcagccagcgctcccaccaggcgccgctgcgcctccgagtccgccgcgtgcaggaggagcactggccgcgctgggcccgggcctggtggcgggaagcaacagatgaaggctgggcggctgagggactgctcagccctcttctccccaccctctcgggataccaactcaccatccggacacaagaggtgcttccaggcaaactggacatctga

SEQ ID NO: 8176 - DNA, 1062 bp, Homo sapiens
  SIMILAR (286)..(687): 941254mologous to Homo sapiens ADA3-like protein,accession number AF069733,Smith-Waterman Score=620.
atgctggcaaaggaggaggtgagccggcaggagctgaggcagcgggtgcgcatggctgacaacgaggtcatggacgcctttcgcaagatcatggctgcccggcagaagaagcggactcccaccaagaaagaaaaggaccaggcctggaagactctgaaggagcgtgagagcatcctgaagctgctggatgggaagttctgcctatatcccttgccgcacctggtgggccctcttctccacaaagccttggtgtgtgcgagtctggcactgttcccgctgtttgtgccagcatctgctgtcaggtggctcagtgtgccgcatactaagtccctggagagccgcatcaaggaggagctaattgcccagggccttttggagtctgaggaccgccccgcagaggactccgaggatgaggtccttgctgagcttcgcaaacggcaggctgagctgaaggcacttagtgcccacaaccgcaccaagaagcacgacctgctgaggctggcaaaggaggaggtgagccggcaggagctgaggcagcgggtgcgcatggctgacaacgaggtcatggacgcctttcgcaagatcatggctgcccggcagaagaagcggactcccaccaagaaagaaaaggaccaggcctggaagactctgaaggagcgtgagagcatcctgaagctgctggatggagttccaaatgccttacagctgactttcagcaacaccagggatccccgcagcggcgccgaccttcgcccggtcagcggccccgacccccgctccgcgcccctgctcgccctgctccacgctgccccgcgcccgctgctgctgctcgcttacttcagtcgcctctgcgccaagggcgacatccccccgccgctgcgcgccctgccgcgctaccgcctgctgcgcgacctgccgcgtctgctgcgggcgctggacgcgcggcctttcgcagaggccaccagctggggccgccttggggcgcggcagcgcaggcagagccgcctagagctgtgcagccggctcgaacgagaggccgcccgacttgcagacctaggttga

SEQ ID NO: 8177 - DNA, 2141 bp, Homo sapiens
  SIMILAR (90)..(464): 351254mologous to Human herpesvirus 6 H87,accession number U92288,Smith-Waterman Score=104.
  misc_feature (1)...(2141): n = a,t,c or g
ggtggagctctgctcaacctaggtctgcaagtcgggcggcctctcgttcgagccggctgcacagctctaggcggctctgcctgcgctgccgcgccccaaggcggccccagctggtggcctctgcgaaaggccgcgcgtccagcgcccgcagcagacgcggcaggtcgcgcagcaggcggtagcgcggcagggcgcgcagcggcggggggatgtcgcccttggcgcagaggcgactgaagtaagcgagcagcagcagcgggcgcggggcagcgtggagcagggcgagcaggggcgcggcgcgggggtcggggccgctgaccgggcgaaggtcggcgccgctccacagcagcagcacagtgccctgctccccgcgctacgcgcgtncgggcccgcccagagccacggcagcgggcccacgcgcgccacgtgcctcccctcccacaggtccacgatcacgtcgcgcccgccgcccagcgctgcccgtagcagttcagccagcgctcccaccaggcgccgctgcgcctccgagtccgccgcgtgcaggaggagcactggccgcgctgggcccgggcctgactgtgggcgccggcaggtgagggcccagaacaaacacccagtagggtgagggagggccagcagtgcccaggatcaagagcccccaggtgtctgtaagagacatctggacacaagaggtgcttccaggcaaactggacatctgaccgccacacctggctgacagtgtacacggggggcaccaaagtgtcctgccccaagcctgggaggctccaggcagcactgaaggtggcatgcattcttgaggagaagtgaagaatcagctgctgggcttgggtatccatgcttacattccaggatgtgagagacccagtctggtgggggcattcaacatggctgctgtttccaaaagagaaccatggttgtaccttgaagcagagctgggggtgcaggtccaccttctccaaaacataccacccatctgactctcgagctgtggcattcgggaggtctttgcaaagggtatgccagtcgtgcctctggcagagggcagcttccagcttcagtgggcagcggagtgtcagggccatgaccatctgagtgtgctggctgtagtcagtgaagtgcactgacttccagaagtccgagccataggcttctggccagctctggaagggacattttttgcgcctcacagtgtcctcttgcaggtaggatgcctctatgcacagacagggcagaaggaattcataaggcagctctacagtgtggcccccagacacaattttctggacatcatagggactgctcagctcttcacactccagtgcccactggtgacaaagacgcacgctgacctcagggcctgaagatatggtcacccgaatagcccgggcctcaggcagcaaatcaaaggagaactcgggtccaccactcagctgaacccatctcctgttgtacccagtgcccacctccatgcctttgtgagtccaatctgggaagactttcccatgtctctggatccgaaggttgggtccttttagagcgaagtcccttgtgggagatgtctggggaggggatggaaatgtgatggctcttctcagacaggtgacgacgaggcagcagcttcctctgagcaggtgctggcatcttgtgtctcctatagaacttgaatgtggaagactttttggatttctgcaccaggaggtggaagaggccccgttgaagacctgagccacctgacagcagatgctggcacaaacagcgggaacagtgccagactcgcacacaccaaggctttgtggagaagagggcccaccaggtgcggcaagggatataggcagaacttccgtgtgggaggccagaggacagcgggtgttccagtggggcaggtggcgaaagccaatcccagcagagtcagagaggtcgatgactatgaggaggagaggcaggagcagggctgccagtctggagctccccatgggcttctgtgcaattagggctcccggaacatggctgcatggcctgaaggtgggtggcagggccttgctgtgcagcagcgaacacagtaccagcaggagccctcgccccagcctgccctggccccacgaaatcgtcgacccgggaat

SEQ ID NO: 8178 - DNA, 3164 bp, Homo sapiens
  SIMILAR (2727)..(2080): 991254mologous to Homo sapiens hypothetical protein,accession number AL096739,Smith-Waterman Score=1199.
tttttttttttttttttcaagtttagggatttgctctatatttgcatttttctttttaaaaggcacagtttttattttaacgacgctgcattgctctttgatgatgaatctcaattcgactcctcaaactgtcaacactcttgttatcctagattctagaaggggcctcatcttttgacttctttctatagagggccacttctaaagctacagcactcatttggaaaaggacactgggatcaacacgtaagcgttgcaagcacaggggccgcctctcttgcagacaggtggccaaagcagggcttgtgctgggccagaagtggaagtaattcctcgccagctacacattcagtctgactggtggatgattgggagtgtttgtccctccctcccccaataattgatggccttgagatctgccagcatctcaaaggcagattcgtggctctgttcccagacttaggtctcagttatttaattggtaaatgacacaatcaagagactcaacactaattggaatgctgatttcaagtatttcctgggctagctggtggaagccatagattgtggaatgtgatttccatttctgaatcagtgggtggcaggttggttacagaaatgcttcctattagtctggaggccctctaggagtctgacatgtaattaacaaagcaaaaggtaaacatgaagggctggcatggagctgggtgtatatctggctgtgggacgtcgggttcttttctccactgcaaatgagactacagttgtgatgatggtgggaggttccaggggtgcaggtcttcaccaaggaccatgttgtaccacagcctctgctgagctgagggacacatgtccccctgctttcccaacaccaccaactttggatttcacagattgtctctaggctgggggctgccttgactgtattacacctggctggctcctttaatcacagcattctagaaatccatattggatgtggaataccagaatcctatgtagcatcctagtttgcaatccaattatagagttctttaaaaattctggagttctgtatgagaactagaaccatgatgaggtcagaggcaggcactttgcccacagttgatcctggaggcctccagactctgtgaggtgagcacctcgcagcacctctgttcctcttttgaggccagtaattgcctggggaagagagacagggaaatggaagcatggatcagggcaaatcagccagcatttctagtttggaggtctacctggccttttccgtgggctcagggccatctgaaacactgccctgtaaagctggtgctgggctgtccttgtgcctggagagtgctaaaattgacatttcaaatacccagagagcagggggagatatcccgcatgtccatagctgcaaagaaatgtctaggggggctccctcttctgactcctcacctggcagctgatcagcattcaatactgaacactcttagggccccaagtatggcctttgaccggaccaaatcacctggggttgtgacagagaacagaagctgtgcagtaactgcaatgttccccccaggacggcagaaactaaaaagccccaagaggacttctttctcttctgctgcagatgagtggcatcgatactaaaagctgccccaaacaggcaaattttacctttgtttctaaagcaccatcatgtaggagagccatctgagggctgggcaacctcgcaggactcacttttgggtggcctaggctaccttggtgttctcccacataatgttcaaggggacatagtgacaaagttgaaaaggctctgttgcttttccgtgatgtcagcagggattaaagcagtctctgctccctgtggggcctcttgtgggatatgctcttcaccctacccccacaactcaggggctcaaggaccaggcagaccccagcccctgaatcaagagccctcttcaccctgaaccatttggccagcaccttttacacctagtgcccacaggggccctgcctcccttgaaagaggaagtctgcagtgagtgccagaccctggggggcctgccaaggggacatgagggctcagttcctattgaatttttccaagactgttgagttggtgtgttcaaacagccactgctgggtgagagaggatgggttgcaggtgttcatgaagatcctatggtcactttcactgcagtccatgcagctgccactgacagggtggtacagggtcttgtctttgcggtatttccacagctggttgcccttcatgctgtggcagtcgtacagcgtgacagggctggtgtgggaaatggcatcaaagcagaacttcttggtgtgctgggggtctccaggccggatgtcctctctccaggtgaaggtgaatacctgcatgttgttccaggcagcctccccacggcctcggacgcagccctctagccttagtggggagcccaaggccccgtgctttgtgtctgcacacagccctgtgcccacatttcggatctccccccaagctgcagccgggggctccacgggtgggtagaatttgggcaggtcccaggctatcttcgtcataaaccacttgaaactcttgcagttaagggagctgcggagctttttctggactgcgacatccccagcggagaggtggcggtattcaggccggcgctggtaaatgtactctgcgtactcatccatccacacttcggccacccgcttaaggttcttacccgggccaggctgactccggccgggaccttgtagggcacatacttcctgtagatatggcccaccctggagcaggggatgtcctccatgcggcccccacacatccacacctgcatggcaagaaggaagagagaggatgacgtttctgcttccagttcaccatcccgccaggccagcatcccttagcgcactcagcaaaagcatcagcctggattgtctgctgaagcctggatcacagacctaatgacatgggaaaacacagtaatataataacagcggtaaaaacagctgacagcactgagtgcttaccattgccacacactatgctaagatggtcacatgcacaaccacacttaagcctcatcagaaaacctataaagtaggtagtaacattttacagatgctgaaatggaggctcagagaagctaagaaatgtg

SEQ ID NO: 8179 - DNA, 387 bp, Homo sapiens
  SIMILAR (287)..(325): 921254mologous to Homo sapiens unnamed protein product,accession number AK021777,Smith-Waterman Score=65.
ctatctccagctaggttcatgagctggccctactggtctctcctttccccttttcctcttatcccattgcattagtctggattcttgcttacagataaccaaaaccttagtcaatctgatttaagcaaaaaccagaattgataggctcacataactgaaattccagggtagaccctaaggccgggctggatgcagggactcagtcatctcactcgggctaggtctctctcaatgcctagtccctatttcatctgagttggcttccctctcaggtgggctttttctcatggagatcctcagcagcccatggaaggagagtgtttttcccatcatcttgtacaagtccccaggttgagtctcattggcctgctggccccatgcccatcc

SEQ ID NO: 8180 - DNA, 1008 bp, Homo sapiens
  SIMILAR (484)..(1005): 841254mologous to Homo sapiens hypothetical protein,accession number AL096739,Smith-Waterman Score=804.
atggcagctggctcctccaaagccagcggtcccacagagaaaggtggaagccacggcatctttatgaccgtcatttctgcagtatcctgtgggttacacaggaaactgagtctcagagaagttaagtaccttaatcaaagtcataaagtgtggatgtgtgggggccgcatggaggacatcccctgctccagggtgggccatatctacaggaagtatgtgccctacaaggtcccggccggagtcagcctggcccggaaccttaagcgggtggccgaagtgtggatggatgagtacgcagagtacatttaccagcgccggcctgaataccgccacctctccgctggggatgtcgcagtccagaaaaagctccgcagctcccttaactgcaagagtttcaagtggtttatgacgaagatagcctgggacctgcccaaattctacccacccgtggagcccccggctgcagcttggggggagggacagagacagtccatgacatacagcaaaggtttcatgtccttttctaggcgctttcaaggtatggtccctggaccacctgcacctgagtcacctggaatggggatccgaaatgtgggcacagggctgtgtgcagacacaaagcacggggccttgggctccccactaaggctagagggctgcgtccgaggccgtggggaggctgcctggaacaacatgcaggtattcaccttcacctggagagaggacatccggcctggagacccccagcacaccaagaagttctgctttgatgccatttcccacaccagccctgtcacgctgtacgactgccacagcatgaagggcaaccagctgtggaaataccgcaaagacaagaccctgtaccaccctgtcagtggcagctgcatggactgcagtgaaagtgaccataggatcttcatgaacacctgcaacccatcctctctcacccagcagtggctgtttgaacacaccaactcaacagtcttggaaaaattcaataggaactga

SEQ ID NO: 8181 - DNA, 1828 bp, Homo sapiens
  SIMILAR (1166)..(1213): 1001254mologous to Homo sapiens unnamed protein product,accession number AK023782,Smith-Waterman Score=92.
atgcttggtggttacaagtacagactccattcgcttccaaatcatcccgtgggcagggacagagatgaaacaagagacataaagctaaaggatgggtctatggaagagcacctgaagaagcctcttgaagactacatggcccttttccccagtgtgaggattcttcgaaccaagaaacgggaagggctgataaggacccgaatgctgggggcctcagtggcaactggggatgtcatcacattcttggattcacactgtgaagccaatgtcaactggcttccccccttgcttgaccgcattgctcggaaccgcaagaccattgtgtgcccgatgattgatgtaattgaccatgacgactttcggtacgagacacaggcaggggatgccatgcggggagcctttgactgggagatgtactacaagcggatcccgatccctccagaactgcagaaagctgaccccagcgacccatttgagtgccagcttgtgcgagataccctgggggacgctgacagtcagcagcatgacgtttctcacttagcacggtgccaggcggacttcctgttcccgtggtctcccgtgatggccggtggactgttcgccgtggatcggaagtggttcgggaactcggcgggtgggctttttctcatggagatcctcagcagccatggaaggagagtctgtttttcccatcatcttgtacaagtccccaggttgagtctcattggcctgctggccccatgcccatccctgaacaatactgcaattggtcacctgcagtcacatgccctgtgactgcaggaagagtatgtctgggctggggatggagatagaggaagtagtgggggacaaaggaccttttaggagccaggtggaagagcaagcccttctagagcccctgaactaatcaagatgtgaagcccaatccccacgacctcatcgagcagttccaacgaaaagagcacttttgcacagaatctgcatggctggggtgtcctcaaaatggcagctggctcctccaaagccagcggtcccacagagaaaggtggaaccacggcatctttatgaccgtcatttctgcagtatcctgtgggttacacggtgtggtgtgtgggggccgcatggaggacatcccctgctccaggaaccttaagcgggtggccgagtgtggatggatgagtacgcagagtacatttaccagcgccggcctgaaaccgccacctctccgctggggatgtcgcagtccagaaaaagctccgcagctcccttaactgcaagagtttcaagtggtttatgacgaagatagcctgggacctgcccaaattctacccacccgtggagcccccggctgcagcttggggggagcagaaagatatgcctctttcccagtataccagtaaaggtgcaggaatcaagtcttatcttggatcctgcacccatcactggggccatcggggaagacaaaagcaaggaaatattctcattgcacaccagtgattctcaaccctcattatacgtgagaattgctttggagatcttagaaaatactgagatccagataaacgctggcacaaaatccttcaggatatgccttgaagattcagacgtcctgcagggaaagacacaccaaattgatacagttgtcatcccaaacccttcccatgaagaaattgtggagcacgctgagccttggctctacagcgtgcaagacagacagagtgtgtgcgatacatttcaaggggcattctacatctatcatgtggatgtcataattcagtacgatgcaaaacagtaccacaacgacttgacagtctggctggggcaatga

SEQ ID NO: 8182 - DNA, 1603 bp, Homo sapiens
  SIMILAR (1185)..(1400): 841254mologous to Homo sapiens ribosomal protein L18,accession number L11566,Smith-Waterman Score=301.
ctaaaagctggacagacagaaattaatcaggctattttcaaaacagccaccatcgggcagcgtcgctcggacggtccgggcgctaacgttaatctgaggaaatttggctgacactcgccctgaacgtcgctttacgcgcattgatcgtctcccccctacgtttttaacatcaccgctgaactgaaaatgggtcgcgccatttccgctggtatcaggatcgctacgacgttgaaatcgacccggaatcagaaccatcgtcactattggttcgaaagagggcctggcgcatctgatgctggcacgctggatcatggtgacacggtgctggtgccgaatccaagttacccgaccatatttatggcgcggtgattgccggggcgcaggtacgctcagtgccgtggtggaaggtgtcgatttcttcaacgaactggagcgagccattcgtgaagtattccgaaacgcagatgtagtctcccgggttccggtaaacccacggcatggtgggactgggttttcccaaaatttggggtgcggaaactcaattggtgtgccaacagttaacgcattctcataggagaagacccgaaagcctggtcgcacagctgatggaaaaagtgatgaaggaaaaaagtcgctggagcagggcgcaatgcagccgagcttcaaatcggtgaccggaaaggcggcatcaaagtgattgatggcagtagcgtcaagtttggtcgttcgacggcgcagagccgcattgcgtgggcttgactgatcttgtgaccggaacgacggcagcagcatggccgccggttttatgcagtgggagaacgcattttcccgtggaccctgaactacgacgaaatcgacatggtgctggaagggggctgcatgttcgccacgaaggccaaaccatgatcgccaaagcaggcgactgatgtttatcccgaaaggctccagcatcgaatttggtacgacatccaggtgaaattcctgtatgtcgcctggccggctaactggcaatccttctccaattattacattggaatgactcttaactgtaacataaacaggctcatttttacctgctgttatgctattttccagttttattactagagtaccacttttccatgaaccataatgaaaattactggccgagcaggagacgccatcatgggagctgacatctgccacacaaggaccgaaaggttcggcgcaaggagcccaagagccaggatatctacctgaggctgttggtcaagttatacaggtttctggccagaagaaccaactccacattcaaccaggttgtgttgaagaggttgtttatgagtcgcaccaaccggccgcctctgtccctttcccagatgatccagaagagtgaagcttcctggccgggaaaacaagacggccgtggttgtggggaccataactgatgatgtgcgggttcaggaggtacccaaactgaaggtatgtgcactgcgcgtgaccagccgggcccgcagcctgatactcagggcagggggcaagatcctcactttcgaccagctggccctggactcccctaagggctgaggcactgtcctgctctccggtcctcgcaagggccgag

SEQ ID NO: 8183 - DNA, 781 bp, Homo sapiens
  SIMILAR (1)..(426): 1001254mologous to Cloning vector pZC320 SopA,accession number U26464,Smith-Waterman Score=721.
atgaaactcatggaaacacttaaccagtgcataaacgctggtcatgaaatgacgaaggctatcgccattgcacagtttaatgatgacagcccggaagcgaggaaaataacccggcgctggagaataggtgaagcagcggatttagttggggtttcttctcaggctatcagagatgccgagaaagcagggcgactaccgcacccggatatggaaattcgaggacgggttgagcaacgtgttggttatacaattgaacaaattaatcatatgcgtgatgtgtttggtacgcgattgcgacgtgctgaagacgtatttccaccggtgatcggggttgctgcccataaaggtggcgtttacaaaacctcagtttctgttcatcttgctcaggatctggctctgaaggggctacgtgttttgctcgtggaagaggggaggctccttgaagccttcaccaaaggcaaagctagcaccctgcttcttgggacgctattttcgggacttgacagctctgctgggcagggggcaagatcctcacttttcgaccagctggccgtggactcccgcaagggctgcatcaccgtcctgctctccggtcctctcaagggccgaaaggtgtacgggcattttggcaaggccccgggaaccccgcacagccacacgcaaaccctacgtccactccaagggccggaagttcgagcgcgccagaggctgacgggccagctgaggctacaaaaactaaccctggatcctactctcttattaaaaagatttttgctgacaa

SEQ ID NO: 8184 - DNA, 363 bp, Homo sapiens
  SIMILAR (7)..(270): 401254mologous to Sus scrofa type II collagen alpha1,accession number AF201724,Smith-Waterman Score=99.
atgctcgggttcgctctcctgccggcccccccaggccctggccttgttgcagcggctagtcgccagatgaccaggcgaagaactggaccggccctcgctccttcctgcctgagccgaccgtcccccgcaaccctcaattcggccgggtccgaaattcacgatcgccctcgaagtggcgcacccccgacgccctgcctccggggctcagcgcaggcaagcacttcagcctgctccccgggggctaatggacctgagcccaagccaggacttggcacgctacggcagcagctggagcacatcatggccaccaaccggctggatgaggcgggctgggtcgcctgctacccgactgatgtccgttga

SEQ ID NO: 8185 - DNA, 715 bp, Homo sapiens
  SIMILAR (526)..(119): 351254mologous to Caenorhabditis elegans Similar to cuticular collagen; coded for by C. elegans cDNA yk254c9.3; coded for by C. elegans cDNA yk254c9.5,accession number AF040660,Smith-Waterman Score=113.
gcatgtccttccgtcagctcttccaggacctgaagcgctacgtgcaggacgccgatgtgcgctgggagtactgcgtgcgcgccaagcgcggccagaccgacacctcgcttggcaggttgtttcagcaaggaccaggtgtacctggacggcatcgtgcgcattctgcgacatcgccagaccatcgatttcccgttgctgacctcactgggcaaggtgtcctatgaggatgtggaccacctgcggccccatggggtgctggataatacccgggtgccccacttcatgcaggacttggcacgctaccggcagcagctggagcacatcatggccaccaaccggctggatgaggcggagctgggtcgcctgctacccgactgatgtccgttgagggctgcagtcagaggccctggacagaagctccagataggcccctagaacatgaagcagtttgctctgtgcgtccacggcctaggtgtttcttggggggtgttgggagggcaggagcattccttgaggaggagtggcaacatcaaagtgtttgtgtcccttgccagcctccctggggtctggggacctgcagcagcatgtctggcaaactgagtcgccctcctgcctccagctctctgttgagcagagggaaggcatgggggcaggaagagagctgagcattgatggggatgggggtggtttgggaatagaaacttgttcttgcatg

SEQ ID NO: 8186 - DNA, 508 bp, Homo sapiens
  SIMILAR (375)..(479): 421254mologous to Homo sapiens Neural thread protein,accession number R95913,Smith-Waterman Score=78.
gagaactagtctcgagttttttttttttttttttttttgagatgggagtttcactcttgttgcccaggcttggagtgcaatggcgccatctcggctaactgcaacctccggcctcctgggttcaagtgattctcctacctcagcctcctgagtagctgggattataggcatgcactgtcacacctggctaattttgttgtttatgttttgttttgtttttatgagacgaagtctcgctctgtcaccaaggctggagtgcagtggtgcgatctcggttccctgcaagctccgcctcccgggttcacgccattttcctgcttcagcctcctgagtagctgggattacaggcacctgccaccacacctggttaattttttgtattgttagtagagatggggtttcactatgttggtcagggtggtctcgaactcctgattacaagtgattcacctgccttggcctcccgagccttagcccttttgattccctgacatcaaatgctgtcgac

SEQ ID NO: 8187 - DNA, 424 bp, Homo sapiens
  SIMILAR (300)..(202): 901254mologous to Human endogenous retrovirus tripartite fusion transcript PLA2L,accession number Z14310,Smith-Waterman Score=162.
  misc_feature (1)...(424): n = a,t,c or g
gtcagtcttcagccagtaagccaagaaggagtcagtcagagaaccttgggccagagttccaggagctctgggagtggctgccaggtgagttgaacagtccgattttcagtggggtcccacacagatgggacgcggcttaggaggaatcccgggctgcgggcgttccttggcccagtggccagatttccggcatgtgtagcaagttccggatttgaaattggtgagatgtttcttgggctggttggtctgaggacctgaggtcgtaggtggatctttctcacggagcaaagagcaggaggacaggggattgatctcccaagggaggtcccccgatccgagtcacggcaccaaannnnnnnnnnnnnnnnnnnnnnnnnnnnnnnnnnnnnnnnnnnnnnnnnnncgaggtntnnnnngaattcct

SEQ ID NO: 8188 - DNA, 423 bp, Homo sapiens; identical to SEQ ID NO: 639
  SIMILAR (1)..(117): 891254mologous to Homo sapiens Human secreted protein, SEQ ID NO: 5576,accession number G01495,Smith-Waterman Score=187.

SEQ ID NO: 8189 - DNA, 522 bp, Homo sapiens; identical to SEQ ID NO: 6812
  SIMILAR (186)..(55): 461254mologous to Human T-cell lymphotropic virus type 1 Gag,accession number S74562,Smith-Waterman Score=136.

SEQ ID NO: 8190 - DNA, 516 bp, Homo sapiens
  SIMILAR (3)..(68): 861254mologous to Homo sapiens Human secreted protein, SEQ ID NO: 5576,accession number G01495,Smith-Waterman Score=106.
ctaagccgagaaggagtcggtcagaaagccttgggccagagttccaggggctctgggagtgtctgccaggtgagttgaacagtccgatttccagtggggtcccgcaaagatgggacacggcttaggaggaatcctgggctgcaggcattccttggcctggtggtcagatagatttctggcacttgtagcaagctccctgtccccggaaaagcagggaaggggtagagacaaggagagaaggggttggggtacttgccccttccccagaaaagcgggacttgccgctaagggtgaaggactgaggcaggcgtccctgcgtggtctgacacccttgaaacgtgggtgtataatcagagaggtgtccctgcaatgattaaacaccaagagaaggctgccttcccagtccgtgaccggtgccggagttttgggtccacagataaaacgtgtctcttttgtctcggatttgaaattggtgagatgtttcttgggctggtcggtctgaggacctgaggtcat

SEQ ID NO: 8191 - DNA, 471 bp, Homo sapiens
  SIMILAR (195)..(55): 471254mologous to Human T-cell lymphotropic virus type 1 Gag,accession number S74562,Smith-Waterman Score=146.
ctaagcccaaaaggagtcagtcagagagccttgggccagagttccaggggctctgggagtggctgccaggtgagctgaacagtccgatttccagtggggtcccgcacagatgggacacggcttaggaggaatcctgggctgcaggcattccttggcctggtggtcagatttctggcacttgtagcaagctccattcctgatttttgtaaaaactgtgttatagttctttggagacttctgtgagcccttcagagccattaaatgattgagagccacatataagggtggggagaaatgtggaacacatttttcaacatgattttggctccaggtggatttgaagaagcatggttttgtcatttgtaaagcttccattgcttggtccctacatcctcttatgaccctgagcttctcttgggcacactgagtcttgggcaggtcaatggtcagaaacagcctctggctgctcat

SEQ ID NO: 8192 - DNA, 990 bp, Homo sapiens
  SIMILAR (691)..(930): 931254mologous to Homo sapiens NAG13,accession number AF194537,Smith-Waterman Score=391.
atggacttaccttccactgtgagagttacccaaagctcggtgtccgtggtggtctacggggcttctgaggcgatcgggcagtgtcagttttcagacgctaagcccagaaggagtcagtcagagagccttgggccagagttccaggggctctgggagtggctgccagcaaacagtcttgatgatttgactatactatctttatacctcccgctcactctgcaagactgcagtgtagcttttgagacctctcaacaggaagcccaggccagcctcatgggtgtgggaccaagaggctcagtgagactgtttgggaatacggaaaagaagttgaagattgaaattaactgcccctgccaggttgaaggggccttgctcaggctatttgagaagaacaggaagcaaagcaaaaaggagtatttcagttcctcctccagccttgcagtcccctctctagtacctttatggtggcagaacctaacaggaagcctccttgtcaaaggatcagtggaatttgactttgagtttatgggagtaaacaatttatcttcatgcacagaccacaagataagctgtgatgcatcagattctctttggtctatggcctggacagccacagcagacacttttgtggatgctgccaggtctctgccctttgtttcagagcccctagtctccagctcaataatgcaagaaatacaaactaccatcagagaatactataaacacctccacgcaaataaactagaaaatctagaagaaatggatacattcctggacacatacaccctcccaagactaaaccaggaagaagttgaatctctgaatagaacaataacaggctctgaaattgtggcaataatcaatagcttaccaaccaaaaagagtccaggaccagatggattcacagccgaattctaccagaggtgggaactgaacaatgagaacacatggacacaggaagggaacatcacactccgaggactgttgtga

SEQ ID NO: 8193 - DNA, 1764 bp, Homo sapiens; identical to SEQ ID NO: 1396
  SIMILAR (727)..(834): 581254mologous to Homo sapiens Human secreted protein fragment encoded from gene 42,accession number Y07785,Smith- Waterman Score=97.

SEQ ID NO: 8194 - DNA, 885 bp, Homo sapiens
  SIMILAR (726)..(697): 901254mologous to Homo sapiens neutral protease large subunit,accession number M27826,Smith-Waterman Score=51.
tttcgtttttaagaggtttagaagcctggccgtcaatacctacaacagttatggaggcaagggaaacaggcccttgaaaagaaggtaatgtggagtgggtagcctccgtattgattaagaaggggacggacttaccctccaccgtgagagttacctaaagctcggcatccgtgatggtctacggggcttctgaggcgatcaggcagcatcagtcttcagccggtaagtcaagaaggagtcagtcagagagccttcggccagagttccaggggctctgggagtggctgccaggtgagttgaacagtctgatttccagtggggtcccgcacagatgggacatggcttaggaggaatcctgggctgcaggcattccttggcctggtggtcagatttctggcacttgtagcaagctcctgggggaggaggttctggtggaatgccgggctgctgcggttcaggcgtttggaagttcttatgtgcctccagaaaagcgggaaaggggtcagggcacagagatacgaggtcggggtgcggacataagggattggggcgcagagatatgaggttggggtgcggaaataagggatcggggcacagagatataaggggttggggtacttgccccttccccagaaaagcgggacttgccgctaagggtgaaggaccaaggcaggcgtccctgcgtggtctgacacccgatttaaaattggtgagatgttccttgggctggttggtctgaggacctgaggtcataggtggatctttctcatggagcaaagaacaggaggacaggggattgatctcccaagggaggtcccccgatcttagggcgccccttgagggcctgcagtgctgcagctgtccacttttaggtggtgcccgcat

SEQ ID NO: 8195 - DNA, 750 bp, Homo sapiens
  SIMILAR (72)..(176): 941254mologous to Homo sapiens Human secreted protein, SEQ ID NO: 5576,accession number G01495,Smith-Waterman Score=180.
  misc_feature (1)...(750): n = a,t,c or g
agtgcggtggaattcgaagaaggaagannnnnnnnnnnnnnnnnnnnnnnnnnnnnnnnnnnnnnnnnnnngcttctgaggtgatcgggcagcatcagtcttcagccgctaagccgagaaggagtcagtcagagagccttgggccagagttccaggggctctgggagtggctgccaggtgagttgaacagtccaatttccagtggggtcccgcacagatgggacacggcttaggaggaatcctgggctgcaggcattccttggcctggtggtcagatttctggtacttgtagcaagctcctgtgggaggaggttctggaggaacgcctggccgctgcggttcaggcgtttggaagttcttgtgtgctggagatgtggctggggtttgtctcacagtggaggccaggaattgcaacttttttctattattgtacaccttgaaggcgaggttaattaaatcttgcccctgccccaggaaagcaggacttgctgctaagggtgaaggaccaaggcaggcctccctgcaatgattaaacaccaagggaaggctgccttcccagtccgtgaccagcgccggagttttgggtccacggataaaacgtgtctcctttgtctctttgctccggttcccaacaagttcctcatctccatctgagaccacttcagcctggaccttattgtccatatcactatcgggcttttgatcaaagtcattcaacaagtatctattgagttccaaactttcccacat

SEQ ID NO: 8196 - DNA, 555 bp, Homo sapiens; identical to SEQ ID NO: 648
  SIMILAR (185)..(6): 761254mologous to Homo sapiens neutral protease large subunit,accession number M27826,Smith-Waterman Score=215.

SEQ ID NO: 8197 - DNA, 1236 bp, Homo sapiens
  SIMILAR (544)..(633): 641254mologous to Plasmodium lophurae histidine-rich protein,accession number M15317,Smith-Waterman Score=153.
ctaagccaagaaggagtcagtcagagagccttgggccagagttccaggggttctgggagcggctgccaggtgagttgaacagtccgatttccagtggggtcccgcacagatgggacacagcttaggaggaatcctgggctgtgggcattccttggcctggtggtcagatttccggcacttgtagtaagctcttgccccttccccagaaaagcgggacttgccgctaagggtgaaggagaaggggttgaggggtacttgcccctcccccagaatagcgggacttgccgctttgaaacgtggttgaataatcagggaggcatccctgcaaggattaaacaccaagggaaggctgccttcccagtccgtgaccagcgccggagttttgggtccacagataaaacgtgtctcctttgtctctccacttggcaacgtaggtgtataaatgtgttggacggttaagtgatgatttgggatgttggcaaagcctgttaaatgagactctagttcactctcctctccattaatcaaaaatagaaatgctttcctgcttgccaccactaccacaaccaccaccaccaccactatcatcaccaccatcaacaccatcatcattatcatcatcaccaccatcaccgtatcaccatcatcatcatcaccatcatctttaccatcatcaccaccatcatcatcaacatcatcatcaacattatcatcaccaacatcaccattgtcattttcatgcgtgtccgtgtgaagagaccaccaaacaggctttgtgtgagcaacatggctgtttatttcacctgggtgcagaaaaagaaatcatctttggcattttcttcagttgtcacatcagatcttaaaagcaagaagagaagactttcagggaagagcctggagaccagctcggcgtccctgatggtctacggggcttccgaggcgaccgggcagcgtcagtcttcagccgctaagccgagaaggagtcagtcagagagtcttgggccagagttccaggggctccgggagtggctgccagaatccaagcctcaatcattatttaaggagccagagaggagcattaagaaaacatttcaaagatctttgaaggcttctgaggaccgatcagagattgaccttcagcatcacccagacagaggaactcttgctgccagtgtagtcttggtaactgaatcattacagaaaacatactccataacagatggagatgtttcctaa

SEQ ID NO: 8198 - DNA, 1401 bp, Homo sapiens; identical to SEQ ID NO: 646
  SIMILAR (1)..(132): 831254mologous to Homo sapiens Human secreted protein, SEQ ID NO: 5576,accession number G01495,Smith-Waterman Score=193.

SEQ ID NO: 8199 - DNA, 1152 bp, Homo sapiens
  SIMILAR (189)..(37): 721254mologous to Homo sapiens Human gene 71-encoded protein fragment, SEQ ID NO:433,accession number Y86518,Smith-Waterman Score=191.
atgtcaggagccaagggattcacaggaggcattccaggggcaggagggggtgtgaaagagggtggggaaccaagggttggcatcctggatactgtggctgtggcacaggatgaggggctccacttgggggaaaagttggattgccctgcagagctcctcagggaggaggaaaggggcctggggaaagggtggattgataggtgtgggttcttggtctcgctgacttcaagaatgaagccgcggaccctcgctgtgagtgttacagttcttaaagatggtgtgtctggagtttgttccttcagatgtccagatgtgtccagagcttcttccttccggtgggttcatggtcttgctgactttaggagtgaagccgcagaccttcacaagtcaaggttttccggcttgggtagccaggtgtcacggcccagtgtccacctgcagctgctttctgtgtcagtcctctgcaccgccaaggtcatagaggtggttgagacaaaagagacatgttttatccgtgaacccaaaactccggcaccggtcatggactgggaaggcagccttcccttggtgtttaatcattgcagggacgcctctctgatgatacactcacgtttcaagggtgtcagaccacgcagggacgcctgccttggtccttcacccttagcggcaagtcccgctttcctggggcaggggcaagtacccctcaaccccttctcctttacccttagcgcacataagaacttccaaacacctgaaccgcagcagccaggtgttcctccagaacctcctcccccaggagcttgctacaagtgcccgaaatctgaccaccaggccgaggaatgcctgcagcccaggattcctcccaagccgtgtcccatctgtgcgggaccccactggaaatcggactgttcaactcacctggcagccactcccagagcccctggaactctggcccaaggctctctgactgactccttctcggcttagcggctgaagactgatgctgcccgatcgcctcggaagccccgtagaccatcacggacgccgagcttccggtaactctcacagtggaaggtaagcccgtccccttcttaatcaatacggaggctacccgctccacattaccttcttttcaagggcctgtctcgtgcc

SEQ ID NO: 8200 - DNA, 1812 bp, Homo sapiens; identical to SEQ ID NO: 645
  SIMILAR (367)..(1158): 971254mologous to Homo sapiens putative p150,accession number U93564,Smith-Waterman Score=1333.

SEQ ID NO: 8201 - DNA, 1038 bp, Homo sapiens; identical to SEQ ID NO: 6439
  SIMILAR (1)..(465): 921254mologous to Homo sapiens ribosomal protein L21,accession number X89401,Smith-Waterman Score=752.

SEQ ID NO: 8202 - DNA, 664 bp, Homo sapiens
  SIMILAR (86)..(589): 361254mologous to Homo sapiens ribosomal protein L21,accession number X89401,Smith-Waterman Score=135.
atccttaattaaattaatcccccccccccgccctttcggccggaaccgccatcttccagtaattcgccaaaatgaacgaacacaaaggggaaagaggagaggcaacccgatatatgttctctaggcccttttagaaaaacatggagttgttccttgtggccacatatttatgcgaaatctataagcaaaggtgtgattttgtagacatccaaggggaatggggtacctgttcaaaaaagggaatgccccccacaagtgttacccatggccaaaactggaaggagtcttacaattgttaccccagcatgcttgttgccattgtttaacacaacacagtttaggcgcaagattcttgccaaagagaattaatgttgcgtattgagcacatttaagcactcctaagagcccgagattagcttccctgaaaccgtgtgaaggaaaatgatcaggaaaaagaaagaagcccaaagaggaaaggtacctggggttccacttaaagccgccagcctggctccacccagaggaagcacactttttggaggaacccaatggggaaggagccttgagctgctgggaaccttttccctattggatttccttgggcttattaggtgttaaaaaaaaaaataaaaaggacctctgggctacaaaaaaaaaaaaaaaa

SEQ ID NO: 8203 - DNA, 1343 bp, Homo sapiens
  SIMILAR (256)..(618): 331254mologous to Caenorhabditis elegans similar to G beta repeats (PROSITE:PS00670),accession number U41007,Smith-Waterman Score=185.
atgagcgaaagcttcctgaagcccttgccagaagtagatgctggtgccatccttcttgtacagcctgcagaactgtacagcaaggccagcagactagatgactgttatcaaaaagatagttatactcacagatgccaagagaagcggacatgccacaccacagggggccactcggggaagcaccagagtctgtcaggagcttctgtatcgccaacgtgttctgcgaaaactcgggacaagattaactgcttcgatttcagccctaaaagcgaggtgatcaccttgagcagcaacgacgactccatcgtgctctctgactgccaggagggcaaaccaaaaccctgttcagggccatttgctacctttaagatgcagtatgatcgaacttgtgagtggacagcacttaaaatcagcaacggtggcaagctcatcctcatttccaccaatgtcagcttcattcgtctcattggtgcattcaaaggagtggtgatacacacatttggcagttatgccaacagcgaagctgtcacactggaggcttcatttactgcagactctcagtttgttatgattggttcagaggatggcaagatccatgtctggaatgaagagagtggtataaaagtagctgggttggatggtaaacacacaggcccaattacctgtttgcaattcaaccccaagttccatgacttttgccagtgcgtgttccaacatggccttttggttgcccaccattgatgactgaccctgttgctgcttggctatttctgtatagtgagggcggccagaaggaagaaactcagagggaactgagatcctagtgggattggatcatttgacctgggctggagaaccatccttttacatggccttccccatggatgtgcttgtacatctgcatcaaaaagaaaataattactcttgaatgagccgtcttcaaaacggactcttggtgcaacagacatcaattggcactccagcgttttctaactgtcacatgcaccaagctctgctggaggagtgaccagactcacgatttggtatagtggggctctcaagcatcttcaatttgaatgtacatgctgctgaggagccggtgaagtccatcagttccgcacatcccttctaccctccaactgcatgggaagccaaagtcctggttttgaaatgcttgggcagctcagccgcttgccctcaccctgcatgtcttgttactgggtctccctgtgtacttgtggcattatccacaaccatcatgtttcttaggtgccaaacatttacagaaacattttcatatatcttgggggcagagaaagggaccgatacagaaggaccttgct

SEQ ID NO: 8204 - DNA, 544 bp, Homo sapiens
  SIMILAR (332)..(6): 331254mologous to Gossypium hirsutum proline-rich cell wall protein,accession number L17308,Smith-Waterman Score=107.
ggaggtgtggggacccgggcttgcgtcggagggggcggtgggctcacccatgggcctttccaaaagcaaagagaaacccaggaaaggtgaggagcaaaagaagggatccacctattcagttccaaaatctaaggagaagttgatggagaagcattcccaggaagccaggcaggcagacagggagtcggagaagcctgtggacagcctccacccgggggccgggacagccaagcacccgccgccggcagcttcgctggaaggtaggagacggcgggagggagcgaagcgaggtcagtggcttggaggatctggggctggggtgaggagcctactgtaagaccctaccggatggacactagtagcaggcacgcgccgtaaagatgaaactggtttgttttgggaactttatgtaggaggtaaatatccagaaatcttagttgaaaacataagtttaatgaaaatgtaggtcagttcccgagtgataagtgcgtaccaggtggtcgaggggctggggcagtgtgcgtgtgtctcacctgaggttctc

SEQ ID NO: 8205 - DNA, 933 bp, Homo sapiens
  SIMILAR (431)..(538): 801254mologous to Homo sapiens coiled-coil protein,accession number AB018551,Smith-Waterman Score=154.
gaggtgtggggacccgggcttgcgtcggagggggcggtgggcatcacccatgggccatttccaaaagcaaagagaaacccaggaaaggtgaggagcaaaagaagggatccacctattcagttccaaaatctaaggagaagttgatggagaagcattcccaggaagccaggcaggcagacagggagtcggagaagcctgtggacagcctccacccgggggccgggacagccaagcacccgccgccggcagcttcgctggaagagaaacctgatgtaaaagcaaaagtccagcaggaagaaagtggtcgttccacagatcatcatcacgccgagcgtctgaatgagacgctagtcagtttgcagttccagcgggagtgaccagcagagaaccattcgggagccggaggactggggcccctaccggcggcacaggaaccccaacaaggacagctcgttcgaggacctggagcagttcctgggtacgtctgagcggcaggaccggggccgtggggtacagccggagccccagctgcagcagctgaagaccgcggtggaggagatccacaatgccgtaggctgctggcccaacagggcagcagctgtaggtgaccgtttccagtcccggactccctgccctgggcagcaagacgtgagtgggctccactggtacaaattccatttgaaatttcctcagttgttccatcagctgccaaatttccacactggcaacacccttctgtttcagctgggacgatgccggagtgtgaaggagtttgagaagctgaaccgcattggagagggtacctacggcattgtgtgtgagtggccaaggctaggacatgtggccgcagctcgtggctgtgacagtgtgggacgagactgtcgaagcagcagccgcgttggggctggaagggactcagaccctgtgctctga

SEQ ID NO: 8206 - DNA, 496 bp, Homo sapiens
  SIMILAR (66)..(209): 461254mologous to Homo sapiens bA145E8.1 (KIAA1074),accession number AL162272,Smith-Waterman Score=92.
  misc_feature (1)...(496): n = a,t,c or g
ggggttagnnagggaggggattggagcccctnngnattgtagaccactgtccgtgcggtggaattcaagagcaggtgaaatattttctcagcactcttcctacaaggcgaggtcgagagtcaccttgtgttgaaaatcttactagtataggactcaacagaaaatatattccccaaatgcccgtaagaattcctacttcaaacctcagacttcaaataactgccagaactacttgactgagctgttgctgtattggacacttgctcccatctactttcttctctagaatccacnnnnnnnnnnnnnnnnnnnnnnnnnnnnnnnnnnnnnnnnnnnnnnnnnnnnnnnnnnnnnnnnnnnnnnnnnnnnnnnnnnnnnnnnnnnnnnnnnnnnnnnnnnnnnnnnnnnnnnnnnnnnnnnnnnnnnnnnnnnnnnnnnnnnnnnnnnnnnnnnnnnnnnnnnnnnnnnnnnnnnnnnnnnnnnnnnnnnnnnnnnn

SEQ ID NO: 8207 - DNA, 417 bp, Homo sapiens
  SIMILAR (120)..(13): 381254mologous to Trypanosoma brucei CR3,accession number U05313,Smith-Waterman Score=62.
cagcaaaatattatcttcgctcaagacatgtgtggacgagatgcagaagattacgctatttctcatcatttgacaaaaattcaacaacaaattttggaacataaaaagaagacacttaaaacggagaaatcagatgttggaagttctgatgaatctgcagtcagcattttccatgaactgcatgtggattcattgcctgcatcggatgacaaagacttgaatattgctactaagtgtgtccccgagaaagtgtcagagcctttacctggaccttcgcatgaaaaaggaaacagaatagtcgatggacaaggagaagggcctcctgcaaaacatccttccttgaagcctagcactgaagtagaagatcctgctgtgaaaggagcagtacaaagaaagaatgtacagacattgagagca

SEQ ID NO: 8208 - DNA, 475 bp, Homo sapiens
  SIMILAR (75)..(341): 391254mologous to Homo sapiens bA145E8.1 (KIAA1074),accession number AL162272,Smith-Waterman Score=163.
cggaattcatacaaggctcaattccgaactgttgaaggaagaagaaagcaacaaaagactggaagctgaaattgaatcatcagtctagactgactgctgctataagtaagcacagtgaaagtgtgaaaacagaaagaaacgtaaaacttgcattagagtgaacacaagatgtttccgtacaagtaaaaatgagttctgatatttccgaagtagaagataagaatgagtttcttactgaacaactttctaaaaagcaaattaaattcaataccttaaaagataagttccgtaagaaaagagatactctcagaaaaaagtcattggctttagaaactctccaaacgacctaagccaaacacagcagcaaataaaggaaatgaaagagatgtatgaaaatgcagaagctaaagtgaataattccactggaaagtggagctgtgtagaagagaggatatgtcaactccaacatgaaaat

SEQ ID NO: 8209 - DNA, 742 bp, Homo sapiens
  SIMILAR (107)..(496): 341254mologous to Homo sapiens bA145E8.1 (KIAA1074),accession number AL162272,Smith-Waterman Score=152.
agattttccgggcacccttccgtatctgcctaggcattttgctgtctcctcctaatacggaacaagcacaatataaaaaacaattagagcagttaaacaaggatataatacagcttcactaaataagaaggaactcacacttaaagatgtggaatgtaaattctacaaaatgaaaactgcttatgaagaggttacaactgagttagaagaatataaggaagcctttgcagcagcattgaaagctaacagttccatgttaaaaaaattaactaaatcgaataagaaaatagcaatgatcagtatcagctctttatggagaaagagcaggtgaaatattttctcagcactcttcgtgcaaggcgaggtcgagagtcaccttgtgatgaaaatcttactagtataggactcaacgaaaatatattccccaaatgcccgtaagaattcctacttcaagcctcagacttcaaataattgccagaactacttgactgaggttagtcatatgaccgtttctctttagggtttcatttctccagcgtaattcttgtttataatctggtgaaatactgagttgttctgttgacttttgcatgtgaagtaaagatcataattagctgtgttaacacagaaaggaaatgcgaactctacattttttaattccttggagctctcattttcaagagatatccatttgctaactttattcaataaatgtgactaaactgaaaaaaaaaaaaaaaaa

SEQ ID NO: 8210 - DNA, 3734 bp, Homo sapiens
  SIMILAR (1159)..(1620): 471254mologous to Homo sapiens bA145E8.1 (KIAA1074),accession number AL162272,Smith-Waterman Score=340.
atggccatggcctgggcaggaccaggttcagggcaggagcaaaagaagggcaaggacagttcaggttcttggcacagccggagtccaggacagggtcagggtagggccaaggcagggtctgggccatggaactgctgggcccactcgggctgcactcctcggggagcaggagcagcagaaactcagacccagccaaccctctgcacccaggtgccacttcctgttccggatgcctccatgtacaaggacctgtccccagtggtgtctgctactccatactggggggtgccaggcagtctccgtggcacagacccagagtgcatgggcccagtaaccacgtgtgtggcggtgatggagacaggcggctggcagcgagagctgctccttgcctggatacaggaagggaaagaggaggcacctaccacaggctggaggctagagtctgtgggactgcggctggcctcgctggctcgcctcgctgctgtgggtggcagcagcggacactgcagccggccagagcgtagaaaggcgattgggagccacaggggccagacggtcctgggcaccatagaccacctgtacacgggttccgggtaccgaatccggtactcggaactgcagaagatccacaaggcagctgtcaagggcgacgccgcggagatggagcgctgtctggcgcgcaggagcggagacctggacgccctggacaagcagcacagaacagccctcatgcttgctgtgcactatgactcaccaggtattgtcaacatccttcttaagcaaaatattaatgtctttactcaagacatgtatggacaagatgcagaagattacgctatttcttgccgtttgacaaacattttccatgaactgtgtgtggatttattacctgcattggatgacaaagtcttgagtattgctgctaagcagtgtgtccccaagaaagtgtcagagcctttacgtggaccttcccatggaaaaggaaacagaatagtcaatggaaaaggagaaggacctcctgcaaaacatccttccttgaagcctagcactgaaatggaagatcctgctgtgaaaggagcagtacaaagaaagaatgtacagacattgagagcagtgaatttgtcaacagaaaaagccttaccagtggcttcagaggaagagcaacaaaggcgtgaaagaagtgaaaagaagcaaccacaggattttcataatcatgaagaagtgaaagatctgatggatgaaaattgcattttgaagacagatattgctatacccagacaggaaatatgcacaatgaaaaatgacaacctggaaaaagaaaataaatatcttaaggacattaaaattgctaaaggaacaaatgctgcccttgaaaattgtataaaactcaatgaggaaatgataacaaaaacagcattccggtatcaacaagagcttaatgatctcaaagctgagaatacaaggctcaattctgaactgttgaaggaaaaagaaagcaagaaaaaactggaagctgaaattgaatcttatcagtctagactggctgctgctataagtaaacacagtgaaaatgtgaaaacagaaagaaacttaaaacttgctttagagagaacacaagatgtttttgaacaacctgctgggctggaggaagcggagctggtgctgtcccggctctcttgcggggaagcaactgagggggcagcgcggcgggccctggcagccgaagaggctggcaggtggcgccgtggggtgggtgctcctggctggcccccgagagccgtttacatgttttaaagacgtgcggatcctgctggtgggagaacctagagttgggaagacatcactgattatgtctctgggcagtgaagaatttccagaagaggttcctccccgggcagaagaaatcaccattccagctgatgtcaccccagagagagttccaacacacattgtagattactcagaagcagaacagagtgatgaacaacttcatcaagaaatatctcaggctaatgtcatctgtatagtgtatgccgttaacaacaagcattctattgataaggaagtgaggagcacctctgcccggctgccctgtctgggaagtgaggagcgcatctgcccggctgccctgtctgggaaatataagaaactcctggaaatgacaataaatgtgttaagtgtatttggaaatgaagacttcgattgccatggagacttaaaaacagatcaactgaaaatgaatattctgattaagaaactaaaacataagtttgatgatcttacagcagagaaggaagctgtatcttcaaaatgtgtcgatttggctaaagacaatcaagttcttcaacaggagttattatctatgaaaaaagtacaacagcaatgtgaaaaacttgagaaggataaaaagatgttggaagaagaaatattaaatcttaagacacatatggaagacaatatggtagaacttagtaaactacaagaatataaatcggagctagatgaaagggcaatgacggcagtagaaaaattagaagaaatccatttacagttaaacaagggtaatacggcttcactaaataagaaggaactcacacttaaagatgtggaatgtaaattctccaaaatgaaaactacttatgaagaggttacaaccaaattagaagaatacaaggaagcctttgcagtagcattgaaagctaacaattccatgtcaaaaaaaattaacgaaatctaataagaaaatagcaatgatcagcaccaagctccttatggagaaagagtgggtgaaatattttctcagcactcttcctacaaggcgaggtcaagagtcaccttgtgttgaaaatcttactagtatagtactcaacagtaaatatattcccaaaatgaccggaagaattcctacttcaaacccttaaaccttaaataactggcagaactacttgactgaggaagacatggtcagtggggacttgatcagtgggacctggtcaatggaggagtggtcattaggggcctcatcactgggaacctggtcagcggcggttggtcagtacctggcccgctggccactgtgtgacctcagtgtcactgttgctgagtccccatcgcctctgtgttgtggagcagttagagacacacagcagtgtcgtgagtggctctgtgtgaaggaccgttttctagatgagaggcacatctcaacacagctcactgatcagactcagggcttctacagcactgtgggcttcttggatgccaagaggcagaccacaggccatcttgagaaggacttggtcctgcctgggctgattggcaaagagctcactgacagtgtggaaggcatctatggtgaagtggggtctatgttcaagtgcagaaagggcccaatctggtggatgaaccacacggccagcttctggatgcaggcacagtgccacattttttgtcacttcctgatgcgccccaccagcactgaagagacagcctggagacagggcaagaggaaggctgagaaggatgagttgtccaggcaggacctggacccagccatggacctgttagtgctgtctcagggacaccagaccaacatcctggacatcatccacatacacaaggaagctcttactaaagtcacggagagcaaacaacaagtggcagaagggaatataaaggtgcagaggctgatgatgtcagaatcacaggaacaggatttctttggccactttggctga

SEQ ID NO: 8211 - DNA, 394 bp, Homo sapiens
  SIMILAR (2)..(157): 611254mologous to Homo sapiens RNA helicase II/Gu protein,accession number AF261917,Smith-Waterman Score=180.
cttaaagcatttggccatccagtgtcattggtctcagaggccaccagttattggagatgtccttcaaggctacagtgggtctgaagggagggctattattttctgtgagaccaagaagaatgtaactgaaatggccatgaatccacacataaaacaggtaagactttttttcatgctttctctaattgaaattatggggatgaatcactgaacgaaaattatattgtcctttgtggaccagatttgatagtcattctcaaaactgagttgtaaggctgggcatggtggcccacacctgtaatcctgtgacctgataagtcaggatagaattttatcagttttgtttgtttgtcttgagacagggtctccctcttatgcccaggctggagtgcag

SEQ ID NO: 8212 - DNA, 1434 bp, Homo sapiens
  SIMILAR (325)..(717): 811254mologous to Homo sapiens hypothetical protein,accession number AL137423,Smith-Waterman Score=554.
atgactcaaaaggctgcagcttctgtggaacatttggccatccggtgtcattggtctcagaggccagcagttactggagatgtccttcaagtctacagtgggtctgaagggacggctattattttctgtgagacccagaggagtgtaactgaaatagccatgaatccacacataaaacagaatgcccagtgtttacatggggacattgcacagtcacaaagagaatttacactaaaagacttcagagaaggtagttttaaagttttggtggcaaccaacgtggctgcctgtggtttggacattcctgaagttgacctggtgattcatggttctcctcctcaggatgttgagtctatatccatcgttctggacgcacagggatttgtgaccatgactctggaaagcctagaggaaatacaggatgtcagctgtgcttggaaagaacttaacagaaagctgagtagtaatgcagtgtctcagattaccagaatgtgcctcctgaaaggaaatgtgcgtgtttgctttgatgttcctacaactaagtcagaaaggttacaggcagagtggcatgattccgactggatattctcagtgccagccaaattacctgaaattgaagaatattatgatagaaacacatcttctaattccagacagaggagtggttggtcaagtggccagtcgggccgatcaggtggtcgatctggcagccgtaattattttgccgtagacactgcctctgctatagctattgccttgatgacatttggcactatgtatcccatgagtgtgtacagtgggaaagtcttactccagacaacaccaccccatgttattggtcagttggacaaactcatcagagaggtatctaccttagatggagttttagaagtccgaaatgaacatttttggaccctaggttttggctcattggctggatcagtgcatgtaagaattcgacgagatgccaatgaacaaatggttcttgctcatgtgaccaacaggctgtacactctagtgtctactctaactgttcaaattttcaaggatgactggattaggcctgccttattgtctgggcctgttgcagccaatgtcctaaacttttcagatcatcacgtaatcccaatgcctcttttaaagggtactgatgatttgaacccagttacatcaactccagctaaacctagtagtccacctccagaattttcatttaacactcctgggaaaaatgtgaacccagttattcttctaaacacacaaacaaggccttatggttttggtctcaatcatggacacacaccttacagcagcatgcttaatcaaggacttggagttccaggaattggagcaactcaaggattgaggactggttttacaaatataccaagtagatatggaactaataatagaattggacaaccaagaccatga

SEQ ID NO: 8213 - DNA, 1835 bp, Homo sapiens
  SIMILAR (2)..(76): 801254mologous to Homo sapiens Gu protein,accession number U41387,Smith-Waterman Score=102.
ccgctcaccaaaggtacttgttttggctccaacacgggaactggcaaaccacgtatccagagacttcaaagatataatctaggaaactcagcgtggcgtgtttttatggtggaacatcatatcaaagccaaattaatcatattcgaaatggtattgacatcttggttggaacacctggtcgtatcaaagaccatctgcagagtggccgattggatctttctaaactgcgacatgttgtgcttgatgaagtggatcagatgttagatttaggtttcgctgaacaagttgaagatattattcatgaatcctacaaaactgattctgaagacaatcctcagactttacttttttctgcaacttgcccacagtcggtatacacagttgcaaaaaaatacatgagatccagatatgaacaggttgacctcgttggaaaaatgactcaaaaggctgcaactactgtcgaacatatggccatccagtgtcattggtctcagaggccagcagttattggagatgtcctcaaggtctacagtgggtcttaagggagggctattattttctgtgagaccaagaagaatgtaactgaaatggccatgaatccacacataaaacagaatgcccagtgtttacatggggacattgcacagtcacaaagagaaattacactaaaaggcttcagagaaggtagttttaaagttttggtggcaaccaatgtggctgcccgtggtttggacattcctgaagttgacctggtgattcaaagttctcctcctcaggatgttgagtcctatatccatcgctctggacgcacaggtagagctggacggacagggatttgtatatgtttttatcaaccaagagaaagaggtcaactaagacatgtggaacaaaaaacacaaattacttttaaatgtgtaggtgttccttctacaatggatttagttaaatttaaaagcatggatgccataaggtctctggcttccatttattatgcagctgttgatttttttccaaccatcagctcagagactgatagaagagaaaggtgcagtggatgcattggctgcagctttagcccacatttctggtgcatcaagctttgaaccacgatctttgatcacctctgataaggggtttgtgaccatgactctggaaagcctagaggaaatacaggatgtcagctgtgcttggaaagaacttaacagaaagctgagtagtaatgcagtgtctcagattaccagaatgtgcctcctgaaagggaatatgggtgtttgccttggatgttccctaccaactgagtccagaaaggtttaccagccagagtgccatgattcccgactggatactctccagtgcccagcccaaattccctgaaattgaagaaatattatgatggaaacacatcttctaattcccagaccagaggagtggctggtccaattggtcgaatcaggcccgtccaggccgttcagttggtcgaatctggcggccggtcaggtagaccagagtcgacaaggaagtcgctcaggaagtcgacaagatggtagaagacgaagtggggaatagacatcgtccaagaagttggggggccacaaacggagtttttgactgagtatttgatagttaatctaccagtgtgagcttgcctatttctgcctaatcatgtacattatccaccaaaaattaggtcatcatagttgaggtatgtgtctgctatttgcaaagaagttggtcgtatttttttaaaaagtatttcacaagaatggaacaaatctacttatccagttatccctttgaataaaaaacaaatcattttattgtctcttttcaaaaaa

SEQ ID NO: 8214 - DNA, 621 bp, Homo sapiens
  SIMILAR (537)..(620): 891254mologous to Homo sapiens NAG13,accession number AF194537,Smith-Waterman Score=130.
atggccaccaaaagcttggagatgccagaaaccacagaggccaaagagattttacagccctggcttgtgaagacccttggtctgggcttcccagagggccacctattttctcaccttcttgttacctgcaacatggttataatggcacccagccgcagccacaattttcctccaaaatcagagcagacaccaggagtggagaaatgccagacagtgggagcaggccctactgaacctgcaggaaaaaagaggaaaccctcatccctcaagagtacctggattcctggatctggatctgtggctggacagctgcagctgtgcccaggagcatgggacttccacccctctaacttggtaaaagaaatacaaactaccatcagagaatactacaaacacctctatgcaaataaactagaaaatctagaagaaatggataaattccttgacacatacactctcccaagactaaaccaggaagaagttgaatctctgaatagactaataacaggatctgaaattgtggctataatcaatagcttacaaccaaaaagagtccaggaccagacggattcacagccgaattcttccagaggtacaaggagctggtaccattccttctga

SEQ ID NO: 8215 - DNA, 918 bp, Homo sapiens
  SIMILAR (91)..(156): 771254mologous to HERV-H/env60 envelope protein,accession number AJ289710,Smith-Waterman Score=81.
ttatttcactccatctttggctaccttccctttgctcgtcagactctcctcccaggctctattcttgtttttacttatacccagccccccaaaattcaatttgcaaatgggaccaaagggctccctgatcccctcatgacaccaaaatgacaaaaatgctccactaatgcccttgctggtcagtttaggactttctgcctccactattgctctcggtactagaatagcaggcatttcaacctctgtcactaccttctgtagcctgtctaatgacttctctgcaagcttctccccatatttacatcgttgtttccttccttggtcctccttgtgatctgggaggaaaactagtgtttctgctgctgtgttggtgagcacaaatatttcaatcagcagggtccagggaccattgtgggttcttgggcaggggttgtgtctgctgctgcatccgagccagcagcggcaacatgcttgggtctccttccacactgtagaggcttgttctttcactctttgcaataaatcttgctgttgctcactctttgggtctgtgtcacctttatgaactgtaacactaaccacaaaggtctgcagcttcactccttttaccaagttagaggggtggaagtcccatgctcctgggcacagctgcagctgtccagccacagatccagatccaggaatccaggtactcttgagggatgagggtttccctcttttttcctgcaggttcagtagggcctgctcccactgtctggcatttctccactcctggtgtctgctcatgttgcaggtaacaagaaggtgagaaaataggtggccctctgggaagcccagaccaagggtcttcacaagccagggctgtaaaatctctttggcctctgtggtttctggcatctccaagcttttggtggccat

SEQ ID NO: 8216 - DNA, 2922 bp, Homo sapiens
  SIMILAR (1347)..(1526): 341254mologous to Mus musculus Evi-1,accession number X54989,Smith-Waterman Score=89.
  misc_feature (1)...(2922): n = a,t,c or g
gtacatcttccaaggtctcggaggatcttagacgaattttacaatgtgaagttctgcatagatgccagtcaaccagatgttggaagctggctcaagtacattagattcgctggctgttatgatcagcacaaccttgttgcatgccagataaatgatcagactgtgaccctgaagacaaatatgggatactttttctttggagaaactaagggtacagcaacatcgtcgcctcattctgaactggaaagtacaggtgcgattctggatgacaaagaagatgcttacttcacagaaattcgaaatttcattgggaacagcaaccatggcagccaatctcccaggaatgtggaggagagaatgaatggcagtcattttaaagatgaaaaggctttggtgaccagtcaaaattcagacttgctggatgatgaagaagttgaagatgaggtgttgttagatgaggaggatgaagacaatgatattactggaaaaacaggaaaggaaccagtgacaagtaatttacatgaaggaaaccctgaggatgactatgaagaaaccnangcatatgctatgatgctgtcactgtctgacaaggagtccctccattctacatcccacagttcttccaacgtgtggcacacattttcaatggttgaagaggactttcagcaaaaactcgaaagcgagaatgatctccaagagatacacacgatccaggagtgtaaggaatgtgaccaagtttttcctgatttgcaaagcctggagaaacacatgctgtcacatactgaagagagggaatacaagtgtgatcagtgtcccaaggcatttaactggaagtccaatttaattcgccaccagatgtcacatgacagtggaaagcactatgaatgtgaaaactgtgccaaggttttcacggaccctagcaaccttcagcggcacattcgctctcagcatgtcggtgcccgggcccatgcatgcccggagtgtggcaaaacgtttgccacttcgtcgggcctcaaacaacacaagcacatccacagcaagattattatagaagacaagatgccaaacgcttcatggtcttgtgcttttacctttcagatgtcagctattgaaaacatggcagaaaagctagagagcttcagtgccctgaaacctgaggccagtgagctcttacagtcagtgccctctatgttcaacttcagggcgcctcccaatgccctgccagagaaccttctgcggaagggaaaggagcgctatacctgcaggctcgagatagaagaaaggatgaaattttggttgcggcaagcttctctgagcagacgacattcatgtagagacctcattgttggaaagaagtcctccatgaacgatctggatgaaagtgtagcagatgcaaatactgtgacagatcatttagcatatcttctaacttgcaaaggcatgttcgctacatccacaataaagagaagccatttaagtgtcacttatgtgataggtgttttggtacaacaaaccaatttagacagacacctaaagaaacatgagaatgggaacatgtccggtgaggtctgccataaatcctatactcagttttcaaacctttgccgtcataagcgcatgcatgctgattgcagaacccaaatcaagtgcaaagactgtggacaaatgttcagcactacgtcttccttaaataaacacaggaggttttgtgagggcaagaaccattttgcggcaggtggattttttggccaaggcatttcacttcctggaaccccagctatggataaaacgtccatggttaatatgagtcatgccaacccgggccttgctgactattttggcgccaataggcatcctgctggtcttacctttccaacagctcctggattttcttttagcttccctggtctgtttccttccggcttgtaccacaggcctcctttgatacctgctagttctcctgttaaaggactatcaagtactgaacagacaaacaaaagtcaaagtcccctcatgacacatcctcagatactgccagctacacaggatattttgaaggcactatctaaacacccatctgtaggggacaataagccagtggagctccagcccgagaggtcctctgaagagaggccctttgagaaaatcagtgaccagtcagagagtagtgaccttgatgatgtcagtacaccaagtggcagtgacctggaaacaacctcgggctctgatctggaaagtgacattgaaagtgataaagagaaatttaaagaaaatggtaaaatgttcaaagacaaagtaagccctcttcagaatctggcttcaataaataataagaaagaatacagcaatcattccattttctcaccatctttagaggagcagactgcggtgtcaggagctgtgaatgattctataaaggctattgcttctattgctgaaaaatactttggttcaacaggactggtggggctgcaagacaaaaaagttggagctttaccttacccttccatgtttcccctcccattttttccagcattctctcaatcaatgtacccatttcctgatagagacttgagatcgttacctttgaaaatggaaccccaatcaccaggtgaagtaaagaaactgcagaagggcagctctgagtccccctttgatctcaccactaagcgaaaggatgagaagcccttgactccagtcccctccaagcctccagtgacacctgccacaagccaagaccagcccctggatctaagtatgggcagtaggagtagagccagtgggacaaagctgactgagcctcgaaaaaaccacgtgtttgggggaaaaaaaggaagcaacgtcgaatcaagacctgcttcagatggttccttgcagcatgcaagacccactcctttctttatggaccctatttacaggtaa

SEQ ID NO: 8217 - DNA, 4193 bp, Homo sapiens
  SIMILAR (1060)..(3321): 981254mologous to Mus musculus Evi-1,accession number X54989,Smith-Waterman Score=3971.
atgcgtatccccgtagatgccagcacgagccgccgcttcacgccgccttccaccgcgctgagcccaggcaagatgagcgaggcgttgccgctgggcgccccggacgccggcgctgccctggccggcaagctgaggagcggcgaccgcagcatggtggaggtgctggccgaccacccgggcgagctggtgcgcaccgacagccccaacttcctctgctccgtgctgcctacgcactggcgctgcaacaagaccctgcccatcgctttcaaggtggtggccctaggggatgttccagatggcactctggtcactgtgatggctggcaatgatgaaaactactcggctgagctgagaaatgctaccgcagccatgaagaaccaggttgcaagatttaatgacctcaggtttgtcggtcgaagtggaagagggaaaagcttcactctgaccatcactgtcttcacaaacccaccgcaagtcgccacctaccacagagccatcaaaatcacagtggatgggccccgagaacctcgaaataatgagtgtgtatatggcaactaccctgaaatacctttggaagaaatgccagatgcagatggagtagccagcactccctccctcaatattcaagagccatgctctcctgccacatccagtgaagcattcactccaaaggagggttctccttacaaagcccccatctacatccctgatgatatccccattcctgctgagtttgaacttcgagagtcaaatatgcctggggcaggactaggaatatggaccaaaaggaagatcgaagtaggtgaaaagtttgggccttatgtgggagagcagaggtcaaacctgaaagaccccagttatggatgggagatcttagacgaattttacaatgtgaagttctgcatagatgccagtcaaccagatgttggaagctggctcaagtacattagattcgctggctgttatgatcagcacaaccttgttgcatgccagataaatgatcagatattctatagagtagttgcagacattgcgccgggagaggagcttctgctgttcatgaagagcgaagactatccccatgaaactatggcgccggatatccacgaagaacggcaatatcgctgcgaagactgtgaccagctctttgaatctaaggctgaactagcagatcaccaaaagtttccatgcagtactcctcactcagcattttcaatggttgaagaggactttcagcaaaaactcgaaagcgagaatgatctccaagagatacacacgatccaggagtgtaaggaatgtgaccaagtttttcctgatttgcaaagcctggagaaacacatgctgtcacatactgaagagagggaatacaagtgtgatcagtgtcccaaggcatttaactggaagtccaatttaattcgccaccagatgtcacatgacagtggaaagcactatgaatgtgaaaactgtgccaagcaggttttcacggaccctagcaaccttcagcggcacattcgctctcagcatgtcggtgcccgggcccatgcatgcccggagtgtggcaaaacgtttgccacttcgtcgggcctcaaacaacacaagcacatccacagcagtgtgaagccctttatctgggaagtctgccataaatcctatactcagttttcaaacctttgccgtcataagcgcatgcatgctgattgcagaacccaaatcaagtgcaaagactgtggacaaatgttcagcactacgtcttccttaaataaacacaggaggttttgtgagggcaagaaccattttgcggcaggtggattttttggccaaggcatttcacttcctggaaccccagctatggataaaacgtccatggttaatatgagtcatgccaacccgggccttgctgactattttggcgccaataggcatcctgctggtcttacctttccaacagctcctggattttcttttagcttccctggtctgtttccttccggcttgtaccacaggcctcctttgatacctgctagttctcctgttaaaggactatcaagtactgaacagacaaacaaaagtcaaagtcccctcatgacacatcctcagatactgccagctacacaggatattttgaaggcactatctaaacacccatctgtaggggacaataagccagtggagctccagcccgagaggtcctctgaagagaggccctttgagaaaatcagtgaccagtcagagagtagtgaccttgatgatgtcagtacaccaagtggcagtgacctggaaacaacctcgggctctgatctggaaagtgacattgaaagtgataaagagaaatttaaagaaaatggtaaaatgttcaaagacaaagtaagccctcttcagaatctggcttcaataaataataagaaagaatacagcaatcattccattttctcaccatctttagaggagcagactgcggtgtcaggagctgtgaatgattctataaaggctattgcttctattgctgaaaaatactttggttcaacaggactggtggggctgcaagacaaaaaagttggagctttaccttacccttccatgtttcccctcccattttttccagcattctctcaatcaatgtacccatttcctgatagagacttgagatcgttacctttgaaaatggaaccccaatcaccaggtgaagtaaagaaactgcagaagggcagctctgagtccccctttgatctcaccactaagcgaaaggatgagaagcccttgactccagtcccctccaagcctccagtgacacctgccacaagccaagaccagcccctggatctaagtatgggcagtaggagtagagccagtgggacaaagctgactgagcctcgaaaaaaccacgtgtttgggggaaaaaaaggaagcaacgtcgaatcaagacctgcttcagatggttccttgcagcatgcaagacccactcctttctttatggaccctatttacagagtagagaaaagaaaactaactgacccacttgaagctttaaaagagaaatacttgaggccttctccaggattcttgtttcacccacaaatgtcagctattgaaaacatggcagaaaagctagagagcttcagtgccctgaaacctgaggccagtgagctcttacagtcagtgccctctatgttcaacttcagggcgcctcccaatgccctgccagagaaccttctgcggaagggaaaggagcgctatacctgcagatactgtggcaagatttttccaaggtctgcaaacctaacacggcacttgagaacccacacaggagagcagccttacagattgcaaatactgtgacagatcatttagcatatcttctaacttgcaaaggcatgttcgcaacatccacaataaagagaagccatttaagtgtcacttatgtgataggtgttttggtcaacaaaccaatttagacagacacctaaagaaacatgagaatgggaacatgtccggtacagcaacatcgtcgcctcattctgaactggaaagtacaggtgcgattctggatgacaaagaagatgcttacttcacagaaattcgaaatttcattgggaacagcaaccatggcagccaatctcccaggaatgtggaggagagaatgaatggcagtcattttaaagatgaaaaggctttggtgaccagtcaaaattcagacttgctgggatgatgaagaagttgaagatgaggtgttgttagatgaggaggatgaagacaatgatattactggaaaaacaggaaaggaaccagtgacaagtaatttacatgaaggaaaccctgaggatgactatgaagaaaccagtgccctggagatgagttgcaagacatccccagtgaggtataaagaggaagaatataaaagtggactttctgctctagatcatataaggcacttcacagatagcctcaaaatgaggaaaatggaagataatcaatattctgaagctgagctgtcttcttttagtacttcccatgtgccagaggaacttaagcagccgttacacagaaagtccaaatcgcaggcatatgctatgatgctgtcactgtctgacaaggagtccctccattctacatcccacagttcttccaacgtgtggcacagtatggccagggctgcggcggaatccagtgctatccagtccataagccacgtatga

SEQ ID NO: 8218 - DNA, 4107 bp, Homo sapiens
  SIMILAR (421)..(1395): 931254mologous to Mus musculus Evi1delta 105,accession number AJ001482,Smith-Waterman Score=1652.
tcgacccacgcgtccgcgaagcagcacacgatgttggacagcaatgctgttacttggcaaggtggaactcggccgagagcggctccaaagtcgcgtggccagtgccaggaattcagattttggcaaccgcaccttgtgcgtccccgaaaccgacggacagagacacacggagggaggggaaggaggagaagagcgcaaggaaaagaggccgacaagccggcagagaaacccaccgaaggccggacgacccaccccggagacgtgtccagaccgcaccgtttcgcaggaggaacaaggaaatcgcccggcttagcaacgatctgctctccaggaccacgcgtttcggatttattgtccgccaacagtgtatttttaatacaagaaatgaagtcttctttcgtctgggtgacccgggtttgcctggagaaacacatgctgtcacatactgaagagagggaatacaagtgtgatcagtgtcccaaggcatttaactggaagtccaatttaattcgccaccagatgtcacatgacagtggaaagcactatgaatgtgaaaactgtgccaaggttttcacggaccctagcaaccttcagcggcacattcgctctcagcatgtcggtgcccgggcccatgcatgcccggagtgtggcaaaacgtttgccacttcgtcgggcctcaaacaacacaagcacatccacagcagtgtgaagccctttatctgtgaggtctgccataaatcctatactcagttttcaaacctttgccgtcataagcgcatgcatgctgattgcagaacccaaatcaagtgcaaagactgtggacaaatgttcagcactacgtcttccttaaataaacacaggaggttttgtgagggcaagaaccattttgcggcaggtggattttttggccaaggcatttcacttcctggaaccccagctatggataaaacgtccatggttaatatgagtcatgccaacccgggccttgctgactattttggcgccaataggcatcctgctggtcttacctttccaacagctcctggattttcttttagcttccctggtctgtttccttccggcttgtaccacaggcctcctttgatacctgctagttctcctgttaaaggactatcaagtactgaacagacaaacaaaagtcaaagtcccctcatgacacatcctcagatactgccagctacacaggatattttgaaggcactatctaaacacccatctgtaggggacaataagccagtggagctccagcccgagaggtcctctgaagagaggccctttgagaaaatcagtgaccagtcagagagtagtgaccttgatgaagctcctacaccccagagggagtgacctggcaacaacctccggctctgatctggaaagtgacattgaaagtgataaagagacatttacagaaaatggtaaaatgttcaaagacaaagtaagccctcttcagaatctggcttcaatacataatatgaaagaatacagcaatcattccattttctcaccatctttagaggagcagactgcggtgtcaggagctgtgaatgattctataaaggctattgcttctattgctgaaaaatactttggttcaacaggactggtgcggctgcaagacaaaaaagttggagctttaccttacccttccatgtttcccctcccattttttccagcattctctcaatcaatgtacccatttcctgatagagacttgagatcgttacctttgaaaatggaaccccaatcaccaggtgaagtaaagaaactgcagaagggcagctctgagtccccctttgatctcaccactaagcgaaaggatgagaagcccttgactccagtcccctccaagcctccagtgacacctgccacaagccaagaccagcccctggatctaagtatgggcagtaggagtagagccagtgggacaaagctgactgagcctcgaaaaaaccacgtgtttgggggaaaaaaaggaagcaacgtcgaatcaagacctgcttcagatggttccttgcagcatgcaagacccactcctttctttatggaccctatttacagtataatttttgaggactctcaaaaaaattcaagaaaagtgaggctgtcaggatgcaaatatgccgaggagacatttaggcatctgactcttggctgtgaaggttttgaaaggaccctgaatttaacagcaacccagctgcaaacagcagccactgatgatgcagggatgcagagcagcaggagaaaagaagctgggtctctgagtgactgtgtggagcagagctgccttgccatcctgaacaacatactccttgactttagatgcaaatactgtgacagatcatttagcatatcttctaacttgcaaaggcatgttcgcaacatccacaataaagagaagccatttaagtgtcacttatgtgataggtgttttggtcaacaaaccaatttagacagacacctaaagaaacatgagaatgggaacatgtccggtacagcaacatcgtcgcctcattctgaactggaaagtacaggtgcgattctggatgacaaagaagatgcttacttcacagaaattcgaaatttcattgggaacagcaaccatggcagccaatctcccaggaatgtggaggagagaatgaatggcagtcattttaaagatgaaaaggctttggtgaccagtcaaaattcagacttgctggatgatgaagaagttgaagatgaggtgttgttagatgaggaggatgaagacaatgatattactggaaaaacaggaaaggaaccagtgacaagtaattttacatgaaggaaaccctgagggatgactatgaagaaaccagtgcccctggagatgagttgcaagacaccccaaggtgaggtataaagaggaagaatataaaagtggacttttctgctctagatcatataaggcacttcacagatagccctcaaaaatgaggaaaaatggaagattaatcaatattctgaagctggagctgtcttcttttagtacttcccaatgtgccagaggaacttaagcagccgttacacagaaagtccaaatcgcaggcatatgctatgatgctgtcacttgtctgacaaaggagtcccctcccattcctacatccccacagttcttcccaacgtgtggcacagtatggccagggctgcggcggaatccagtgctatccagtccataagccacgtatgacgttatcaaggttgacccagagtgggaccaagtccaacagtagcatggctctttcatataggactatttacaagactgctgagcagaatgccttataaacctgcagggtcactcatctaaagtctagtgaccttaaactgaatgatttaaaaaagaaaagaaagaaaaaagaaactatttattctcgatattttgttttgcacagcaaaggcagctgctgacttctggaagatcaatcaatgcgacttaaagtgattacagagaaaacaaaaaacttggggggctgaaagcatcttccaatttaccccaccttagggtatgtgtgggcgagaagggcacctgagatggcagcattgatatgaatgaacactccatagaaactgaattctcttttgtacaacatcacctgacatgatagggaacagttgcttttaattacagatttaatttttttcttcattaaagatttatgtaatttaaccctttgaagacagaagtaggtggatgaaatgcacagtcccttattatacaaactgataacagggagtacttggacccccttttgccttcttaagtacattgtttaaaattaggggaaaaagggtatgtgtatattgtaaactatgggatgttaacactccaagggggttaagtcagtgaagtaacctattcatcaccagtaccgctgtaccactaataaattgtttgccaaatccttgtaataacatcttaattttagacaatcatgtcactgtttttaatgtttatttttttgtgtgtgttgcgtgtatcatgtatttatttgttggcaaactattgtttgttgattaaaatagcactgttccagtcagccactactttatgacgtctgaggcaca

SEQ ID NO: 8219 - DNA, 906 bp, Homo sapiens
  SIMILAR (903)..(835): 861254mologous to Homo sapiens Fragment of human secreted protein encoded by gene 27,accession number Y36495,Smith-Waterman Score=124.
ttaacaacattggtccatgactcttaggccaaaactcccaatcctgttaaaccggtgcccattggttgcaagataccccaactggagccttctgcctagggcagaacgcagagccacgtatcgtggggtgcttggtatactgcaaatccgaggcactgcattcagagatgagccaagtttgtcgctgttaatcctaaatgccacaagccagagaacagcaaagtcaaaacgctggtcagccgtggtaaagaatccatttcccccgagtgagcggtccctcccaatcgaatcccaaattcgcagtagccagccgcggcttcttctcgctgtctctctcctctgcacagcctgaccccctcccacccccgcttggagaggcactcgctctttcactccatcccgtgcccagacgctccaccgaaaccgtggcgggggattcttcggagctgcagctggggctacggtccccgcaacagccgctagctggactcgccttcctcgcccgcctcttccttctcttcccccctccttaacggtgcaaatccaaacccaattagaacgacaggcgccggagctcggtggacagccaaatccacctcgtcgggcgcgagagcgcacatcctctcgccggtcttcgcgtctgcgtctccctcccgctgttggcgcgttgcttcgggcaagtactgcaaggtgttccggggctctggattccaagcccaggtggttcactggcgtctcagggagacggagagaggaaagacacatgggtgtggtagtgatgagagtcagggtggaagcccgggttagctcgtaagaatccaaaatataagggctcttaggtgatccacccacctcggcctcccaaagtgctgggattacaggcgtgagccaccgtgcccagcccat

SEQ ID NO: 8220 - DNA, 985 bp, Homo sapiens
tcactggatccctggacatttcaacaaggtcgcgaggtcctgagttagtgtgggttgatctctcctctctgagatatttgctacttccagctcaccagactcgagcagcatgataccaccaatgtggctgaccagcatgatgttctgtgtaggtggctgggcacagaggaagctcgggctttgcggaggaacaaacacagacgatgacggggacagaggttgccggtttctagaaagtggctgttgggcacagaggaagcttgggctctcaggtgatccacccgcctcagcctcccaaagtgctgggactacaggcatgagccaccatgcccggcttaatttctttcttttttttttttttttttgcattttttagtagagacgggggggttcaccatgttggccaggctggtctcgaactcctgaccctcaggtgatccacccggctcagcctcccaaagtgctgggatttacagacgtgagccaccatgcccggccacttttatttattttgtgagacagggtctaactctgtttcccaggctggagtgcagtgacatgattttggctcactgcagcctccccctcctgggttcaagcagttctcctgcctcagcctcctcagtagctgggattacaggcacatgccaccacgcccggctaattttttgtatttttagtagagatggggttttaccatgttggccaggctggtcttggactcctgacctcaggtgatccacctgcctcggcctcccaaagtgttgggattacaggcatgagccaccatgccgggccaaccatgaagctcttaaatccacagtcagaggtaatcttttcacctcggaattcccacagcactctccttacaccactttcaagacatttaccacatcctatctcaatttctacttggtgtatacattatgctccattgcatactgtgagcatctccgcagaagaagccccatgactctttgcatgt

SEQ ID NO: 8221 - DNA, 2091 bp, Homo sapiens
  SIMILAR (616)..(2088): 991254mologous to Homo sapiens dJ977L11.1 (KIAA1229 protein),accession number AL136382,Smith-Waterman Score=2466.
ccgactcagagcacaagaaggattgccacggtttccattgcagcagccgtggcgcctctgaccctttttttatatcgcggcgacggcgggctgtcgtcacgacgacgtgcggacgcagcggcgggggccttatgtggagaagtcgctgtgaagccacctataaatccatttactgaatttatggagaaggctgtaaatgatggaagtcattcagaagaactcttttgccatcttaaaactatatcagagaaagaagatttaccacggtgtaccagtgaaagtcatctcagctgcctgaagcaggacattctaaatgaaaagactgaattggaagcaacacttaaggaagcggagttggtaactcattctgtagaattgcttttgccactatttaaggacaccattgaaaagattaattttgaaaatgcgaatctttctgcattgaatttgaagatttctgaacagaaggaaatattaataaaagaattagacaccttcaaaagtgtaaaactagctttagaacatcttcttagaaagagagactacaaacaaacaggagacaatttatccagcatgttgctagaaaatctaactgataatgaaagtgaaaatactaatcttaagaagaaggtatttgaaaaggaggcccatatccaagaactttcttgtttgtttcagagtgaaaaggcaaatactttgaaagcaaaccgtttttcccaatcagtaaaagtagtacatgaacgactacagatccaaattcataaaagggaagctgagaacgataagttgaaagaatatgtaaagagcttagaaaccaagatagccaagtggaacctgcaatcaagaatgaataagaatgaggctatagtgatgaaagaagcaagtaggcaaaaaactgtagctttaaaaaaggcatctaaagtttacaaacaaaggcttgaccattttacaggagctattgaaaagcttacttcccaaattagagatcaggaagccaagttgtctgaaacaatttcagcttccaatgcctggaaaagtcattatgagaaaattgtaatagaaaaaaccgaattggaagtacagattgaaacaatgaaaaagcaaatcattaatcttttggaagatctgaagaaaatggaagaccatggaaaaaattcatgtgaagaaattcttagaaaagttcactcaattgaacatgaaaatgaaactctgaatcttgagaatacaaaattaaagcttagattcccatgtagaattactgagtcaaagaatatgaacattttgattgttcttgatatgctttgctacatttcttctgaaaagactacacttgctgctttgaaggatgaagttgtatctgttgaaaatgaactctcagaattgcaagaagtagaaaaaaaacagaaaacccttattgaaatgtataaaactcaggtacaaaagttgcaagaagcagctgaaatagtaaaaagcagatgtgaaaatttgctacataaaaataaccaaataacaaaaaccaaaaataaaaatgtagagaagatgagaggccagatggagtctcatctgaaggagttagagcgtgtctgcgattccttgacggcggcggaacggaggcttcacgagtgtcaggagagtctgcagtgctgcaaggggaagtgtgcagaccaggaacacaccattagggagcttcagggccaggttgatggaaatcacaatcttctgacaaagctttctctggaagaggaaaactgtcttattcagctgaagtgtgaaaaccttcaacaaaaattagaacagatggacgcagaaaataaagagcttgagaagaagctggcaaaccaagaagaatgtcttaagcacagcaatcttaagtttaaagagaaatctgcagaatatacagcattggccagacaactggaagctgctttagaagaaggaagacaaaaggttgctgaagaaatagagaaaatgtcatctagagagagtgctttacaaattaaaatattagatctggaaactgagcttagaaagaaaaatgaagagcaaaatcaacttgtttgcaaaatgaacagtgatccagagactccatga

SEQ ID NO: 8222 - DNA, 2149 bp, Homo sapiens
  SIMILAR (1553)..(1822): 441254mologous to Homo sapiens dJ977L11.1 (KIAA1229 protein),accession number AL136382,Smith-Waterman Score=142.
atgatgaccaaagatgggctagtctttggtctccaacgtggatctccaatattatatgtccagggactgagcaggttcagatcattttctgtggcttcaggtgacagcaaaagaaccagacacagggaaaagttgcccttgcttgaagctggggagagagaccacaactgctatggttctccgcagatactagctttccaggcaatatgtaaaattgccaagccaggaaaggagcagtcttgctccaagcttgtggggcacacttttgaccccctattgattgaagccaggaagcctgaggagaggcaaaagctcccagatccttgtgtgaagtggggtggagtggggaattttccacccgtaaagagggttggagacatcaggatttttgtttcccagggtggcaagttctctcaggccccagagggtccagaggtgacatctgggagccaaggactagagtcaaaaaccttagaagtctacccggtattctattgtactgtggctgagctggcactcaaccacaatgtgcagccttcccactctaccctcccctttccacaggcagaggagcctcactcagtggccaccaccacaggcccatggggagtcctgccaggctgctgtcagtgttcccttaaggcccaagggctcttcagtcagcttgtcatgaacgctgcctgtactgggattcacacttcggggcagtgggctccactctggcccagcacagttccagagatgccatccaagagcagtggcctggaatcagggaccccaagaacctgctttgtgctctaccctgctgtggccaagctgttaccaaggggcactttagcttacagtggcaagggttgccaaaactcaagtgctaaccactgggatggtacacagattcattctccatgccatgcagcagctgccagggaatacggggggaagagtggcatcagtgattcaagactgtctcctaccctcttcagtgcctctttcagcaatatgaatttaaaactagattttaaagtatttaaatatggctgctttgaatgttttgaagccacagctggtgccaatgtgttgataaaaattattcgggaaagcaagtacaagaatacggatgacattgatatactttccaggcaagccactcctgtcattgcccaattggctcatgaacacagtggccatgtggcagggatggaggttgtgtttgggttcagcaatacagacttccatttaccaaggcagacctggctacagccactgtcacatgccagtctgctagcagcagagaccaacactgagtccaaaaatgacaccactccccagggtgatcagccagctacctggcgacttaactctggatatggatatgccttccctgcatgtaatgcttctgccaaaaccatccatggacttacagaagtcttatacactgtcctggttgatggaaatcacaatcttctgacaaagctttctctggaagaggaaaactgtcttattcagctgaagtgtgaaaaccttcaacaaaaattagaacagatggccgcaggaataaaagagccttaggaggaagcgggcaacccaagaagaatgtcttatgcacagcaatcttaagtttaaagagaaatctgcagaatatacagcattggccagacaacctggaagctgctttagaagaaggaagacaaaaggttgctgaagaaatagagaaaatgtcatctagagagagtgctttacaaattaaaatattagatctggaaactgagcttagaaagaaaaatggaagagcaaaatcaacttgttttcaaaaatgaacagtaaagcacaacatcaggaagtgtgtttgaaagaagtacaaaatagtcttgagaagtcggaaaatcaaaatgagagtattaagaattatttacagtttctttaaaacttcttatgtaacaatgtttgaataaattgtcaaatttattttctctaagtagtagatttttattatgagtctaaaatgtgattgggtaaaaaaataaatatactaccagttacattttatgatttatgagtggtagattagaggtttttatgtaaagatttttgaaacataatttatctaactgaaactttaaaataggatagttgttaaaaaaaaaaaaaa

SEQ ID NO: 8223 - DNA, 5106 bp, Homo sapiens
  SIMILAR (577)..(4461): 881254mologous to Homo sapiens MN1,accession number X82209,Smith-Waterman Score=6060.
atggatgaaagcagtgtacattccagtgtgggagacagacatgtggacagagtctccacatcacaggttgctgaaaggactcgttgcaataagatgtggagaattgagaccaagtctccaagtggggacaatgagggcacagggacggtcatcgagaagaagacaaggctctcggggcaagggttttgccttcagctctcagaagggctgcagaacttgcaggcccagaggagaaaaatcaagttcagagaaatggaagaccctagttcaagacccctctgcagcagccttgacattgcgctgtgcgcttctgtcaaaccctctgcaggcttcccccagcggcccaaggtcaagcccctctgcgtcctcggctcgggggccggcaccggcgatgccgagcggagcctccagtcctccgacccgctgaagaagcagcagccgctcgcccggagcctacggggattgtgcgagcggatcgtgctcggtggaggctcgggctgcggggcgcggggactccggggggcggggggagggaccgctctgtcggtgcccggcgccagccgcggctttgaaggtatgtttgggctggaccaattcgagccccaggtcaacagcaggaacgctggccagggcgagaggaactttaacgagaccggactgagcatgaacacccactttaaggccccggctttccacactggggggccccctggccctgtggatcctgctatgagcgcgctgggcgaacccccgatcttgggcatgaacatggagccctacggcttccacgcgcgcggccactcggagttgcacgcaggggggctgcaagcgcagcctgtgcacggcttctttggcggccagcagcctcaccacggccacccgggaagtcatcatccccaccagcatcacccccactttgggggcaacttcggtggcccggaccccggggcctcgtgcctgcacgggggtcgcctgctcggctacggcggcgcagccggaggcctgggcagccagccgcccttcgccgagggctatgagcacatggcggagagccaggggcctgagagcttcggcccgcagcgaccggggaacctcccggacttccacagttcaggtgcctccagccacgccgtgccggccccatgcctgccgctggaccagagccctaaccgagccgcctccttccacggcctgccgtcctccagcggctccgattcccacagtctggagccacggagggtgacgaaccaaggagccgtcgactcgctggaatacaattacccgggcgaggcgccctcgggacattttgacatgttttcgccctctgactccgaagggcagctgcctcattatgcagcgggtcgccaggttcctgggggcgctttcccgggcgcctcggccatgcccagagctgcgggcatggtgggcttgtccaaaatgcacgcccagccaccgcagcagcagccccagcagcagcagcagccccagcagcagcagcagcagcatggtgtgttctttgagaggttcagtggggccagaaagatgcctgtgggtctggagccctcagtgggctccaggcacccgttaatgcagcctccccagcaggccccgccaccccctcagcagcagcccccgcagcagccgccacagcagcagccgccgccgccacccgggcttctagtccgacaaaattcgtgcccgcctgcgctccctcggccccagcagggcgaggcgggcacgcccagcggcggcctgcaggacggaggccccatgctgcccagccagcacgcgcaattcgagtatcccatccaccggctggagaaccggagcatgcacccttattccgagcctgttttcagcatgcagcatcctcctccgcagcaggcgcccaaccagcggctgcagcatttcgacgcgcccccctacatgaacgtggccaagaggccgcgcttcgactttccgggcagcgcgggagtggaccgctgcgcttcgtggaacggcagcatgcacaacggcgctctggataatcacctctccccttccgcctacccaggcctacccggcgagttcacaccgcctgtgcccgacagcttcccttcggggccgcccctgcagcatccggccccggaccaccagtccctgcaacagcagcagcagcagcagcagcagcagcaacagcagcagcagcagcagcaacagcaacagcaacagcagcagcagcagcagcgccaaaacgcggccctcatgattaagcagatggcgtcgcggaatcagcagcagcggctgcgccagcccaacctggctcagctaggccaccccggggacgtgggccagggcggcctggtgcatggcggcccggtgggcggcttggcccagccgaactttgagcgcgaaggcggcagcacgggcgccgggcgtctgggcaccttcgagcagcaggcgccgcacttggcgcaagagagcgcgtggttctcaggtccgcatccgccgcccggagacctgctgccccgtaggatgggcggctcgggtctgcccgctgactgtggcccgcacgaccccagcctggcgccccctcctccgcctggtggctcgggggtgctgttccggggccctctgcaggagccgatgaggatgcccggagagggccacgtgcccgcgctgccttcaccgggcctgcagttcgggggcagtctgggaggcctgggtcagctgcagtcgcccggggcgggcgtggggctccccagcgctgcttcggagcgccggcccccgccgccggactttgctacgtctgcgctcgggggccagccgggctttccgtttggtgcagccggccggcagtccacgccgcacagcggtccaggcgtgaactcgccccccagcgcgggagggggcggtggcagctctggtggcggcggtggcgggggtgcctacccgccgcagcctgatttccagcccagccagcgcacctcggccagtaaattgggcgcgctctcgctgggctccttcaacaagcccagctccaaggacaacctgttcggccagagctgcctggctgcgctctccaccgcttgccagaacatgatcgccagcctcggggcccccaacctcaacgtgaccttcaacaagaagaacccgccagagggcaagaggaaactgagccagaacgagaccgacggcgcggcagtggccggcaacccgggctcggattacttcccaggagggactgctcctggggccccaggacccggaggcccgtccgggaccagtagcagcggctccaaagcctcggggccgcccaaccctccagcccagggggacggcaccagcctctcccccaactacaccctggaatccacgtcggggaatgacggcaagccggtctccgggggcggcggccggggacggggtcgcagaaaaagggacagtggtcacgtgagccctggcaccttctttgacaagtactcggcggctccggacagcgggggcgcacctggggtgagcccagggcagcagcaagcgtcaggcgcagccgtcgggggaagctccgcaggcgagacgcgcggggcaccgacgccccacgaaaaggcgctcacgtcgccatcctgggggaagggggctgagttgctcctgggggatcagccggacctcattgggtccctggacggcggggccaagtcggacagtagttcgccaaacgtgggtgagttcgcctcggacgaggtgagcacgagctacgccaatgaggacgaggtgtcgtccagctctgacaacccccaggcactagttaaagcgagcaggagtcccctggtgaccggctcgcccaaactccctccccgtggggtaggcgccggggaacacggaccgaaggcgcccccgcccgccctcggcctgggcatcatgtctaactctacctcgacccctgacagctacggcggcggtgggggcccgggccatccgggcactccgggcctggagcaggtccgcaccccgacgagcagcagcggcgccccgccacccgacgagatccaccccctggagatccttcaggcgcagatccagctacagaggcagcagttcagcatctccgaggaccagcctctggggctgaagggtggcaagaagggtgagtgcgccgtcggggcctcaggggcgcagaatggcgacagcgagctgggcagctgctgctccgaggcggtcaagagcgccatgagcaccattgacctggactcgctgatggcagagcacagcgctgcctggtacatgcccgctgacaaggccctggtggacagcgcggacgacgacaagacgttggcgccctgggagaaggccaaaccccagaaccccaacagcaaagaaggcctttctgagcccgtgcttagaaccacttatgggcacggagatgaggagctgtatttcctaccaacagatgctggagataaaaaccaactctgtgtcttgcctcctcatggccgtcaccagctgccagccacactgcttgattatgatgatgatgatgatgatgatgatgatgatggcaatggtgatagtgacagcagcatccatggagcaattgctaagtaccaaaccctgatgatctgtcctttcagagttgaagctgagctgctgtttgctgggcaggccatgcagcccacacgggggtcctcagaggccttgcagggaacacccctctgccagagcaagatgtgtgagcacatccctgaagccagcaagcctgcagctagcggtatcattaccatcatggtagccggagccaggggtgccatctgccagcagggagagaagtatgcacatctcagagtaggggtgttagagaaacatcgccatggggctgacagccagggctcaccttatgctgaaggctttccagctgtcatctcacttaatcctcctagcagcctgcaagcccacgacctccctgcaaacaaggcctcagcatcccagcctggcagccacttgcagtgcctgtctgtccactgcacagacgacgtgggtgacgccaaggctcgagcctccgtgcccacctggcggtccctgcattctgacatctccaacagatttgggacattcgtggctgccctaacttga

SEQ ID NO: 8224 - DNA, 786 bp, Homo sapiens
  SIMILAR (580)..(783): 911254mologous to Homo sapiens MN1,accession number X82209,Smith-Waterman Score=328.
atgagggccatagcaaatgacgaggacatttctgactccctaaaagtgacagcacgaatcttcatagatcaggagcatggactgagcacctactgggtgcctggcttgcaacctcctcttatgcgaacttggacaagtgacatcacctctctgagcctcaggttcaaggtgcgtgactgtgcacaactgacccctatgcaaagcccttccccggcgatgaagcagtgcgtgggaacttatgtggatgaggaaattgaggctcagaggagtcaatttcctcagaaccgacgggctgtgcttttgcataagcacgcgggcaacaccaccatcaggaggaagagcaagatgtgtgagcacatccctgaagccagcaagcctgcagctagcggtatcattaccatcatggtagccggagccaggggtgccatctgccagcagggagagaagtatgcacatctcagagtaggggtgttagagaaacatcgccatggggctgacagccagagaagaggtgagcacctagcccggagtacccagggagcccttgatatgggcagttgttgggctctgtccttcttcccgaatacccctggctttccctcagcccacgacctccctgcaaacaaggcctcagcatcccagcctggcagccacttgcagtgcctgtctgtccactgcacagacgacgtgggtgacgccaaggctcgagcctccgtgcccacctggcggtccctgcattctgacatctccaacagatttgggacattcgtggctgccctaacttga

SEQ ID NO: 8225 - DNA, 7568 bp, Homo sapiens
  SIMILAR (888)..(4913): 991254mologous to Homo sapiens MN1,accession number X82209,Smith-Waterman Score=7243.
gcgcggaggcagggaaccggagccttggagcgacccaacccctcgtctcgctgccctcccgcgcctgcaacggtgcgcggagactccggcgaactcagacacccaacggcggagaacagaagcggcaggcggcggacgtggcccggaagctgcgcgccgaacgcagcgcacccgctgccgagcagaggagccgcgcctttccccgaccctcggctccagcccccggcgcctgccgcctcgcagcccctctgcgtcctcggctcgggggccggcaccggcgatgccgagcggacgctccagtcctccgacccgctgaagaagcagcagccgctcgcccggagcctacggggattgtgcgagcggatcgtgctcggtggaggctcgggctgcggggcgcggggactccggggggcggggggagggaccgctctgtcggtgcccggcgccagccgcggctttgaagggtctccctcccctgcccttagcagctctgccacggactccgggaggctgcgggcggcgtcctgagggctccccagcagacccaatcggacttgagaaggtgatcgctctgctctcccaacccccttccctccccattccccccacttaactttttgtctccgttcatccgcggcttcgtcccctccccggcagacccacccgcggctgtgacaaccgcccggggcatgggccccccaacacggctcctagaggccccgcggcctcgcaagatgtgagaggccctccccgggcagaatcggagcttcaggagaggagctaataccccgccccccgtccctcacatcaggcggggtggaggtgcgcgctgagcccccgcggtgctgagcgtcccggagcgcccaatcctgggctggaacgagtagctggccggaggcgcgccgcggagagccggctgtcatgccctattgatccccctctgccccccgccaagtatgtttgggctggaccaattcgagccccaggtcaacagcaggaacgctggccagggcgagaggaactttaacgagaccggactgagcatgaacacccactttaaggccccggctttccacactggggggccccctggccctgtggatcctgctatgagcgcgctggggcaacccccgatcttgggcatgaacatggagccctacggcttccacgcgcgcggccactcggagttgcacgcaggggggctgcaagcgcagcctgtgcacggcttctttggcggccagcagcctcaccacggccacccgggaagtcatcatccccaccagcatcacccccactttgggggcaacttcggtggcccggaccccggggcctcgtgcctgcacgggggtcgcctgctcggctacggcggcgcagccggaggcctgggcagccagccgcccttcgccgagggctatgagcacatggcggagagccaggggcctgagagcttcggcccgcagcgaccggggaacctcccggacttccacagttcaggtgcctccagccaccgcgtgccggccccatgcctgccgctggaccagagccctaaccgagccgcctccttccacggcctgccgtcctccagcggctccgattcccacagtctggagccacggagggtgacgaaccaaggagccgtcgactcgctggaatacaattaccgggcgaggcgccctcgggacattttgacatgttttcgccctctgactccgaagggcagctgcctcattatgcagcgggtcgccaggttcctggggggcggctttcccggggcgccctcggccatgcccagagctgcgggcatggtgggcttgtccaaaatgcacgcccagccaccgcagcagcagccccagcagcagcagcagccccagcagcagcagcagcatggtgtgttctttgagaggttcagtggggccagaaagatgcctgtgggtctggagccctcagtgggctccaggcacccgttaatgcagcctccccagcaggccccgccaccccctcagcagcagcccccgcagcagccgccacagcagcagccgccgccgccacccgggcttctagtccgacaaaattcgttgcccgcctgcgctccctcggccccagcagggcgaggcgggcacgcccagcggcggcctgcaggacggaggccccatgctgcccagccagcacgcgcaattcgagtatcccatccaccggctggagaaccggagcatgcacccttattccgagcctgttttcagcatgcagcatcctcctccgcagcaggcgcccaaccagcggctgcagcatttcgacgcgcccccctacatgaacgtggccaagaggcgcgcttcgactttccgggcagcgcgggagtggaccgctgcgcttcgtggaacggcagcatgcacaacggcgctctggataatcacctctccccttccgcctacccaggcctacccggcgagttcacaccgcctgtgcccgacagcttcccttcggggccgcccctgcagcatccggccccggaccaccagtccctgcaacagcagcagcagcagcagcagcagcagcaacagcagcagcagcagcagcaacagcaacagcaacagcagcagcagcagcagcgccaaaacgcggccctcatgattaagcagatggcgtcgcggaatcagcagcagcggctgcgccagcccaacctggctcagctaggccaccccggggacgtgggccagggcggcctggtgcatggcggcccggtgggcggcttggcccagccgaactttgagcgcgaaggcggcagcacgggcgccgggcgtctgggcaccttcgagcagcaggcgccgcacttggcgcaagagagcgcgtggttctcaggtccgcatccgccgcccggagacctgctgccccgtaggatgggcggctcgggtctgcccgctgactgtggcccgcacgaccccagcctggcgccccctcctccgcctggtggctcgggggtgctgttccggggccctctgcaggagccgatgaggatgcccggagaggccacgtgccgcgctgccttcaccggcctgcagttcgggggcagtctgggaggcctgggtcagctgcagtcgcccggggcgggcgtggggctccccagcgctgcttcggagcgccggcccccgccgccggactttgctacgtctgcgctcgggggccagccgggctttccgtttggtgcagccggccggcagtccacgccgcacagcggtccaggcgtgaactcgccccccagcgcgggagggggcggtggcagctctggtggcggcggtggcgggggtgcctacccgccgcagcctgatttccagcccagccagcgcacctcggccagtaaattgggcgcgctctcgctgggctccttcaacaagcccagctccaaggacaacctgttcggccagagctgcctggctgcgctctccaccgcttgccagaacatgatcgccagcctcggggcccccaacctcaacgtgaccttcaacaagaagaacccgccagagggcaagaggaaactgagccagaacgagaccgacggcgcggcagtggccggcaacccgggctcggattacttcccaggagggactgctcctgggggccccaggacccggaggccgtccgggaccagtagcagcggctccaaagcctcggggccgcccaaccctccagcccagggggacggcaccagcctctcccccaactacaccctggaatccacgtcggggaatgacggcaagccggtctccgggggcggcggccggggacggggtcgcagaaaaagggacagtggtcacgtgagccctggcaccttctttgacaagtactcggcggctccggacagcgggggcgcacctggggtgagcccagggcagcagcaagcgtcaggcgcagccgtcgggggaagctccgcaggcgagacgcgcggggcaccgacgccccacgaaaaggcgctcacgtcgccatcctgggggaagggggctgagttgctcctgggggatcagccggacctcattgggtccctggacggcggggccaagtcggacagtagttcgccaaacgtgggtgagttcgcctcggacgaggtgagcacgagctacgccaatgaggacgaggtgtcgtccagctctgacaacccccaggcactagttaaagcgagcaggagtcccctggtgaccggctcgcccaaactccctccccgtggggtaggcgccggggaacacggaccgaaggcgcccccgcccgccctcggcctgggcatcatgtctaactctacctcgacccctgacagctacggcggcggtgggggcccgggccatccgggcactccgggcctggagcaggtccgcaccccgacgagcagcagcggcgccccgccacccgacgagatccaccccctggagatccttcaggcgcagatccagctacagaggcagcagttcagcatctccgaggaccagcctctggggctgaagggtggcaagaagggtgagtgcgccgtcggggcctcaggggcgcagaatggcgacagcgagctgggcagctgctgctccgaggcggtcaagagcgccatgagcaccattgacctggactcgctgatggcagagcacagcgctgcctggtacatgcccgctgacaaggccctggtggacagcgcggacgacgacaagacgttggcgccctgggagaaggccaaaccccagaaccccaacagcaaagaagcccacgacctccctgcaaacaaggcctcagcatcccagcctggcagccacttgcagtgcctgtctgtccactgcacagacgacgtgggtgacgccaaggctcgagcctccgtgcccacctggcggtccctgcattctgacatctccaacagatttgggacattcgtggctgccctaacttgaatgacaagaaagatcccctcctctaccaggcccttcctctccccctgtctgtttccttccccctcaaccttaccccacccctctgttaatttgaaagggccactattgctgagtggatgagttttttttttttcctctaggttggtacctgcttagtggcatatggaccggaaagggttaatttaaagggggggaacctcaaaagtttttttaaaaaagaaacttgtctgccacagtatgttaccagtgttaacccttctgcagttagcaaacttttgcttaagcctttttcctctagatactccccatgtttcggtaatcttggcatacattttttagatgacctctttccttgttttgttttcatgctgctgtatgtccaagtattgttatttcataataagacaagagttgctttcttttttattctttttccttttcttaccccctccccttttattttctttttgctttgttcactgcttattaaaatggaaatcctggagaatagtagttctggaatattgccgggtgaaagtccaattgtcatcacaatgttatatattgacaccccagtgtcatcagtcaggcaggagccaaacaatgaatgcccctcttaggtattccgcctgggattttgttttgtctgttccctaagaaaatatattttcattcctgcaaacacagtgctcagccttcagttcccttccacttgagttctctcttctcctgctggaagccgcccctctctgcgatggacgtgaggacgtgtccagctctgctctgtgggaaggagttggaatgttcgacagcagtgttttctctccttttctgggcctcctcgcaaatgcccaggccctgcattttcacgctgtgctaagcagcctttggtctgcatgggggatggtgtgctcccagcctgcagtctttggagcaaggctgctgcccgtgccttgggtgctggagttggaggaggctgttctcagccctttcccttttctgaaagctgttcctggccgggcatcccagggaagaaggaggggactgcgtgtatctcctccacctctcccattccatccccagtccagcctgggcaaccccacccctgggagggatgaggcaccctcttgctcagcctgctcagccttctctgagcctttgcagggatctgcagactcctgagggctagaggacagagaaagagaatagaatgaaatgactttgattcctgcgccttttagttttgaactctggaattcctctgccccctccccaacatttttttggaatctcaccctgttgcaaaactagagccatgtcccaagcatctcacaaaggaataactgctctgagcagagatgagtggtggttggcaggggcaggcaactttgggtgctgctgatgcctgcaaaagccatttatggcttgtggtggggggcacatagattccccggtgggttagacaggaagtaactgatatcacttcacccaaatatataaccgtgatggttatctatttaatttcagtttttgttaacgagcgtgtcttactaaaacgctccactttgagctcccccaccccctccaggtcctcagagtttgcagatctgggctttctaaagcaagtgacctgaaggctctgggctcaccatacaacacccacgttgtttatttcaaagaacttttcagcgaagggagaggagctttcagaaaaacctcactctttcccctcccttctcccctctttccttctgccggtccttttggctggggtctgagtctgcggttctcgcctgggcagtcttgacgaggagcaaaccccgccttcagagggcagacaaagcaggtggcatgaattgatcagcgagaaaggtgtgagccgaggcagttcctgcgttctgctacaaaaggaatggaaagggaagggaatttccccccaccatgggctgtgggagagttgaccgtattctgggcaagactccatgacccctctgattctgcagtgtacagctgtttgagagcctcatcattttacttttgaaacaggaatgatttctccttaattgcttaaggccggggagcaaagtgtcttaacttctgtctttgactttcccagcgttgagtcatcaacactttgccaattagctcatggtcctggcaacctcagaaacccctgaagttttaaaaactttctcgctccccacgaccccagaatgaaacagctttaaaaatagccttaagcaaaaggatgttatttcattaaatttggtttaatggaaagaataaaagtaaatgaaaaacacaccctacacactagactccgaacactggtaatcagtactgcatagcaaactctttgggaaagaaaacgaaaatgttattgcacatgtaaaatatgaaaacttaactctgctgtgtgttaggcaatcctgtaatcttttttgactcttaaaagaaattcatttctgaaatgcttggttggaagactgtgacaatagctcatgaaattgagtgttatttttttctttcttttttaaaaaaatatgtaaagtgcagtcttctgtattcctgcatattgtatatacctgtatatgttttcctgagcagttaaataacaataaatatgacgttaatggtgaaaaaaaaaaaaaa

SEQ ID NO: 8226 - DNA, 758 bp, Homo sapiens
  SIMILAR (561)..(755): 951254mologous to Homo sapiens MN1,accession number X82209,Smith-Waterman Score=328.
gagggaagatgagggccatagcaaatgacgaggacatttctgactccctaaaagtgacagcacgaatcttcatagatcaggagcatggactgagcacctactgggtgcctggcttgcaacctcctcttatgcgaacttggacaagtgacatcacctctctgagcctcagctccaaagtgcgtgactgtgcacaactgacccctatgcaaagcccttccccggcgatgaagcagtgcgtgggaactttcatagatgaggaaattgaggctcagaggagtcaatttcctcagaaccgacgggctgtgcttttgcataagcacgcgggcaacaccaccatcatctgccagagcaagatgtgtgagcacatccctgaagccagcaagcctgcagctagcggtatcattaccatcatggtagccggagccaggggtgccatctgccagcagggagagaagtatgcacatctcagagtaggggtgttagagaaacatcgccatggggctgtgacaaagggctcaccttatgctgaaggctttccagctgtcatctcacttaatcctcctagcagctccacagcccacgacctccctgcaaacaaggcctcagcatcccagcctggcagccacttgcagtgcctgtctgtccactgcacagacgacgtgggtgacgccaaggctcgagcctccgtgcccacctggcggtccctgcattctgacatctccaacagatttgggacattcgtggctgccctaacttga

SEQ ID NO: 8227 - DNA, 397 bp, Homo sapiens
  SIMILAR (98)..(370): 281254mologous to Arabidopsis thaliana rof1,accession number U49453,Smith-Waterman Score=116.
aaccgtgggcgacagttatggagaagcgtctgcaggaggctcagctgtacaaggaggaagggaaccagcgctaccgggaagggaagtaccgagatgctcttgtctccttcagatggagcccgtgaactacgaacgagtgagagaatatagtcagaaagtcctggaacgacagcctgataatgccaaggccttgtatcgggccggagtggcctttttccatctgcaggactatgaccaggcccgccactacctcctggctgccgtgaataggcagcctaaagatgccaacgtccggcggtacctccagctgacacagtcagaactcagcagctaccatagaaaagagaagcagctctacctgggcatgtttggttaacaaagaagaaagatgctcctc

SEQ ID NO: 8228 - DNA, 500 bp, Homo sapiens
  SIMILAR (368)..(499): 1001254mologous to Homo sapiens Human secreted protein, SEQ ID NO: 5056,accession number G00975,Smith-Waterman Score=227.
agccagtgtcccaggcgttctcacgcccgcaacaattcctgagtagggccttgcttgagttcttcggaaagactcatccacccccacatcgcctctttaggaagtcacttaatgctgggcttcattattcccacatccctttccttactacttgcctgcacttcttgagaaaaagactgcagaaaggagaggtggggctttcagtacaaacaagcaaaccgcaggtccctgtggggggactctccaggaagaagggtaatttcctgcctccttaaattggctgctactgtcagttattttgctcccaaccccagagcttcacttgctccttcacttcccagttccgcaagaaccgtgggcgacagttatggagaagcgtctgcaggaggctcagctgtacaaggaggaagggaaccagcgctaccgggaagggaagtaccgagatgctgtgagtaggtaccatcgagctctgcttcagctgcggggtctggatccgagtc

SEQ ID NO: 8229 - DNA, 1071 bp, Homo sapiens
  SIMILAR (302)..(544): 411254mologous to Homo sapiens Human secreted protein, SEQ ID NO: 5056,accession number G00975,Smith-Waterman Score=131.
ggcgttctcaccgcagacaattcctgagtagggccttgcttgagttcttcggaaagtctcatccacccccacatcgtctctttaggaagtcacttaacgttgggcttcagtattcccacatccctttccttactacttgcctgcacttcttgagaaaaagactgcagaaaggagagggggggctttcagtagaaacaagcaaaccgcaggtccctgtggggggactctccaggaagaaggttccgcaagaaccgtgggcgacagttatggagaagcgtctgcaggaggcttcagctgtaacaaggaggaagggaaccagcgctaccgggaagggtaagttaccgagatgctgtggagtaggttaccatcgagctctgcttcagctgcggggtctggatccgagtctgccctctccgttacctaatctcggacctcagggccccggccctcacgcctgaacaagaaaacatattgcataccacccagacaagactgctataacaatctagctgcttgtctccttcagatggagcccgtgaactacgaacgagtgagagaatatagtcagaaagtcctggaacgacagcctgataatgccaaggccttgtatcggggcccggagtggcctttttccatctgcaggactatgaccaggcccgccactacctccttggctgccgtgaataggcagccctaaagatgcctaacgtccggcggtaccctcccaggctgacacgagtcagaactcagcagcctacccatagaaaagagaagcagctcctaccctgggcatgtttggttaacaaagaagaaagatgctcctccagttgaacttaggtggaccgattaaacatgcatgaaggagaaatctgagcctcagcaagagaaattaaccctattacctctgacccagggtgggtttttgtttctaggttctgcacaaacttcactacttagacagtctgagtctttttctgtctatccatctgtttatttctatacctttcaatacatgttattgttgcagatatttggcttgagaaatataaaatagaaaacatacatcaaaaa

SEQ ID NO: 8230 - DNA, 602 bp, Homo sapiens
tcagggcaaatcatttctaatttcacatgctctttattgagacatacctgagactgggtaatttattaagggaagaggtttaattgactcacagttcaatatggctggggagacatcaggaaatttacaatcatggcaaaaccccgtctctacaaaaaatacaaaaattagccaggcatggtgatgcatgcctgtagttctagctatttgacaggttgaggtgggaggatagttcaagctcgggaggtcgaggctgcagtgggccaggctggtcttgaactcctagcctcaagttatcctcccaccttggcctcctgagtagctgggaccacaggcatgagccaccatgtccagctctatccagcctttaaagaagcagtttttactacagatagggaaactgtggcccagagaaagaaaggacttgtctgaggtcacccagctggacaccaatgccctccctctaagcaggcagtccctgtatcatcttggcccccagggcctcaccatcagagcatgtgttccatctaggtcatcaaatttcagtaaatcatcgaagtcgaacagctgtgatggctggaactcctcgtcctcatcttcat

SEQ ID NO: 8231 - DNA, 346 bp, Homo sapiens
  SIMILAR (51)..(152): 451254mologous to Homo sapiens Human secreted protein, SEQ ID NO: 6396,accession number G02315,Smith-Waterman Score=65.
cctcagtggtgtcactgtcaccccatcgttgagctatccagatcctttctggggtggcagcagggtggggcctgagcgatggaccatcttcttctccacccagcccctccggcgcaagagacaccggatcaccgggtagcagccttggattgtaaaagatcttcttctgctgcaatgtgagagaaggatacttcttcaataagtattgcataagtgccagacataggggatataaaggtgaaccagacagttatggactctgccatcaggaaatttttatattccattaggagaaataaacagactataaataagtagagaaataaatatgcatggtaataatgac

SEQ ID NO: 8232 - DNA, 1042 bp, Homo sapiens
  SIMILAR (346)..(35): 351254mologous to Streptomyces ansochromogenes SanE,accession number AF228524,Smith-Waterman Score=100.
atgcagggccccgacgcgccactgctcctgagcgcgagggagctggggcccgggcgccggggctcggcctcctggtaccgccaggagggcggcgcggtgtgcaactggctgcggaagccgcagccgctcgagccacgcaccagtttcccctcggcgcgccgctccgagttccgtccacccaggaggctgccatgggccggccctgcctccgcccagtccgaggagggtcacgcaggcggcagatgccaggcgggcagccccgcccctgcgcgccgcctcagcggcgccttcaagacgctggtcccaggcacccacgcccagggcgcctcggatacccaccccctcggccccccgcacaccccggtcctcgacccctctccgcaggatggtttcccggtcctctggcgaggatcctccaaggcgtctcacatgaaccggctcagaaacgccaaaatctacgtggagagagctgtcaagcagaagaagatctttacaatccaaggctgctacccggtgatccggtgtctcttgcgccggaggggctgggtggagaagaagatggtccatcgctcaggccccaccctgctgccaccccagaaggatctggatagctcagcgatgggtgacagtgacaccactgaggatgaggatgaagatgaggacgaggagttccagccatcacagctgttcgacttcgatgatttactgaaatttgatgacctagatggaacacatgctctgatgtcccgcatggtccagaatgagatcccctacttcatctggaccactcggcgggatgtgctcgactgtcgcttcctctccaaggatcagatgataaaccactacgcccgggctggctcctttaccacaaagaaaccggaggctaatcaggaagccacttaaactgccacaagaaattctatccagaactcagaaagccttgcaatcaattttctgactgattttttaaaatgctgttctattttacaagtagactccaatctctttttggagcaagacgagtgaaataattataatacta

SEQ ID NO: 8233 - DNA, 1101 bp, Homo sapiens
  SIMILAR (287)..(162): 591254mologous to Homo sapiens Human secreted protein sequence encoded by gene 11 SEQ ID NO:72,accession number B24447,Smith-Waterman Score=108.
  misc_feature (1)...(1101): n = a,t,c or g
atgagcacaggggaaatgaaatttattgaaggagatgccctgcccagagaggagaaatctggcagtctggccacagcagccttgctgagctgcagtgggctccacccatttcaaacttcctggctgcctgtttacactgtgagggtaaaactgcctactcaagccttagcaatggtggatgcccctcccccgaccaagcttgagtgtcccaggttgatctcagtttgctgctatgctgggagcgagaatttcaagccagtggatcttagtttgctgagctccatagggggctctggtggggtaggcaccagagggaatctcctggtctgcgagttgcgaagaccgtgggacaagcgcagtatctgggccggagtgtgcaaggttcctcagactcagtccctcacggtttcccttagcttagctaggtctgagttcttatctcacaaccaggaagacttaggtgcacagaccctggagagtgagtggagtaaaaattattcagcaagatggaagctctcagcaaagagggagtgtggggtgtggttcccctacccaaagtggggccactgccaaacaagatttacagagatccgtagagcaactgatgttcttgtgtactttcgtggcaaaactgctggtgagtgtaacctttctgcagaaagtaaaacagtggccttgctgaggaaatgacatttatattcaagtgctatttctttacggcaccggggaacaagcatttcaaacacactgatggcccattcctgaaggatcacaagaagctaaaattcattacctgtataagggagtttaagttagattttcacccttttcatgttttcttacattttctacaatgggtaaacgatggaaataagaaaaacaatgtttatgttttgaaaatgtctcaatgggtctgccagttcatgttttccatgagcagcactgtgatgccgcgctgagatgctccaaaaatatggaacgcttcacgaatttgcgtgtcatccttgcgcaggggccatgataaacatcactgtttcgttccaattttagtatatgtgctgacgaaatggtcgggccgggaaatccggacggnnntgcatt

SEQ ID NO: 8234 - DNA, 1437 bp, Homo sapiens
  SIMILAR (278)..(778): 901254mologous to Homo sapiens Human secreted protein encoded by gene 68 clone HKIXR69,accession number W74797,Smith-Waterman Score=758.
aaggatgtctcgtatctcagatgacagtcgaactgcaagccagttggatgaatttcaggaatgcttgtccaagtttactccgatataattcagtacgacctttagccacattgtcatatgctagtgatctctataatggttccagtatagtctctaagtattgaatttgaccgggattgtgactattttgcgattgctggagttacaaagaagattaaagtctatgaatatgacactgtcatccaggatgcagtggatattcattaccctgagaatggaaatgacctgcaattccgaaaatcagctgtaatcagttgggagtagttaccataagaacctgttagctagcagtgattatgaaggcactgttattttatgggatggattcacaggacagaggtcaaaggtctatcaggagcatgagaagaggtgttggagtgttgactttaatttgatggatcctaaactcttggcttcaggttctgatgatgcaaaagtgaagctgtggtctaccaatctagacaactcagtggcaagcattgaggcaaaggctaatgtgtgctgtgttaaattcagcccctcttccagataccatttggctttcggcttgttcagatcacttgtgtccactactattgatcttcgtaacactaaacagccaatcatggtattcaaaggacaccgtaaagcagtctcttatgcaaagtttgtgagtggtgaggaaattgtctctgcctcaacagacagtcagctaaaactgtggaatgtagggaaacccatactgcctacgttccttcaagggtcatttcaatgaaaaaaacttttgtaggcctggcttccagtggagattatatagcttgtggaagtgaaaataactctctctacctgtactataaagcactttctaagactttgctaacttttaagtttgatacagtcaaaagtgttctcgacaaagaccgaggaagaagatgatacaaatgaatttgttagtgctgtgtgctggagggcacttacccagatgggggagtcccaatgtgctgattgctgcctaacagttcagggtaccaattaaggtgctagaattggtatgaagggttaactcaagtcaaattgtacttgatccctgctgaaatacatctgcagctgacaatgagagaagaaacagaaaatgtcatgtgatgtctctccccaaagtcatcatgggttttggatttgttttgaaaaatttttttctttttttcttttccctcctttatgagcctttgggacattgggaatacccagccaactctccaccatcaatgtaactccatggacattgctgctcttggtggtgttatctaatttttgtgatagggaaacaaattcttttgaataaaaataaataacaaaacaataaaagtttattgagccacaaaaaaaaaaaaaaaaaaa

SEQ ID NO: 8235 - DNA, 1381 bp, Homo sapiens
  SIMILAR (695)..(1279): 201254mologous to Homo sapiens CENP-F kinetochore protein,accession number U19769,Smith-Waterman Score=59.
atgagaattaaagcaacctctgaagatggaacagttattgctcaggctgagtatggcagtgtggatataggggaagaggtgcttaagaaaggatttgcagagaaatgcagacttgcttccagaactgacatctgtgaggaaaaaaaattggatcctggtcaacttgttctcaggaacctcaaaagccccattcctttgtgggggcatagatcaaaccagtcaaccttcagcaggcccaaggggcacttaagtgagaaaatgactcttgacttgaaggatgaaaatgatgcaggcaatcttataacatttccaaaggaaagtttggctgttggtgactttaatttagggtctaacgtcagcctggaaaaaattaagcaggaccagaaactgattgaagaaaatgaaaaacttaaaacagagaaggacgctcttcttgaaagttataaggcgttagaattgaaagtagagcagattgcccaggagctgcagcaagagaaggcagctgctgtggatttgactaaccacttagaatacactctgaagacctatatagataccagaatgaaaaatctggcagctaagatggaaatactgaaagaaatgaggcatgtcgacatcagtgtccgtttcggaaaagacctttcagatgctatacaagtgttgggatgaagggtgctttactactccagcttctttgaatggattagagataatatgggcagaatacagtctggctcaggagaatattaaaacttgtgaatatgtgagtgaagggaatattttgattgcccaaagaaatgaaatgcagcagaagctgtacatgtcagtagaagattttattctggaagttgatgagtcatctcttaataaacgcttaaaaacattgcaggatttgtcagtctctttagaagcagtgtatggacaagccaaagaaggagcaaattctgatgaaatacttaaaaaattttatgactggaagtgtgataaaagagaggagttcaccagtgttagaagtgaaacagacgcttctctgcaccgtcttgtagcatggttccaaagaaccttaaaggatcaaggtgatgcagacaaggagataatttcaaatacatatagtcaagtactgcaaaagattcattcagaggaaaggctcattgccacagtacaagctaagtacaaggacagtattgagtttaaaaagcagcttattgaatatttaaagaagattcccagtgtggatcacttgctatccattaagaagacattgaaaagcttaaaagctctactcagatggaaattggttgaaaagagtaatttgggaagagtcagatgatcctgatggctctcaaattgagaaaataaaagaagaaataactcagctgcg

SEQ ID NO: 8236 - DNA, 370 bp, Homo sapiens
  SIMILAR (13)..(324): 1001254mologous to Homo sapiens Keratin 8,accession number X74929,Smith-Waterman Score=505.
cgttgctgtcgcgtcaagctggccctggacatcgagatcgccacctacaggaagctgctggagggcgaggagagccggctggagtctgggatgcagaacatgagtattcatacgaagaccaccagcggctatgcaggtggtctgagctcggcctatgggggcctcacaagccccggcctcagctacagcctgggctccagctttggctctggcgcgggctccagctccttcagccgcaccagctcctccagggccgtggttgtgaagaagatcgagacacgtgatgggaagctggtgtctgagtcctctgacgtcctgcccaagtgaacagctgcggcagcccctcccagcctacccctcctgcgctgcg

SEQ ID NO: 8237 - DNA, 656 bp, Homo sapiens
  SIMILAR (1)..(591): 1001254mologous to Homo sapiens beta crystallin A2,accession number AF166331,Smith-Waterman Score=1082.
atgagcagcgcccccgcgccgggcccggcgcccgccagcctcacgctctgggacgaggaggacttccagggccgtcgctgtcggctgctaagcgactgtgcgaacgtctgcgagcgcggaggcctgcccagggtgcgctcggtcaaggtggaaaacggcgtttgggtggcctttgagtaccccgacttccagggacagcagttcattctggagaagggagactatcctcgctggagcgcctggagtggcagcagcagccacaacagcaaccagctgctgtccttccggccagtgctctgcgcgaaccacaatgacagccgtgtgacactgtttgagggggacaacttccaaggctgcaagtttgacctcgttgatgactacccatccctgccctccatgggctgggccagcaaggatgtgggttccctcaaagtcagctccggagcgtgggtggcctaccagtacccaggctaccgaggctaccagtatgtgttggagcgggaccggcacagcggagagttctgtacttacggtgagctcggcacacaggcccacactgggcagctgcagtccatccggagagtccagcactaggctccacggccccagacaccttccctgaggacactcaataaaggttcctgaatcttcctgcc

SEQ ID NO: 8238 - DNA, 2016 bp, Homo sapiens
  SIMILAR (625)..(1347): 951254mologous to Cloning vector pZC320 SopA,accession number U26464,Smith-Waterman Score=1210.
atgggtcagctgcgtgagtaccaggagctgatgttcgtcggtcctaccctggacatcgagattgccacctacaggaagctgctggagggcgaggagagccggctggaatctgggatgcagaacgtgagtatccatacgaagaccaccagcagctatgcaggattttgccgatttcgaaacaccatcaaacaggattttcgcctgctggggcaaaccagcgtggaccgcttgctgcaactctctcagggccaggcggtgaagggcaatcagctgttgcccgtctcactgaccgttcagctggatattacggcctttttaaagaccgtaaagaaaaataagcacaagttttatccggcctttattcacattcttgcccgcctgatgaatgctcatccggagttccgtatggcaatgaaagacggaaacagctatgaccatgattacgaattcgagctcggtaccccagttattggggccatgaactacatacagtcttataaaaacgagcatcctgatgatgaaactgatgaattcctcgtgccagtggaatccagcaactggattgaaaaggcactgaaagcccattggctacaaagatgccgagaaagcagggcgaattccgcacccggatatgaaaatcgaggacgggttgagcaacgtgttggttatacaattgaacaaattaatcatatgcgtgatgtgtttggtacgcgattgagacgtgttgaagatgtatttccaccggtgatcggggttgctgcccataaaggtggcgtttacaaaacctcagtttctgttcatcttgctcaggatctggctatgaaggggctacgtgttttgctcgtggaaggtaacgacccccagggcacagcctcaatgtatcacggatgggtaccagatcttcatattcatgcagaagacactctcctgcctttctatcttggggaaaaggacgatgtcacttatgcaataaagcccacttgctggccggggcttgacattattccttcctgtctggctctgcaccgtattgaaactgagttaatgggcatatttgatgaaggtaaactgcccaccgatccacacctgatgctccgtctggccattgaaactgttgctcatgactatgatgtcatagttattgacagcgcgcctaacctgggtatcggcacgattaatgtcgtatgtgctgctgatgtgctgagtgttcccacgcctgatgagttgtttgactacacctccgcactgcagtttttcgatatgcttcgtgatctgctcaagaacgttgatcttaaagggttcgagcctgatgtacgtattttgcttaccaaatacagcaatacttcagagagaataaaatacctaggaatccaacttacaagggatgtgaaggacctcttcaaggagaactacaaaccactgctcaaggaaataaaagaggacacacacaaatggaagaacattccatgctcatgggtaggaagaatcaatatcgtgaaaatggccatactgcccaaggtaatttacagattcaatgccatccccatcaagctaccaatgactttcttcacagaattggaaaaaactactttaaagttcatatggaaccaaaaaagagcccgcatcgccaagtcaatcctaagccaaaagaacaaagctggaggcatcacgctacctgacttcaaactatactacaaggctacagtaaccaaaacagcatggtactggtaccaaaacagagatatagatcaatggaacagaacagagccctcagaaataatgccgcatatctacaactatctgatctttgacaaacctgagaaaaacaagcaatggggaaaggattcactatttaataaatggtgctgggaaaactggctagccatatgtagaaagctgaaactggatcccttccttacaccttatacaaaaatcaattcaagatggattaaagatttaaacgttagacctaaaaccataaaaaccctagaagaaaacctaggcggggatctatag

SEQ ID NO: 8239 - DNA, 1429 bp, Homo sapiens
  SIMILAR (425)..(646): 621254mologous to Homo sapiens cytokeratin 8,accession number M26324,Smith-Waterman Score=202.
tttactggcccgaggcgctggaagaacaaatccagcccctccacttatgtcctgtggcccttggggcaagtttcttaagtgttgtgaggtctataaaagtggaccatacaaggtgcagtaggaagagatcaccatccacagtcgggctgaggctgaaagcacgtaccagatcaagtatgaggagctgcagacgctggctgggaagcatggggatgacctgcgttgtgcaaagacagatctccgagatgaaccagaacatcagcaggctccaggctgagactgagggcctcaaaggccagggggcttccctggaggccgccatcgcagatgccgagcagtggggggagctggccattaaagatgccaacaccaagctgtctgagctggaggccgccatgcagcgggccaagcaggacatggcacgcagctgggtgagtaccagaagctggccctggacatcgagatcgccacctacaggaagctgctggagggcgaggagagccgtctggagtctgggatgcagaacgtgagtatccataagaagaccaccagtggctatgcaggcgctccagcgaggatagtctcccttctccagaatgaactgctgtccctggaagtcggggtactcaaaggccacccaactggaaaaggagaagagctgggagctccatactcagagtgctcctttggactgtgccgaaggacagtgatgctcacccaggctccaagctccgtcgtgaggtccaggaacagcaggaaccacaccgtgaactctggtggatcctgcctgagtgccagcacagtggccatccctgccatcaacgacagcagtgcagccatgagtgcctgcagcaccatcagcgcccagaagagaacatgctgcacagcctgtgaacctgcgaggaagtacaaggacactgcctcccatcaagaaccagcagtctgtcagccggcctgccagctggaaactgcagaccccaaaggaggaggtgtcctggccctgccccagccaccctcgccaggcatgctctgctggccttactgccgagcccatgccaccgactactttctggctaacttcttctcagagtttccctgccactttttgcaccgagcaggggctgcccagacgcaagccactggtgacgggatggagcatgggcagagcagggagctgccaaagaggaaggcccccagggaagagtcagagacttctgaggaaaaatcccctaacaagtggggccctgtttccaagcagaagaagcagctcctggttgacattctcaccacaataatcaggcctacaagaggtaatgcttacacaggcctgagcactagaaaatggaagccaagatccgaggaaaatgctctgatgcagcccaacaagaaggacgagaaggggactcttacacagaaactggggttatag

SEQ ID NO: 8240 - DNA, 462 bp, Homo sapiens
  SIMILAR (267)..(425): 331254mologous to Homo sapiens Human HUPF-I mutant protein fragment 29,accession number Y21381,Smith-Waterman Score=73.
cttatacagcatgccatactggtccactgtcagaccggtgatggccacagctccatcaccccccatgctgactctggctcctgcctggctctgcccggccaccacaacccctcgggaccattcagaggcatcactggagggtgtgtggttagtggagcagctggtcatggggaggtctcgtttctttggtggaaggcattcctgactcctctcatgaacaggtttcatattgctttgtggtgttcctggagctgcttctggctggggcgcccacatctgagcttccagtggtgcttctgaacagctgtagtaagcgtcctcccggctggctcgggagccagcccgtttcacagcgcttcctgggatccacccgctcatcctgcagccgccgcaactgcagccgccgtcatcccggccctggagcccccacacacccctgtgtatgcaatatttgttaaccat

SEQ ID NO: 8241 - DNA, 846 bp, Homo sapiens
  SIMILAR (530)..(598): 391254mologous to Homo sapiens p8 protein,accession number AF216972,Smith-Waterman Score=44.
ttaccccccttccccccccgggcgtagcgcagcacacgtatcgtgcacgctgtaccgaaccaccccgtgatggccagaccagcgctcggcagctcctccaaccgcatgggcggcctcgtagtcgccgtctgcgaggcgccgtccgagtgccgaatcgatggtcccccgcgaaccgctgtgataccgcccctctgccgcgaccagcgccgcgacgcctgcgatctcacctgcacgcgccttgggcgccggggcaccttgccctctgttccggcgacgcagtgggcctttcgggcgcaccagcgcgatacggcctccttcctccgcgggcaaggcggttctttttcccccccacgggcggcccgtttggccagtaggccgcctggcgcgatacgccactgcttctggctggggcgcccacatctgagcttccagtggtgcttctgaacagctgtagtaagcgtcctcccggctggctcgggagccagcccgtttcacagcgcttcgtgggatccacccgctcatcctgcagccgccgcaagtgcagccgccgtcatcccggccctgtaaaggagtggagacagacccccagttctctcctttcagccattgttctggtttctcattcgtggagacaacagtgtgagtttctggctgctgcgggggctcccgtgcccatcgcaggctgtaaccaccagacacaggagccttcagaaagaaaaactcaagagaaacaggaaatcctgtgtcaattttatgcagtctcaggtttctgtctccaaatactcgaatcttgtcaagcatcaccatttctgcattaggcctctgtaacttgacactcggatgcat

SEQ ID NO: 8242 - DNA, 423 bp, Homo sapiens
  SIMILAR (206)..(72): 331254mologous to Homo sapiens Human secreted protein sequence SEQ ID NO:170,accession number Y87131,Smith-Waterman Score =60.
aggtagatgagttccgacactgtcacggctgtgttcccagcagcgtccgaagtcgagaatcgtcagctgtaagtaggagctacacagcgcagagaaaatggaaccacccatccgtgaggcctctttccggagggagccgcacacttggacttgagagtttgccagcagcgagctcggatgcatctctccaaaagccaccaaggtcggcgcgtctgaagagcgttttgcggtcatcagacttcctcatctgaaaacacagaacatactgaccctttcaagtacttagtcattttcctgaaagtgtggtctgtttcagaatgctgtggcaaccaggtaggtgtggcactggccatgtgccacgtctttgccctttgtagtctgtcagatattaaagtttctaaccctgtttttttaatctccaag

SEQ ID NO: 8243 - DNA, 397 bp, Homo sapiens
  SIMILAR (244)..(44): 341254mologous to Staphylococcus saprophyticus quaternary ammonium compound-resistance protein,accession number Y16945,Smith- Waterman Score=76.
agcaatgagtttttatgttaaacacttccaactgtcagtattaccatgaaatcaacattagaaaataaggtagaaaactgagtgttttgcttaaaaaataaaaaaggattaaatagctgttgtatccaaacatcacgttctgcttccatctctacattccactttccccattcttggagattaaaaaaacagggttagaaactttaatatctgacagactacaaagggcaaagacgtggcacatggccagtgccacacctacctggttgccacagcattctgaaacagaccacactttcaggaaaatgactaagtacttgaaagggtcagtatgttctgtgttttcagatgaggaagtctgatgaccgcaaaacgctcttcagacgcgacgaccttg

SEQ ID NO: 8244 - DNA, 493 bp, Homo sapiens
  SIMILAR (11)..(43): 721254mologous to Homo sapiens Human secreted protein fragment encoded from gene 60,accession number Y25875,Smith- Waterman Score=43.
  misc_feature (1)...(493): n = a,t,c or g
caccctgcttgctggaaatggncagccaccccggctcgggtcgcaacnggactctccctctgggaacagccagtcgaagtccaagcagggagacggctttccctcacaaccttgaaagacccatcagtcatcatgatgtacaacgagcaaggcataaaataaaacactgggaagcaggaagagtgacaagaaaatgaacagggagcaaggagggtgcaacccagttccccatcctggcaagtgcctaaagccccgctcagcctctgttccagctgggtgatgtttaggcaaagtcactaccccgccccactactgtgccccaagacagagtctgtggtataaactaactgtgctgactttgggcaataaaggacctagaattctaagtactgaattaaaaatacagaacctactaacactactgtattaaccagctgactcctataatcttttggagatgacagatgatactggtttttaaaatacccaatca

SEQ ID NO: 8245 - DNA, 1869 bp, Homo sapiens
  SIMILAR (520)..(1830): 261254mologous to Sus scrofa gastric mucin,accession number U10281,Smith-Waterman Score=167.
atgtctgaggtaaagaactatgacaaaaaaatcaggcacagaaagggcaactgcacaatggaccgttattcaccaaaagtggtccattggttgcacccacgagcgcacaccagaaccgtcccagccgcaatccggtatccagaccgccaaacacccaacgggttgcgaggcgcaaacactatgcactcgcagatggatacactgaacggagatggacgaacgcaccttgcagggcagagagctcgttccccccgaactgcccgttcggagcgccaataccggattcatacgacaagtggaccttccggaatgtttcgtcaatacggcttaggcttctgcctcaggattccggttatgcccattgcctgggatcgccgctcatcctataccccagttcgctatcggaatcaggatgaccatgagctacaaattacacacgggaacaagattactatgtggaattgtgtgtctgacttccacattgacaggtgcttcctggacctctggaatggagaagagtcggcgcgcaactggcccaggtctggctgcgtcctggtgcaccccctgtgcctccccactgcacacctggccatccagggcctgctggctgctgcagcgctcactagagtgccctgtgattcttcagggcagagtctggcagctgcacagagcatgctagccccttttgagcttcgtgctgtgtcctgggagaagtcagagagacggtgcctgaacccctcggccccgccgctggtcaccagcagtggtgtggctcgagtgccccccaccagccacgtcgggcccgtgcagtcggggcggggcagccatgcagcagtgtgggtacaaaggagtcaaactaaatgtgatcatcaagctgccaaacataaaaagaaagataaatccacaagaaaaacgacaaagaaggaaagctctcgctgttgcccagagctgcgggtggaagtggagcagccccatcaccagctgccccgggaaggcagttcctcggagtactccagctcctcctccagccccatgggggtacaggcccgggaagagagctccgacagcgctgaggagaatgacagacgtgtggagattcacttggagagctctgacaaggagaagccggtgatgctgctgaatcacttcacttccagttccgccagacccacggcccaggttctccctgtgcagaatgaggccagctccaatccatcaggccaccaccccctgcccccgcagatgctgagcgcagcctcacacatcacacccatccgcatgctgaattccgtgcacaagccggaaagagggagcgcggacatgaagctcctctcgtcttctgtgcactcacttttgtctctagaagaaaggaataaaggatctggaccaagaagcagcatgaaagtggacaagagctttggcagcgccatgatggacgtgctgcccgcgtccgcaccccaccagcctgtgcaggtcctctctgggctttcggagagcagctccatgtcacccacagtctcctttggtccccggaccaaagtcgtgcatgcatccacgctggacagggtgctgaagacagcacagcaaccggccctggtcgtggagaccagcacggccgccacggggacgcccagcacagtcctccacgccgcccgtccgcccatcaaactgctgctgtcgtcatctgttcctgctgattctgccatttctgggcaaacttcctgtcctaataatgtgcaaataagtgtgccccctgcaataataaacccccggactgctctgtacacagccaacaccaaagttgccttttctgcaatgagcagtatgccagtgggcccaagcaagctgcataccttaggtcgactctag

SEQ ID NO: 8246 - DNA, 5950 bp, Homo sapiens
  SIMILAR (2)..(1969): 921254mologous to Homo sapiens hypothetical protein,accession number AL117532,Smith-Waterman Score=3093.
ctttgaggtcttgtggtctgattcttcaataacatcagtaaccaaatcttcctctgaagtgacggaatttatttcaaagctatgtcagctctatcctgaagagaacttggagaaactcattccttgcttagctggtccggacgcattttatgtggagcgaaaccacgtggatctggactcaggcctgaggtacctggcctcattaccttctcacgtgttgaaaaatgaccatgtcaggaggtttctcagcacttcctctcccccacagcagcttcagagtccaagtcctggcaatccctccctttctaaagtaggtaccgtgatgggcgtgtctggaaggcctgtgtgtggagtggctggtatcccgtcctcgcagagcggagcccagcaccacgggcagcacccggccggctccgccgcccccttgcctcactgctcccatgcgggcagcgcgggctcagccctggcctaccggacccagatggacacatcacctgccatcctcatgccttccagtctgcagacccctcagacccaggagcagaatgggattctagactggcttaggaaactgcgtttgcacaagtattaccccgtctttaagcagctctccatggagaagtttttgagccttactgaagaagatctgaataaatttgagtctcttaccatgggggcaaagaagaagctcaagacccagctggagctggaaaaggagaagtcagagagacggtgcctgaacccctcggccccgccgctggtcaccagcagtggtgtggctcgagtgccccccaccagccacgtcgggcccgtgcagtcggggcggggcagccatgcagcagagctgcgggtggaagtggagcagccccatcaccagctgccccgggaaggcagttcctcggagtactccagctcctcctccagccccatgggggtacaggcccgggaagagagctccgacagcgctgaggagaatgacagacgtgtggagattcacttggagagctctgacaaggagaagccggtgatgctgctgaatcacttcacttccagttccgccagacccacggcccaggttctccctgtgcagaatgaggccagctccaatccatcaggccaccaccccctgcccccgcagatgctgagcgcagcctcacacatcacacccatccgcatgctgaattccgtgcacaagccagaaagagggagcgcggacatgaagctcctctcgtcttctgtgcactcacttttgtctctagaagaaaggaataaaggatctggaccaagaagcagcatgaaagtggacaagagctttggcagcgccatgatggacgtgctgcccgcgtccgcaccccaccagcctgtgcaggtcctctctgggctttcggagagcagctccatgtcacccacagtctcctttggtccccggaccaaagtcgtgcatgcatccacgctggacagggtgctgaagacagcacagcaaccggccctggtcgtggagaccagcacggccgccacggggacgcccagcacagtcctccacgccgcccgtccgcccatcaaactgctgctgtcgtcatctgttcctgctgattctgccatttctgggcaaacttcctgtcctaataatgtgcaaataagtgtgccccctgcaataataaacccccggactgctctgtacacagccaacaccaaagttgccttttctgcaatgagcagtatgccaatgggccccctgcagggtggcttctgtgcaaacagcaacactgcctctcccagcagacacccctccacgtcctttgccaacatggccacagatgcccagctgcccagcccccagctccagcccggcgctgtcctccgtccctgaaagcagtttctatagcagcagtggcggtggcggctccacaggaaacattcctgcctcgaatccgaaccaccaccaccaccaccaccatcagcagcccccggcacccccgcagcccgccccacccccgccaggctgcattgtgtgcacgtcctgtggctgcagcggcagctgcggctcgagtggcctgactgtcagctacgccaactacttccagcacccgttctccggtccgtccgtgttcaccttccccttcttgcccttcagtcccatgtgcagcagcggctacgtcagcgcccagcagtacggcggcggctccaccttccccgtcgtgcacgccccttacagcagcagcgggaccccagaccctgtcctgagtgggcagtccacgtttgccgtgccacccatgcagaacttcatggcagggacggcaggggtgtaccagacccaaggactggtgggcagtagcaatggttccagtcacaaaaagagcgggaacctatcttgttacaactgcggggccactggtcaccgcgcccaggactgcaaacagccgtccatggacttcaaccggccaggtacttttaggttgaaatacgcccctccagcagaaagtctggactccacagattgatatttttcctctggcaaaccagaacgttatttaagccatggagacataaggaaaattaaatacaaaactgagaaggtctagttgctgttgagcttaatctttttaatccaaaggtgctttacttttcctagactggatagaaaatctagccgtagaaagtgcatcaaactcgatttattgccaaaaccctagattggagcttgggtgtcagaactcgcctagtgggcatctctgtggctggtgagatcggccacctccacttttggttgcagtgcagagacgccatgtctcccgaagagcattgccatcactggccctcctaggctcacacgtcaattccagggcagctacacgtggtctgaatcgagaaccgagcttggagttctccaagtggagttccacccgccggactcctgacacccctgggctagggaaaatgtcggactttgttttgttctgttcctaaagtgattagcactaatctctgggatttttaaggattgcactacagaagaatgtaccctgatgtaaatctctgcggttctgggagccaaactcctctgagaacagtcagtgcaagagactccaataatccatattgaaagagtcagcaccagcagaggctactcgacttaggacgcaacagaggttttagtatttccttccctcctccaagcacttgtagcagtttcaggtttttaatttttttctgcaaataaatctaaactacgttattaaatagaaatagtttactcgcaacaacttaatttctaagggtccaagtcccagagaatccatagtcgtcaaagctttgagagtatctttcttcccagccagtcagtggctttgagccctatcttccactacaaatgacctctcgaggggggacggcgacagcgcggctctgtgagtggctgtgaggatgctgcacgtcctcagcagagtttgcaagttgctttatctcccacgggctccccaagaacctccaaccccgaggcttatcgctagcggattcacacctgagacagacatttcaacaatgatacagtcctgtcatttatcagcaaaagattgggaattttctcctgtcaacttcttttgtattaggctgtgtattgatagttaattccgttaaaaattacttggaaaacagtgggaagtggtaggactctggaagaggccacacacccgagagctgcgagatctgtggcaagtctggttttggttaggtagtaataaaagtcctcactgtagatctctaaatttcaacccacggaaatgaaagccttttgtctgaaatttacggacttaaatcttcaaggttaaagggaattttctgctcaaataatactcttatcgcaaatgctaaagtcttcaatgttaaaatactgattggtaaaatcttgcagttgggattttgcagttggatatttattttaaaaaaaattataaataattcagactattcttaaaatgggacaatcagcctcatgaaaaattgatgtaaatcagaagaataccctagaatgaggccttgtgatgtgaagccgttcaatttgaagagcagttcctaacttcatagaaacctaaagccagaaagttgttacattttttttatgacaggcttttagtagaattttttagttttattttagttgaattttatttctatgcaatgcagaattaacagacctcttctcctcatggtacacagtattaccagtgttgaagtaatggtgatgcttattacaacagcctatttaggggaatgttacgttggatctcttaaattgtaaacactacaaaatgtcaaaataatgagaacctgacacaactttgccttaaagagtactagactggaccttctcatattaccgtttaaggaagacttagaagtgttcattgatgtttacgattttaatatttctgaaggccattacagtggcctggatatgtgctgaaagccaaacttttaaaattttttgggtttttttaagcaaagaaatattttaaataaatcctatttcaacactgaaattgttgaaaaccgtctcataacaaaaggaaaaaacattggaatttttgttttagtggtcagtataggggaatgaaagcgtctgttgttacccacgtaactattttgataagtattagaggttaaccttaaatccagcaaaacattaaaacagaaacttttcaacttggagcctgccattcagcgttgaggtagatgagttccgacactgtcacggctgtgtttcccagcagcgaaggcctctgcggagctgcccagttcgttcttgaaacgtggcatggggcgggcgtgtgacatctcccggggagggccgtccgaagtcgaggaattcgttcagctgttaagtagggagctacaacagccgcagaggaaaatgggacccacccattccgtgagggcctttttttccggagggagccgcacacttggacttgagagtttgccagcagcgagctcggatgcatctctccaaaagccaccaaggtcggcgcgtctgaagagcgttttgcggtcatcagacttcctcatctgaaaacacagaacatactgaccctttcaagtacttagtcattttcctgaaagtgtggtctgtttcagaatgctgtggcaaccagtgttttattttatgccttgctcgttgtacatcatgatgactgatggtcttcaaggttgtgaggaaagccgtctccctgcttgactcgactgctgtcccagaggagagtcctgtgcgacctgagcgggggtggctgccatttccagcatgcaggtgacttccaaagaatgagtcaggtggcactgaaagccatgggttctgaagaggcgaatttgttgaaaagtcccaagggtctgaatgaaagcatctttaatcaacactcaacactcgcaatattctagaaaaccatatactgtgctggttgaggccaaaggttaacatttgctccactgttcacccaaggaagggggccagtggcccatcccgccgcggccctcacgtgccgttgtaacaagcccctcatccacatgtgtgagtcctaccgtgccacaaaaagagaaggcctttggtacctgaaacttggacacccttgtgtaccccgatacccttcacagccttcctattggacatattttctttttaggaatgaaggaaaattccccccatttttgagcccaatccttttgtcaattcctacaaaattgccatgtaactttataaatatttttaaaagatatagttttgtaaatatttaatattccgctaatttgattttgaattgtaaatgtcaagtattctgtttttggggtttttatgttttattatactttgttaaaaaggacaaattgtacatttttagaatgtttttatgagtaaatttaatgtactgaaaataaaaattttaaaaaaggcaaaaaaaaa

SEQ ID NO: 8247 - DNA, 669 bp, Homo sapiens
  SIMILAR (129)..(239): 751254mologous to Homo sapiens pre-mRNA splicing factor,accession number L10838,Smith-Waterman Score=144.
ctactgtggaccactctgaagtgtgtgggttgctagaaaccctcctggctttgcttttgttgaatttgaagatccccgagatgcagcaggtgtggtctgagaactagatggaagaacactatgtggcccctccctcttggggtcatcgtccttgagatgattattgtaggaggggtcttccacctcgtcgcagacctccaagaaggagaaacttgtcttgtagccggagcaggtccctttattctccttggaccttgtctctctgaactgcatgcagaacttcacataactttcatctgtatttcctctcattactagttcttctacatcttttagaattcttttatgagcagtattgtgtgctgtgctccgagatatttcacagccagtcctttctggcaacaggcagcaactatcaaaagaaatcttctcaaagttctgattggtcatagcctttagtgaaacaaggctctcgtagttcatggcagggagccatatttcaggtgaagttccctgtggcccttcaccactcacagacagctggagcaaatttccaaagccttttccgccctttctggagaggcagccccatctaaccgtgtgttcatgggattcctccgcatcgagaagactgcagttagtccacactagctgcttactgtccaccat

SEQ ID NO: 8248 - DNA, 940 bp, Homo sapiens
  SIMILAR (130)..(153): 1001254mologous to Homo sapiens pre-mRNA splicing factor,accession number L10838,Smith-Waterman Score=48.
  misc_feature (1)...(940): n = a,t,c or g
cccacgcgtccgatttcgtggacgccgggtgagtgagagagttggttggtgttgggccggaggaaagcgggaagactcatcggagcgtgtggatttgagccgccgcattttttaaccctagatctcgaaatgcatcgtgattcctgtccattgggactgtaaggtttatgtaggcaatcttggaaacaatggcaacaagacggaattggaacgggcttttggctactatggaccactccgaagtgtgtgggttgctagaaacccacccggctttgcttttgttgaatttgaagatccccgagatgcagctgatgcagtccgagagctagatggaagaacactaattgggtgtccgggtaagagaggaaactgtcgaatggtgaaaaaaagaagtaagaaatcgtggcccacctccctctttggggtcgtccgccctccgagaatgataaccgtaaggaagagtncttcccacctcgttcgcagatctccaaggaaggagaagcttctcttcgcagccggagcaggtcccttttttagagattagggagaagagagagatcgctgttttcggggagagaaaatcacaagccgtcccgatccttctctaggtctcgtagtccgatctaggtcaaatgaaaggaaatagaagaccagtttgcaagagaagtggtgtacaggaaattacttcatttgacaggagtatgtacagaaaattcaagttttgtttgagacttcataagcttggtgcatttttaagatgttttagctgttcaaatctgtttgtctcttgaaacagtgacacaaaggtgtaattctctatggtttgaaatggatcatacgaggcatgtaatacccaagaattgttactttacaatgttccctttaaccaaaattgaatttgctttgnactttagttatgcncagactgatnataaacctc

SEQ ID NO: 8249 - DNA, 1260 bp, Homo sapiens
  SIMILAR (42)..(488): 331254mologous to Caenorhabditis elegans Similar to collagen; coded for by C. elegans cDNA yk55f3.3; coded for by C. elegans cDNA yk66d5.3; coded for by C. elegans cDNA yk71e4.3; coded for by C. elegans ,accession number AF022985,Smith-Waterman Score=138.
agagatcgcggagagacgcataacgcagcccgctcctccagggccctccaggccctccggccccgggccggcgggtgaactggggggccccgggacaggccgagccctctgccctgcagataacggaggcctctgctgtggctgcccactggctgtgcccgcccactggctgtgcccagaccttgaagccgcagcgaacctctctttcccaccccacctcggtgactaatggcggccgtggcgtctcccagcccggaccccgccggcacccgggtctcccgacccaagcctcgacgaaacccccgcagagccgccgggacgcagcgcctttgggcggcgctgggcgtggtgggccgggaagtatggcggcagctcgaacgccgcgcggcggaggccattaaggcgtggacggcccgggaaggcggcctagggacgcaagcaggctcggccgcctctttaggccacggagccgcgcagatccggttcccgggtgaccactctgtcgccattgggcgagacctacctagtcctgacgacaacggacaaaggccttaaggggcctggaaggtgagcgaagtcccgaacgacgacgggtggaacggttagcggccatcgggcggttggtcttcattctaccagactttgctgtcggaagagagaaatggtagaatgacaggccacgtttggcccgttggaaatgcccaccaccctctgtgaagatttactggccgtttatggaaggcctgtgtatataatatgaaaaagctgctctcaactccaccccaaccttttaatagaaaacatttgtcacatctagcccttctatagatggaaagaggttgccgacgtatgataaaatagagttagaaagttacacatcttgtaaattctcatttgtttaaaagaaatcatagaaaatacatgtcttctggagatgacttttggaaatggagttgttaagacggcctctggaagcgatacgtccacgtttgttaagtgggttagatgacatggagctggaagacctgagaaggaagagaagaaggttctatgctagactggtcatatttagaagacattttcatattctatccattgttttgtgtgcattttattcctcactactgtgtatatagttgacaatgctaagcttttttgaaatgtctcttctttttagatgttctgaagtgcctgatatgttaaaattagaggtagcaaaatcacattttgtaaatacctttttgttcccattagatgttg

SEQ ID NO: 8250 - DNA, 183 bp, Homo sapiens
  SIMILAR (51)..(10): 641254mologous to Mus musculus T-cell receptor alpha-chain variable region,accession number L34678,Smith-Waterman Score=44.
gagcaaaatgagattgattacagcggcctcagggttcaggcaatgcaaataagcagtgaaaggaagaagacgataattgttacagaaacccagaccagcgatgactagtggtgtgtataggcctcctcgggccaggttaaccacaaccaaggaaacaccacaaggccaccagaatctacagtg

SEQ ID NO: 8251 - DNA, 399 bp, Homo sapiens
  SIMILAR (3)..(398): 931254mologous to Homo sapiens endomucin,accession number AF205940,Smith-Waterman Score=604.
ctgaaacttagagttcaattaatacaacatttataccaggtagtgttctacaaccagatgcatcaccttctaaaactggtacattaacctcaataccagttacaattccagaaaacacctcacagtctcaagtaataggcactgagggtggaaaaaatgcaagcacttcagcaaccagccggtcttattccagtattattttgccgggggttattgctttgattgtaataacactttcagtatttgttctggtgggattgtaccgaatgtgctggaaggcacatccgggcacaccagaaaatggaaatgatcaacctcagtctgataaagagagcgtgaaactttttaccggtaaaacaatttctcatgagtctggtgagcactctgcataagggaaaa

SEQ ID NO: 8252 - DNA, 540 bp, Homo sapiens
  SIMILAR (3)..(38): 1001254mologous to Homo sapiens Human fetal kidney protein fragment AA36_1i,accession number B10283,Smith-Waterman Score=54.
atgcaagcacttcagcaaccagccggtcttattccagtgagtaacagcaatgccttcattcatggcagtagatatgcagaatgtttgaatgtgaccagtaaaggagaggaatcagattatgggcagccttttctcaactttactgagcctgcaatcccattacaatcccatctaactgctgcctgctctgaaaatttcccacaagcacaccagaaaatggaaatgatcagtaaacctcagtctgataaagagagcgtgaagcttcttaccgttaagacaatttctcatgagtctgtgattcttaaccagaataaaatggatgaaattacagaaatagaattcagaatctggatggcaatgaagatcactgaaaatcagaagattgaaacccattccgaggaatctgaggaattcaacaaaaccatacaaggaatgaaatatgaaatagccattttaagaaagaacaaaactgatctgacagagctgaaaaactcaccacaagaatttcataacacattggaagtattaacagcagagtag

SEQ ID NO: 8253 - DNA, 792 bp, Homo sapiens
  SIMILAR (1)..(789): 881254mologous to Homo sapiens Human secreted protein clone fa171_1 protein sequence SEQ ID NO:148,accession number Y94971,Smith-Waterman Score=1212.
atggggaaggcgaaggtccccacctccaagcgcgccccgagcagccccgtggctaagccgggtcctgtcaagacgctcacttggaagaaaaacaagaagaaaaaaaggttttggaaaagcaaggcgcaggaagtaagcaagaagccaggaagcggccctggtgctgtggtgcgacctccaaaggcaccagaagacttttctcaaaactggaaggtgctgcaagagtggctgctgaaacaaaaatctcaggccccagaaaagccttttgtcatctctcagatgggttccaaaaagaagcccaaaattatccagcaaaacaaaaaagagatctcgcctcaagtgaagggagaggaaatgctggcgggaaaagaccaagaggccagcaggggctctgttccttcaggctccaagatggacaggaaggcgccagtacctcgcaccaaggccggcggagcagagcacaataagaaaggaaccaaggaaaggacaaatggggacatcaagcataagaagcagaaagctaaggaggcagaccctgccccacccaccgaggaagacatgtggtttgacgacgtggacccggcggatatcgaagctgccataggtccagaggtggccaagatagcgaggaaacagttgagtcacagtgagggcagcgtcagcctcagactcgtggaagagccggccttcggcggcctgacaagagccttagccttggactgtgagatggtgggcgtgagtcctaaaggggaggagagcgtggccgcccgtgtatccatcatgaaccagtag

SEQ ID NO: 8254 - DNA, 423 bp, Homo sapiens
  SIMILAR (143)..(421): 1001254mologous to Homo sapiens Human secreted protein clone fa171_1 protein sequence SEQ ID NO:148,accession number Y94971,Smith-Waterman Score=467.
gaagacatctggtttgacgacgtggacccagcggatatcgaagctgccataggtccagaggcggccaagatagcgaggaaacagttgggtcagagcgagggcagcgtcagcctcagcctcgtgaaagagcaggccttcggcgggagaagagcttgaagttgttcagaaggaagtggcagagatgctgaagggcagaattctagtggggcacgctctgcataatgacctaaaggtactatttcttgatcatccaaaaaagaagattcgggacacacagaaatataaacctttcaagagtcaagtaaagagtggaaggccgtctctgagactactttcagagaagatccttgggctccaggtccagcaggcggagcactgttcaattcaggatgcccaggcagcaatgaggctgtacgtcatggg

SEQ ID NO: 8255 - DNA, 1080 bp, Homo sapiens
  SIMILAR (217)..(606): 961254mologous to Homo sapiens Human secreted protein clone fa171_1 protein sequence SEQ ID NO:148,accession number Y94971,Smith-Waterman Score=658.
atggggaaggcgaaggtccccgcctccaagcgcgccccgagcagccccgtggctaagccgggtcctgtcaagacgctcactcggaagaaaaacaagaagaaaaaaaggttttggaaaagcaaggcgcgggaagtaagcaagaagccagcaagcggccccggtgctgtggtgcgacctccaaaggcaccagaagacttttctcaaaactggaaggcgctgcaagagatgggttccaaaaagaagcccaaaattatccagcaaaacaaaaaagagacctcgcctcaagtgaagggagaggagatgccggcaggaaaagaccaggaggccagcaggggctctgttccttcaggttccaagatggacaggagggcgccagtacctcgcaccaaggccagtggaacagagcacaataagaaaggaaccaaggaaaggacaaatggtgatattgttccagaacgaggggacatcgagcataagaagcggaaagctaaggaggcagccccagccccacccaccgaggaagacatctggtttgacgacgtggacccagcggatatcgaagctgccataggtccagaggcggccaagatagcgaggaaacacctgacaagagccttagccttggactgtgagatggtgggcgtgggccctaagggggaggagagcatggccgcccgtgtgtccatcgtgaaccagtatgggaagtgcgtttatgacaagtacgtcaaaccaaccgagcccgtgacggactataggacagcggtcagtgggattcggcctgagaacctcaagcagggagaagagcttgaagttgttcagaaggaagtggcagagatgctgaagggcagaattctagtggggcacgctctgcataatgacctaaaggtactatttcttgatcatccaaaaaagaagattcgggacacacagaaatataaacctttcaagagtcaagtaaagattcaggatgcccaggcagcaatgaggctgtacgtcatggtgaagaaggagtgggagagcatggcccgagacaggcgccccctgctgactgctccagaccactgcagtgacgacgcctag

SEQ ID NO: 8256 - DNA, 640 bp, Homo sapiens
  SIMILAR (75)..(638): 981254mologous to Homo sapiens XPMC2 protein,accession number AF273304,Smith-Waterman Score=964.
tgctgccagggcgccgggcccggggaggccggggtctcgggtggccgccggcccaggcgctggacggcagcaggatggggaaggcgaaggtccccgcctccaagcgcgccccgagcagccccgtggctaagccgggtcctgtcaagacgctcactcggaagaaaaacaagaagaaaaaaaggttttggaaaagcaaggcgcgggaagtaagcaagaagccagcaagcggccccggtgctgtggtgcgacctccaaaggcaccagaagacttttctcaaaactggaaggcgctgcaagagtggctgctgaaacaaaaatctcaggccccagaaaagcctcttgtcatctctcagatgggttccaaaaagaagcccaaaattatccagcaaaacaaaaaagagacctcgcctcaagtgaagggagaggagatgccggcaggaaaagaccaggaggccagcaggggctctgttccttcaggttccaagatggacaggagggcgccagtacctcgcaccaaggccagtggaacagagcacaataagaaaggaaccaaggaaaggacaaatggggatattgctccacaacgaggggacatcgagcataataagcggaaagctaaggaggcagccccagccccacg

SEQ ID NO: 8257 - DNA, 2173 bp, Homo sapiens
  SIMILAR (644)..(1195): 891254mologous to Homo sapiens Human secreted protein clone fa171_1 protein sequence SEQ ID NO:148,accession number Y94971,Smith-Waterman Score=808.
atggggaaggcgaaggtccccgcctccaagcgcgccccgagcagccccgtggctaagccgggtcctgtcaagacgctcactcggaagaaaaacaagaagaaaaaaaggttttggaaaagcaaggcgcgggaagtaagcaagaagccagcaagcggccccggtgctgtggtgcgacctccaaaggcaccagaagacttttctcaaaactggaaggcgctgcaagagatgggttccaaaaagaagcccaaaattatccagcaaaacaaaaaagagacctcgcctcaagtgaagggagaggagatgccggcaggaaaagaccaggaggccagcaggggctctgttccttcaggttccaagatggacaggagggcgccagtacctcgcaccaaggccagtggaacagagcacaataagaaaggaaccaaggaaaggacaaatggtgatattgttccagaacgaggggacatcgagcataagaagcggaaagctaaggaggcagccccagccccacccaccgaggaagacatctggtttgacgacgtggacccagcggatatcgaagctgccataggtccagaggcggccaagatagcgaggaaacagttgggtcagagcgagggcagcgtcagcctcagcctcgtgaaagagcacggccttcggcggcctgacaagagccttagccttggactgtgagatggtgggcgtgggccctaagggggaggagagcatggccgcccgtgtgtccatcgtgaaccagtatgggaagtgcgtttatgacaagtacgtcaaaccaaccgagcccgtgacggactataggacagcggtcagtgggattcggcctgagaacctcaagcagggagaagagcttgaagttgttcagaaggaagtggcagagatgctgaagggcagaattctagtggggcacgctctgcataatgacctaaaggtactatttcttgatcatccaaaaaagaagattcgggacacacagaaatataaacctttcaagagtcaagtaaagagtggaaggccgtctctgagactactttcagagaagatccttgggctccaggtccagcaggcggagcactgttcaattcaggatgcccaggcagccaattgaggctgttacgtcatggtgaaggaaggagtggggagagcatggcccgagacaggcgccccctgcttgactgcttccagaccactgcagtgacgacgccttagcagtcctgccctgcttgctgcttgcccgccccgcttacagaggcaatgttgaccagtcacaggggacagttcacatctccccagagtggcaactctggtgaaaccttttcagaatcatggcagaggggcgtggcgtggtgctactgagaaggtcctccttcctcttgactttgtggtctgaaacctggtcttactgtccatgtgtgtttgggcccggatggtcagggtggggagcagggacggccatgggcacgcctggccacgctttaccgactgctgaccccctgggccaggtgaggttggggcctgtgggccgccagtccatacggtgctgtcactgcccatcttcggtgacaccctggggtgaaggtgctcagcaccttcctctcgaggagccacattttcctcctttgtgttaggggacataacaagctctgctgggcttgagggaccccagaccaggtttctcaagtcagcttccttgagacacagcttgccggcaacaaacaggtgttacatccaggggtttcctgtggcccgtttgaactttgagccatttatcttaaattaaattggcccaagggttggctggtgggtcaccccagcagaggcttctcccccatagcacaaggaatttgttgcctggggccgggtacctgcggttattccctggaggtcggcagacatgccaaccttgggctatttgagctggagaagctatgtgatgcctacgcggtggctttatgggctaggccccgagtttgaggctcccctgggaactagagccaggaacagccagtggcactgacaaggggacggagtccaaggcgttattgggccacctgacagctggacagaaaaggggcagacaccccgaggatgcgatttaaaataaatgcagatgtttacttggaaaaaaaaaaaaaaaaaaaaaaaaaagtcgtatcga

SEQ ID NO: 8258 - DNA, 414 bp, Homo sapiens
  SIMILAR (2)..(412): 521254mologous to Gallus gallus tensin,accession number X66286,Smith-Waterman Score=359.
ccgaccaggtgaggacagcaatgacctcatccgacacttcctcatcgagtcgtctgccaaaggagtgcatctcaaaggagcagatgaggagccctactttgggagcctctctgccttcgtgtgccagcattccatcatggccctggccctgccctgcaaactcaccatcccacaaagagaactgggaggtgcagatggggcctcggactctacagacagcccagcctcctgccaaaagaaatctgcgggctgccacaccctgtacctgagctcagtgagcgtggagaccctgactggagccctggccgtgcaaaaagccatctccaccacctttgagagggacatcctccccacgcccaccgtggtccacttcaaagtcacagagcagggcatcactctgactgatgtccagag

SEQ ID NO: 8259 - DNA, 624 bp, Homo sapiens
  SIMILAR (118)..(243): 851254mologous to Homo sapiens insulin-like growth factor binding protein-4,accession number U20982,Smith-Waterman Score=171.
atgctgcccctctgcctcgtggccgccctgctgctgggccgccgggcccgggccgagcctgggcgacgaagccatccactgcccgccctgctccgaggagaagctagcgcgctgccgcccccccgtgggctgcgaggagctggggtggagaagcccctgcacacactgatgcacgggcaaggcgtgtgcatggagctggcggagatcgaggccatccaggaaagcctgcagccctctggtaaggtgactgatgagaatgggtggggccagggtatagactggcctgagcagtgggaattttctgtggtgggcagtggagatacatggggagcctttaagcagggcaagacattttctcctcacatcctcaaagcacctgaacctgtctttcaggagttcacagtcagtgggtggggtgaccactttaaccctttcacagctgtttgctgggtccagatccagcgttcagggcaggcgggaaagatctttgggtttgtggccaagagccagacagagcctcaggagaacgtatgccacctctttgcggagaatgacatggtccagccagcctcgcaggtcatcggcctggtgactgctctgctgcaggacgcagaaaggatgtag

SEQ ID NO: 8260 - DNA, 888 bp, Homo sapiens
  SIMILAR (576)..(857): 1001254mologous to Homo sapiens Protein sequence encoded by clone p199-7 (PL mutet.rsT4),accession number P93369,Smith-Waterman Score=542.
atgggtgagaagcctggccccctgctcttctccagcgccaagccgaagaatccccaggaaggagaacacaaggacgagggtgaccaccccaacaacagcttcagcccctgtagcgcccatgaccgcaggtgcctgcagaagcacttcgccaaaattcgagaccggagcaccagtgggggcaagatgaaggtcaatggggcgccccgggaggatgcccggcctgtgaataaaggcacctacctggtgtccacaggtgggcagactgttgccttcactactggctcctgggaccaagacgactcagagtccagcctaggctgccaggaggactccacagccctgcatcccacctccacttcccccggcccatccgaaacagtgcctccttctctccttcctgaggccaccaagcgactcttgtccctggactttgagtccttcgggcagacccagaggaacctgtcctgcccgctgtgtcctgctggtgtctggcaggagaagacactgtgtgaatggagggatgcaggcggcaacagacaggctggggtgcctcaggcaccgtgtatgaaatctaacaatgcgctcatcgtcatcctcggcaccgtcaccctggatgctgtaggcataggcttggttatgccggtactgccgggcctcttgcgggatatcgtccattccgacagcatcgccagtcactatggcgtgctgctagcgctatatgcgttgatgcaatttctatgcgcacccgttctcggagcactgtccgaccgctttggccgccgcccagtcctgctcgcttcgctacttggagccactatcgactacgcgatcatggcgaccacacccgtcctgtggatctacccactagtcaattcaccatcttgttga

SEQ ID NO: 8261 - DNA, 399 bp, Homo sapiens
  SIMILAR (184)..(354): 831254mologous to Homo sapiens insulin-like growth factor binding protein 4,accession number Y12508,Smith-Waterman Score=253.
atggaatgtgaggacagcaatgacctcatccgacacttcctcatcgagtcgtctgccaaaggagtgcatctcaaaggagcagatgaggagccctactttgggagcctctctgccttcgtgtgccagcattccatcatggccctggccctgccctgcaaactcaccatcccacagagaggtgggtctgggccccaaagaggcaatgccaagccccagggctcctgccagagcgagctgcaccgggcgctggagcggctggccgcttcacagagccgcacccacgaggacctctacatcatccccatccccaactgcgaccgcaacggcaacttccaccccaagcaggtccttcctttaggtctggttgttgcaccatctgcttggttggctggcagctga

SEQ ID NO: 8262 - DNA, 2125 bp, Homo sapiens
  SIMILAR (259)..(411): 321254mologous to Gallus gallus tensin,accession number M74165,Smith-Waterman Score=62.
cttcacctggactctgagtcgtcttggtcccatgagccagtagtgaaggcaacagtctgcccacctgtggacaccagatcctgggagctcctggttagcaagtgagatctctgggatgtcagtgaggctggttgaagaccagaggtaaactgcagaggtcaccacccccaccatgtcccaggtgatgtccagcccactgctggcaggaggccatgctgtcagcttggcgccttgtgatgagcccaggaggaccctgcacccagcacccagccccagcctgccaccccagtgttcttactacaccacggaaggctggggagcccaggccctgatggcccccgtgccctgcatggggccccctggccgactccagcaagccccacaggtggaggccaaagccacctgcttcctgccgtcccctggtgagaaggccttggggaccccagaggaccttgactcctacattgacttctcactggagagcctcaatcagatgatcctggaactggaccccaccttccagctgcttcccccagggactgggggctcccaggctgagctggcccagagcaccatgtcaatgagaaagaaggaggaatctgaagccttggacataaagtacatcgaggtgacctccgccagatcaaggtgccacgatggcccccagcactgctccagcccctctgtcaccccgcccttcggctcccttcgcagtggtggcctcctcctttccagagacgtcccccgagagacacgaagcagcagtgagagcctcatcttctctgggaaccagggcagggggcaccagcgccctctgcccccctcagagggtctctcccctcgacccccaaattcccccagcatctcaatcccttgcatggggagcaaggcctcgagcccccatggtttgggctccccgctggtggcttctccaagactggagaagcggctgggaggcctggccccacagcggggcagcaggatctctgtgctgtcagccagcccagtgtctgatgtcagctatatgtttggaagaacaccccactctccaccactggccaaagaacatgccagcagctgccccccatccatcaccaactccatggtggacatacccattgtgctgatcaacggctgcccagaaccagggtcttctccaccccagcggaccccaggacaccagaactccgttcaacctggagctgcttctcccagcaacccctgtccagccaccaggagcaacagccagaccctgtcagatgccccctttaccacatgcccagagggtcccgccagggacatgcagcccaccatgaagttcgtgatggacacatctaaatactggtttaagccaaacatcacccgagagcaagggtgtccaggtggggcggtgtccatctctgactcaaggattgttccagcaatcgagctgctgaggaaggaggagccaggggcttttgtcataagggacagctcttcataccgaggctccttcggcctggccctgaaggtgcaggaggttcccgcgtctgctcagagtcgaccaggtgaggacagcaatgacctcatccgacacttcctcatcgagtcgtctgccaaaggagtgcatctcaaaggagcagatgaggagccctactttgggagcctctctgccttcgtgtgccagcattccatcatggccctggccctgccctgcaaactcaccatcccacagagaggctgccacaccctgtacctgagctcagtgagcgtggagaccctgactggagccctggccgtgcagaaagccatctccaccacctttgagagggacatcctccccacgcccaccgtggtccacttcaaagtcacagagcagggcatcactctgactgatgtccagaggaaggtgtttttccggcgccattacccactcaccaccctccgcttctgtggtatggaccctgagcaacggaagtggcagaagtactgcaaaccctcctggatctttgggtttgtggccaagagccagacagagcctcaggagaacgtatgccacctctttgcggagtatgacatggtccagccagcctcgcaggtcatcggcctggtgactgctctgctgcaggacgcagaaaggatgtag

SEQ ID NO: 8263 - DNA, 912 bp, Homo sapiens
  SIMILAR (565)..(909): 1001254mologous to Plasmid F Protein D,accession number M12987,Smith-Waterman Score=584.
atgatctcctttgactccatgtttcacaccctggtcacgctgatgcacgaggtgggctcctacagccttgcgcagctccacccctgtggctttgcaggatacagtgccccccccggtggtttcagacaccctcacaggttttctaccatgcagcaactgaacatggaggaaaagatgtatatccagggcagtgtctttgggaaggttgtgagccttttcagcgacagcggttttcttttattacccacttgcaggcagccaactgtagggggcacaagctcaactcctagagcacaaaaggccattgtgaatcatcccagtgctgcacttatggctctgaggagaggatcaagaaaccttgtctttcgagattttacagatgaaaaagagggaccaataactaaacacatccgactaacagctgccttaatattaaaaaatattggtaaatattcagaatgtggtcgcagttggcccagggcttcccggtatcaacagggacaccaggatttatttattctgcgaagtgatcttccgtcacaggtatttattcgcgataagctcatggagcggcgtaaccgtcgcacaggaaggacagagaaagcgcggatctgggaagtgacggacagaacggtcaggacctggattggggaggcggttgccgccgctgctgctgacggtgtgacgttctctgttccggtcacaccacatacgttccgccattcctatgcgatgcacatgctgtatgccggtataccgctgaaagttctgcaaagcctgatgggacataagtccatcagttcaacggaagtctacacgaaggtttttgcgctggatgtggctgcccggcaccgggtgcagtttgcgatgccggagtctgatgcggttgcgatgctgaaacaattatcctga

SEQ ID NO: 8264 - DNA, 4422 bp, Homo sapiens
  SIMILAR (1)..(459): 1001254mologous to synthetic construct chloramphenicol acetyltransferase,accession number A02739,Smith-Waterman Score=856.
atgaatgctcatccggagttccgtatggcaatgaaagacggtgagctggtgatatgggatagtgttcacccttgttacaccgttttccatgagcaaactgaaacgttttcatcgctctggagtgaataccacgacgatttccggcagtttctacacatatattcgcaagatgtggcgtgttacggtgaaaacctggcctatttccctaaagggtttattgagaatatgtttttcgtctcagccaatccctgggtgagtttcaccagttttgatttaaacgtggccaatatggacaacttcttcgcccccgttttcaccatgggcaaatattatacgcaaggcgacaaggtgctgatgccgctggcgattcaggttcatcatgccgtttgtgatggcttccatgtcggcagaatgcttaatgaattacaacagtactgcgatgagtggcagggcggggcagcagttgtagcgcagcatgttgctccacctccaggaatagtggaaatagatagtgagaagtttgcttgtcagtggctaaatgctcattttgaagtaaatccagattgttctgtttctcgagcagaaatgtattctgaatacctctcgacttgcagtaaattagctcgtggtggaatcctaacatcaactggattttataaatgtcttagaacggtctttccaaatcatacagtgaagagagtggaggattccagtagcaatgggcaggcacatattcatgtggtaggagtaaaacggagggctataccacttcccattcagatgtactatcagcagcaaccagtttctacttctgttgttcgtgttgattctgttcctgatgtatctcctgctccttcacctgcaggaatccctcatggatcacaaaccataggaaaccattttcagaggactcctgttgccaaccaatcttcaaatctgactgcaacacaaatgtcttttcctgtacaaggtgttcatactgtggcacaaactgtttcaagaattccacaaaatccttcacctcatacccaccagcaacaaaatgctccagtgactgtcattcaaagtaaagctccaattccttgtgaagttgttaaggctacagttatccagaattccataccccagacaggagttcctgttagtattgctgttggaggaggacctccacagagttctgttgttcagaatcatagtacagggccacaacctgttacagttgtgaattctcagacattgcttcaccatccatctgtaattccacagcagtctccattacacacagtggtaccaggacagatcccttcaggcactcctgttacagtaattcaacaagctgtcccacagagtcatatgtttggcagagtacagaacataccagcatgtacttctacagtttcacagggtcaacagttaatcaccacatcaccccaacctgtgcaaacttcatctcaacagacatcagctggtagccagtcacaagatactgttatcatagcacccccacagtatgtaacaacttctgcatccaatattgtctcagcaacttcagtacagaattttcaggtagctacaggacaaatggttactattgctggtgtcccaagtccacaagcctcaagggtagggtttcagaacattgcaccaaaacctctcccttctcagcaagtttcatctacagtggtacagcagcctattcaacaaccacagcagccaacccaacaaagcgtagtgattgtaagccagccagctcaacaaggtcaaacttatgcaccagccattcaccaaattgttcttgctaatccagcagctcttccagctggtcagacagttcagctaactggacaacctaacataactccatcttcttcaccatcacctgtcccagctactaataaccaagtccctactgccatgtcgtcgtcctctacccctcaatcacagggaccacctcctactgtcagtcaaatgttatctgtgaaaaggcagcaacagcagcaacattcaccagcacccccaccacagcaggtacaagtacaagttcagcagccccaacaagtacagatgcaagttcaacctcaacagtcgaatgcaggagttggtcagcctgcctctggtgagtcgagtctgattaaacagcttctgcttccgaaacgtggtccttcaacaccaggtggtaagcttattctcccagctccacagattcctccccctaataatgcaagagctcctagccctcaggtggtctatcaggtggccagtaaccaagccgcaggttttggagtgcaggggcaaactccagctcagcagctattggttgggcagcaaaatgttcagttggtcccaagtgcaatgccaccctcagggggagtacaaactgtgcccatttcgaacttacaaatattgccaggtccactgatctcaaatagcccagcaaccattttccaagggacttctggcaaccaggtaaccataacagttgtgccaaatacgagttttgcacctgcaactgtgagtcagggaaatgcaactcagctcattgctccagcaggaattaccatgagcggaacgcagacaggagttggacttccagtacaaacgcttccagccactcaagcatctcctgctggacaatcatcatgtactactgctactcccccattcaaaggtgataaaataatttgccaaaaggaggaggaagcaaaggaagcaacaggtttacatgttcatgaacgtaaaattgaagtcatggagaacccgtcctgccgacgaggagccacaaacaccagcaatggggatacaaaggaaaatgaaatgcatgtgggaagtcttttaaatgggagaaagtacagtgactcaagtctacctccttcaaactcagggaaaattcaaagtgagactaatcagtgctcactaatcagtaatgggccatcattggaattaggtgagaatggagcatctgggaaacagaactcagaacaaatagacatgcaagatatcaaaagtgatttgagaaaaccgctagttaatggaatctgtgattttgataaaggagatggttctcatttaagcaaaaacattccaaatcataaaacttccaatcatgtaggaaatggtgagatatctccaatggaaccacaagggactttagatatcactcagcaagatactgccaaaggtgatcaactagaaagaatttctaatggacctgtattaactttgggtggttcatctgtgagcagtatacaggaggcttcaaatgcggcaacacagcaatttagtggtactgatttgcttaatggacctctagcttcaagtttgaattcagatgtgcctcagcaacgcccaagtgtagttgtctcaccacattctacaacctctgttatacagggacatcaaatcatagcagttcccgactcaggatcaaaagtatcccattctcctgccctatcatctgacgttcggtctacaaatggcacagcagaatgcaaaactgtaaagaggccagcagaggatactgatagggaaacagtcgcaggaattccaaataaagtaggagttagaattgttacaatcagtgaccccaacaatgctggctgcagcgcaacaatggttgctgtgccagcaggagcagatccaagcactgtagctaaagtagcaatagaaagtgctgttcagcaaaagcaacagcatccaccaacatatgtacagaatgtggtcccgcagaacactcctatgccaccttcaccagctgtacaagtgcagggccagcctaacagttctcagccttctccattcagtggatccagtcagcctggagatccaatgagaaaacctggacagaacttcatgtgtctgtggcagtcttgtaaaaaacagctgcccaagcccatccaccccgcgggtcgaccagtgtttacctcagaccgaggtcgaggcgctcggtccggccgcggccccacagtaggttcccaggtcccagtcactccgctgccaagttccccaacatggactccttcgtccgctttgtggtgttacagggtctctaggacactgactccgctggctcggtccggaggcggcggcgaagcagggagcgacccagcaccgcccttcgcccacactgcggatggtgcgcatgcgcagcgcgtggactttggcctctgccctcctttggcagttttacaggctgcgtcgcggaggacaatgaaagaggctttaagggaactggacaggaaggattttgcgcaggccaccctgacgcctgcccgggatgagtttcctccccactttgccgcggccccgccgaccgaccgcttcactgccgccttcctgcattctcgcagactacgttgcggcgtcccctgctcccgccctgaggacgtcgcttttctggcactttcatcctatgcattctgttga

SEQ ID NO: 8265 - DNA, 1333 bp, Homo sapiens
  SIMILAR (31)..(93): 851254mologous to Homo sapiens Human secreted protein, SEQ ID NO: 7406,accession number G03325,Smith-Waterman Score=96.
  misc_feature (1)...(1333): n = a,t,c or g
atccaccaacatatgttcagaatgtnggcccgcagaacactcctatgccaccttcaccatctgtacgagtgcagggccagcctaacagttctcaaccttctccattcagtggatccagtcagcctggagatccaatgagaaaacctggacagaacttcatgtgtctgtggcagtcttgtaaaaagtggtttcagacaccctcacaggttttctaccatgcagcaactgaacatggaggaaaagatgtatatccaggccagtgtctttgggaaggttgtgagccttttcagcgacagcggttttcttttattacccacttgcaggataagcactgttcaaaggatgccctacttgcaggattaaaacaagatgagccaggacaagcaggaagtcagaagtcttctaccaagcagccaactgtagggggcacaagctcaactcctagagcacaaaaggccattgtgaatcatcccagtgctgcacttatggctctgaggagaggatcaagaaaccttgtctttcgagattttacagaatgaaaaagagggaccaaataactaaacacaccccgactaacagctgcccttaatattaaaaaatatctggtaaatattcagaatgtgggtccgcagattggttaaaagagaccatggaaaataacctatccagtgcctagcccattagtaaacatggaagcctccctccaccccttgcccaaatgccctttatgaaccttaattttacagttccagagtaaggaacaagaaaaagactcagaaatgctgccagtgaaaaataattcccacttacacagtgggggactcaaagtcagccacatttcacatactgttactgaagaaagcaccaagtcttaatggaacaaagaccatagaatgaattattttatctcctcccatgatgctgagaggaagcttcgtattctgatctctgagtgaatccctttgttctctgtttaaaaaaatctaaaaagaaaaaggaaaaaaaaaaaagaactgctgtgggattgtcaaccagcttatttgcgggaggtttaaaatctgataaatcctgagggaaactggtatgatcaaaattcagtcccttccacattggaatatcctgggaattttgaaaaacctacttgaccaaatgaattaaaacctttaaatatttttatctatatccaaaagggaccccttttttatatttccaaaaccgtttaacctggttggaatatttaaaaaaagtttaagcacacttttacccccgatctcaaagggggccaccaatttctacctttggatcgggggtttggtttaaaaatcataacctg

SEQ ID NO: 8266 - DNA, 1032 bp, Homo sapiens
  SIMILAR (555)..(433): 451254mologous to Acanthamoeba castellanii ribosomal protein S14,accession number U12386,Smith-Waterman Score=78.
ctagctcgcagttgaccccccgggagaggatcggcgcatccggccgcccgccagctccagacgccgggctccgcagcgccgctgtcctagcaccagggcccggcaagcaggggaacgggaccgccgggaccgatcaaggcgcgggcgcccagcaagagccgcgcccggggtctgcgcgccgctcagcgcgctcgcctttccgcccgcgccagggctggctgcgcgcaccctgagcgcgaggagccgcgcgcaaacttggtgccccaggaactttccaggagacactgcctccggggacgagagaccgtaagtgttgctccggagatgctgtggttcattagaatacactaacagacggtgtgaaccgattaaaataccgcaatcagtgccaattctactacggcgaagtaaagggaaatctttatttttcctgcatcctgctttaatgatcaaataggcactagtcttaatgagctcgttaatgcacatggccgccttagtgttgctgaactccggtaactttcttctgctttttttctgaagaccttttaattcagggtgtgcattttcctcttgcgtgtcacaagtgctattcaggctttctctagttgaatcccttttactctgagagtttttagcagcagctttctcagccatctcccctttgtggatcccaacatccttgtgagcaggtgttgcagccctcaggtgaggaagcagccggaagaggttctctccatttttaatgaagctcacagggctgtgatcaaatgtgatgggtaatgccaaaacagaaggtatcgtcatggcaacaggagtatgactttcaggccatgataccactttgccgcaaacttgtgtgtattgtaattgagtatactgtaaattggatctgaatacctttgctggaaaggatttgaggaggttcaacaattcctgtgtggttctaggtgggtacgtggatgccttctaagtgtggtctcagaaatccaagggcagagtaaatctcaagtcattgaagctccagctttt

SEQ ID NO: 8267 - DNA, 801 bp, Homo sapiens
  SIMILAR (1)..(195): 521254mologous to Homo sapiens Human secreted protein, SEQ ID NO: 5783,accession number G01702,Smith-Waterman Score=152.
atggcagagggcatggcaatgctgaggtggaccaggctgggcacctggcctgacgattcttttgatgaaatggacagtacgctagctgttcagcagtatacgcaacagaacataagagtcaagattgctccaatactgacaaaaatcttgagccacctgaaggccaagatgcagattgtcatggattttaagcacccagatggcattgcagtgccagttatgttgcctcgtcggagtttgctggtgatgacaggagaatctagatacctttggacccatgggtcaaaaaattttgtgaatgctggtgctcaggccccactcctttcagagaagtccaagggagttgaattaacatctaaaagatggctgctcctgcaggtacctaagagcaagaaactgatgtcagaaaacaggttatggaaattcttgaagcccaatactccactggaatctcggatttctaagcagtggtgtgaaattggtttccaaggtgatgatcctaaaacagactttcgaggaatgggacttctgggactgtacaatttgcagtatttcgcggaaagggatgccacagcagctcagcaggtcctgtctgactctcttcatccgaaatgcagaagagacgcaagctggtgtaagtgccacatgctgtcaagccgtgacagtgacatgggaccacaatggataaaaagagacaatgagcacatgtggctgcaaaggctggactgcacgtggaataatgccttcatctacagcagctgcagctacggtggaaattcagggctcctcaggcaggcctga

SEQ ID NO: 8268 - DNA, 1227 bp, Homo sapiens
  SIMILAR (6)..(476): 331254mologous to Streptomyces coelicolor A3(2) putative translation initiation factor IF-2(fragment),accession number AL355913,Smith-Waterman Score=123.
ttatttcgtggccgtctccctcccttcttggccaaactgcggcgctttgtgcaaacggggcaggtcccgcggggactccaccgggacgtggccccgtctccgcgcgttttggcaggcggggggctgcgtgtgtctgctcccctccctccccctctcccctcgctcccctctcccggtgacgattcgccgtaatgtggtggcaggaagcatgacgccgtgggccgaggctgcctctgctctcgtcgctcccggcggctgcaggcagcgggcgcgcagcgcgggcggcagccgagctacctggcgggggcagggccggagcgcggcgctgtcctcacccccgctcaggtgcagggggagtccgcgcggggcggggggccgagggcggccgcgggacccccggccctgctgtccgctgccagctggccggagcctctgccagcccgagcccacgttcgcccccctgaacggcagctggcgcttttcgtctgccccacaagaggttaatctttgttggtgttgcagcttctttgtggcttccccaggacttgtatcctcggctttgcaaacttgcccttttcccagccgctttgcaggaggctgcggagacgaagatgagcggaaagttggaaaccagcaggcatcacaggacggtccctttggcctcgtagctgtgctgagcctttgggtctcctgggccctagctgcagctccaccactcatcagcaggatacctttggccatgaccttcaccattgctgtggctccagcaaaagggctgtggcccctcctccatggattagaacctgtggctgagccacaatccagcacggaggataacagcaaggatgggtgtgcattcagggtcttcctctgcctacggtcttcctcacccacgattttccccaatttattggatgctccaaatatcctcacaccgtagcccatgtcatttgcacagcaacccttgccttcacattcaggagccagagctcttgggtcaatcaggtagaacctgagtgcaaaagctgcagcaactcccgcaagtatcgtgggcgtccgctggccatggaagcctgtgtttccttgctggggtggggggtcactcagatttcgagtggccactttgttccctacatgccaggcctgcaggaaccctgctacctggggatgggcagagtgaacccagctgcagactgctgagaagaaaagtgacttgaagccgggcat

SEQ ID NO: 8269 - DNA, 1745 bp, Homo sapiens
  SIMILAR (128)..(1642): 261254mologous to Herpesvirus papio NTR,accession number AF200364,Smith-Waterman Score=138.
gactttcaagagcggttgagcatgaaagaccagctgatcgcacagagcctcctagagaaacagcagatctacctggagatggccgagatgggcggcctcgaagacctgccccagccccgaggcctattccgtggaggggacccatccgagaccctgcagggggagctaattctcaagtcggccatgagcgagatcgagggcatccagagcctgatctgcaggcggctgggcagcgccaacggccaggcggaagacggaggcagctccacaggcccgcccaggagggctgagaccttcgcgggctacgactgcacaaacagccccaccaagagtggaggcgccaggcacggaatccgaccccgtctgcccaccgtcctggagtcggagcttgtccagcggatccagacacttcccagctgctcctgaaccttcaggcggtaatcgcccaccaggacagctatgtgagacgcagcgggctgccatccaggagcgggagaagcagttccggctgcatcgacgcgtgggaacctgctgctggagcaggagcggcaacgcaacttcggaagcagcgggaggagcgcgcggccctggagaagctgcagagccagctgggcacgagcagcagcgctgggagcgcgagcgccagtggcagcaccaggactggagcgtgcgggcgcgcggctgcaggagcgcgagggcgaggcgcggcgctacgcgagcggctggagcaggagcgggccgagctggagcgccagcgcaggcctaccagcacgacctggagcggctgcgcgaggcccagcgtgccgcccagcccccaagccacctcccagcttcaacggggaagggctggagggccctcgtgtgagcatgctgcatccggcgtggggccagagtacgcagagcgccccgaggtggctcgccggacagcgcccccaccgagaaccggctggccaagagcgatgtgcccatccgctgctcagcgccaccaaccagttccagaggcaggcggccgtgcagcagagatccccaccaagctggcggcctccaccaagggtggcaaggacaagggggcaagagcaggggctctcagcgctgggagagctcaggtgagccggcccaccccttcgcctgggcctggaaggtgcaactggtcaggctctagcggctgctgggagccaggaaattcgggacacctgtgccatcctctggagaggaaaccagaaggcacagctggcatcgtggctgaggccaccccacacagggcctgtttggtctccaggcccaaaactgagatgatccaccctgcatcttctcacctcaaccctcaaaacagtgggatggggaccaggagccttagaaagggcacgggcaagaaggcagagatccctggccacgtgggatcagcacagccggacagggacagcgtccttcgacctgaagcagcagctgctgctcaacaagctatggggaaagatgagagcacctcacggaaccgccgctcgctgagccctacctgccccggcagacacagtcctgcgcccccaccagaccctggcttccccgcccgagcccaccgccagctgacagcccctccgagggcttctctctcaaggcgggggcacagccctcctgcccgggcccccagctccctcgccactgccggcacaccactcagcgccaaggaggacgccagcaaagaagacgtcatcttctctaaaagggccgtgactcaagcaaaccactga

SEQ ID NO: 8270 - DNA, 1161 bp, Homo sapiens
  SIMILAR (177)..(494): 571254mologous to Homo sapiens dJ821D11.3 (PUTATIVE protein),accession number AL021453,Smith-Waterman Score=259.
tggtgaactgggccacctgctccaggccaggcctcaaggacacgaagatgaattacaacaagtcccctggctttgaggtgtccataagcccagggggagaaagtatccaaacaaatgatcatgttactctgtgaccagtgctctgatgggcacaggaggggtcagggagaaacacccaccagcagtacaagatccttgatgtcatgctcaaggggctctttaaggtgtgtgcaggcagggggcagctcatggcaggtccagtctttgatctaggcactgatgggtaaacaggagttcagctgaaggatggtatggtctgccctgccccgccctgtcctccgcaccacccgatcttctctagctgctccttctctcctgttctttactttgaccacaactccaactggaacctcctcatccgctggggtatcagtttctgcaaccagacaggcgtcttcaaccaggggccccactcgcccatcctcagcctggtaaggactggggtggaggtggcccgggagccctctgtcgggtagtggactaggatcctcacatctgccttcatgagctgccagggcctatgcctgtgtctgctttgcctctgctgggccataggacaccgaggcctgcaggggcggaaggagatccgaaaaggcccaaggatctccagatcccagtctgagttatagccctggagcagctcagggctcagggggccacaaggaggcaggtcgggaggaagaagaggtggaggtgtggttgtggtggagagcaccagctagccccttccagaaggggaggccacatttgcccggccccctggagctgggtctgagccccagctgaagggactgagcctcagatggctggattttctctcaggggcctccttctgaaagggcctttcaaaggattttatgctggaaatatgaccctgtgcagactgctgggggaggcaggaggatgcctgcctggaccctgttggtggctgaagacctctggccagctggcttccgcccttggtggggaagcagcagaactaggttctgagccacgggtcagggtgccaccctgctgctggccccactgtgtcacagagctgcctggcacaggtcccagcccctctgcagagacacaataaaagccaacagaccctttaaa

SEQ ID NO: 8271 - DNA, 339 bp, Homo sapiens
  SIMILAR (257)..(334): 611254mologous to Homo sapiens Human secreted protein, SEQ ID NO: 4442,accession number G00361,Smith-Waterman Score=77.
tcactggatccctggacatttcaacaaggtcgcgaggtcctgagttagtgtgggttgatctctcctctctgagatatttgctacttccagctcaccagactcgagcagcatgataccaccaatgtggctgaccagcatgatgttctgtgtaggtggctgggcacagaggaagctcgggctttgcggaggaacaaacacagacgatgacggggacagaggttgccggtttctagaaagtggctgttgggcacagaggaagcttgggctctcaggtgatccacccgcctcagcctcccaaagtgctgggattacaggcatgagccaccatgcccggcccat

SEQ ID NO: 8272 - DNA, 510 bp, Homo sapiens
  SIMILAR (381)..(307): 721254mologous to Homo sapiens myosin-IE,accession number X98411,Smith-Waterman Score=83.
tcactggcgatggttctgtaggctgtacaggacgtataatgacttctgctctggggaggtctcagggaacttacaatcatggtggaagatgagggagaacagatgtcgatctgggttcttgacaaagaccttggtgctccccatctggtactggtcggctccatgttgaccgcccgaagcaggtgctggacgccctggcgttcgtcccacgccaccgcggccacgtctgagggcgagggctggggtgtgggagtgctcatagcagacaggcctggctgggcgtctgatgaaggggatggcgagggcgggggtggagggctcctcacctctgcggaatttggcgaactggcggcggtaggcgaagccggctctgcgcaccctatgttctccttcaggcccaggtattccacctggtgcttgactcatattggccagggtggtcttgaactcctgaccttgtgatccacccgctcggcctcccaaagtgctggggttacaggcatgagccat

SEQ ID NO: 8273 - DNA, 820 bp, Homo sapiens
  SIMILAR (101)..(346): 691254mologous to Homo sapiens PRO2550,accession number AF130089,Smith-Waterman Score=273.
gctcactgcaacctctgccttccaaatttaagtgattctcttgcctcagccaactgagtagctgggattacaagtgtgcaccgccatacctggctaatttttttattttttatttatttatttttttgagacggagtctcgctctgtcaccctggctggagtgcagtggtacgatctctgctcactgcaacctctgcctccgaggttaaaacgattctcctgcctcagcctcccgagtagctgggattacaggcacccaccaccacatccagctaatttttgtagttttttagtagttacgggatttcaccatcttggccaggctggtcttgaactcctgacctcgtgatccacccgtcctcggcctcccaaagtgctgggattacaggcgtgagccaccatgcccggcccggaccactgtctctagcaaacaatccgagaagccaaacaaggacctctgcaacagtctgcccagaacagctaggacttgattagtttccctcatttttgtccccacttctaacttcagaccaaccagagagaaagccaaatatgctcccctagccgatcacagtggatgagctgcttccccttagccagccgccagcttccctaagcgaacagcctccagtcagggcaggcttgaagctttcccattttcctctataaaacttgcccactcctctgcctgcctggactatctgccagaatttgagtgaggtggctggctcccttgctataaaagctctgaataagtagcctttaccggttctcatttggttggtcatttatttccacatgtgtaacaaaccactctgaa

SEQ ID NO: 8274 - DNA, 422 bp, Homo sapiens
  SIMILAR (5)..(64): 851254mologous to Homo sapiens Human potassium channel K+ Hnov27,accession number Y34125,Smith-Waterman Score=91.
cgcactcagcggcgagaaggccctcatcgaggaggtcttccccgagaccggagacgtcatgtgcaaactccgtcaacgccggctggaaccaggaccccacgcacgtcatccgcttcccgctcaatggctactgccggctcaactcggtacaggtgagggctgcacgctgccccctccccgccgcacccccggcgtccgcggagccctccaggggcagagtgagctggagggaggcgcgatccctgaaacggtgaagccccccgtgccatcctacaaaaaaggcaacaatgtgtcgatgcataatttatgtccctctcataattaaatgatggcgcctgggggatggacttaaaaaaatcgatctgtactttttttttttttttccaaaaggatgttctataaaaatggcccagagtattttc

SEQ ID NO: 8275 - DNA, 684 bp, Homo sapiens
  SIMILAR (474)..(4): 741254mologous to Homo sapiens Human membrane channel protein -2 (MECHP-2),accession number Y70452,Smith-Waterman Score=633.
ctagtccaggggttcctgcttgattcgaacagcagtgggggtgggctgcggccgccgctcctcccggcaaagcacatactcgctgaactgggaggagtccacaccgcccccacaggacgcagccacgctgaaacccctctggaacagccgctccaggacctgtaccgagttgagccggcagtagccattgagcgggaagcggatgacgtgcgtggggtcctggttccagccggcgttgacggagttgcacatgacgtctccggtctcggggaagacctcctcgatgagggccttctcgccgctgagtgcgatccgctcgcccaagtcgggcgtgacgcgcaccaccaggcagtcacaggcccggctgcggcgccgctgctcctgctcctgctgccagcgctccagctcgcgcaccatgggctggagctgatagtagcgcgcctcctcgtacagcagactgaagtcttccaactcgagtctgttgttccctctctgctttgcacactgggtctgagagcggggatctgggtccaggcacacaaatcgaggggaagcagaattattctgtgactgtatggtttcttgcacggtgagagtttcttgctcacggccatcatgtctgggggttgccagcatcgtgcctgcgtgtgatctcatcatgaagctcagacttcctcccagcat

SEQ ID NO: 8276 - DNA, 1088 bp, Homo sapiens
  SIMILAR (332)..(84): 851254mologous to Homo sapiens Human membrane channel protein -2 (MECHP-2),accession number Y70452,Smith-Waterman Score=382.
  misc_feature (1)...(1088): n = a,t,c or g
ctagtccaggggttcctgcttgattcgaacagcagtgggggtgggctgcggccgccgctcctcccggcaaagcacatactcgctgagaactgggaggagtccacaccgcccccacaggacgcagccacgctgaaacccctctggaacagccgctccaggacctgtaccgagttgagccggcagtagccattgagcgggaagcggatgacgtgcgtggggtcctggttccagccggcgttgacggagttgcacatgacgtctccggtctcggggaagacctcctcgatgagggccttctcgccgctgagtgcgatccgctcgcccaagtcggggcgtgacgcgcaccaccaggcaagtcacaggcccggctgcggcgccgctgctcctgctcctgctgccagcgctccagctcgcgcaccatgggctggagctgatagtaagcgcgcctcctcgtacagcagacttgaagtccttaaagtcatcccggaagcagcagcttggacgtccgcaggaagcttcaggacgtagcggaaaatctccccatcccggtcaatgaaataatgttgctttcaaactgtccaggacggatgggttcagtgccattgaagaggcggcttatccttggagtcagggtacttggtgagcgtgggccaggctgcatggtgtacatgtgggccgcccacatcgatgtgcacaggtgcattggacttggtgagctgggctggcagggggatgccctgggcaagccagcggagacacaaggcgaccgggtgagagacaagccggggacatgtttccttccctccgcggtgccggtgctgccgtgtgtgtgaagcgaggacccgctcggccgctccttgcggtgaggcatctaggcttccatccctgcccagagtatcgttggaagccccaggctataagccttaaaatgaatctccaaggtttctcccaacaagcgcatccgtgcgggaccacgaccctctttccgagaccactcggagccggcagatcgggctcgggcgcagcaaccacccccannngctgccggtctcgggcgccgggcgcagcttcgccgcctatgctcgctg

SEQ ID NO: 8277 - DNA, 345 bp, Homo sapiens
  SIMILAR (76)..(132): 941254mologous to Human endogenous retrovirus tripartite fusion transcript PLA2L,accession number Z14310,Smith-Waterman Score=97.
ctgcacccaggtgaaataaacagctttactgctctcacacaaagcctgtttggtggtctcttcacacggacgcgcatgaaatttggtgctgtgactcggattgggggacctcccttgggagatcaatcccctgtcctcctgttctttgctccatgagaaagatccacctacgacctcaggtcctcagaccgaccagcccaagaaacatctcaccaatttcaaatccgccactcccagagcccctggaactctggcccaaggctctctgactgactccttcccagatcttctcggcttagcggctgaagactgacaccggccgatcgcctcggaagccccctagac

SEQ ID NO: 8278 - DNA, 1278 bp, Homo sapiens
  SIMILAR (9)..(119): 571254mologous to Homo sapiens Human secreted protein, SEQ ID NO: 5576,accession number G01495,Smith-Waterman Score=92.
atggtctgggggcttctgaggcgatcgggcagtgtcagtcttcagccgccaagccgagaagatctgggaaggagtcagtcagagagccttgggccagagttccatgggctctgggagtggctgccagaaaatgtgctcagcttcatccacatcacagttatctgtcagcacacgcagagaatgagcttcccaaaaaagatggctatattgagcatttatgtagcaccttccccctcaacaattgaaaaaccttccataggggagagatttgccatctttattacattgctgatgagaaatggagatctaggagaagccagctgtgatgctgtaaaggcactcaggcagccctggggaaaggcccaggtggagaagaaccaactttctcagaccaaatgtccagccatgtggcattttgaaagtcagaacccagctttgctgatagtccgggaatgtctggagggctggaaggcttatccccaaagcactaaagaggagagacttctccatccagaagagggagctgggttcacaagttcaagccaagaaaaatatgtcagagtcagagggcaaaggctatggcccaccccatttttctctcttcagatgattgacagaaaagaaagacatttaataccaccaaatgttataataaagaaaaggggagttggccaagatggccgactggaagcagttagtgtgcacagctctcatggagaggaatggaagggacaagtaaatacagaaccttcaactgaaacatccaggtcaggagatcccatcatgaacccactccaccagggccttaagtctgacatgcagagctacatggagtctcagcagagcagcccctcagccacacatgaagcccagggagccttagatactcaggcttcctggaagaagcagcagcaactccggaaaagcaggagggcaataagcagccctcaggcagatggtgtacagcatgggcatgaggcaagacactgtcatgacgtactcaagagagaccgacagaccagctggccctgcaagatgagcagtctagcagaagaggtggtagcagcagacacctggctgcttgacaatgggacaatgcaggctactggaagggctgctcaagtcagagagcaaggcaagggcatggatttagggcagtacatttcctgttatctcatgacactcagtagggcaataaaacaaaaggaaaacaagaaagtttgctttcagcgcctggggaagccaagggtcaagacagcttcagttcagaagaagtga

SEQ ID NO: 8279 - DNA, 1317 bp, Homo sapiens
ctatatttccagacatctgttatcacttaacccattacaagcccgctgccgcagatattcccgtggcgagcgataacccagcgcactatgcggatgccattcgttataatgctcgaacgcctctgcaaggttctttgctgccgttaacccgtctggtttgggcatgatactgatgtagtcacgctttatcgttttcacgaagctctctgctattccgttactctccggactccgcaccgccgtgttcttcggttcaagtcccaacatccgggcgaactggcgtgtttcattagcccggtagcatgaaccattatccgtcagccactccactggagacgacggaagatcgttgccgaagcggcgttccaccgctcccagcatgacgtcctgtactgtttcactgttgaagccgccggtagtgaccgcccagtgcagtgcctcacgatcacagcagtccagcgcgaacgtgacacgcagtctctctccgttatcacagcagaactcgaacccgtcagagcaccatcgctgattgctttctttcacggccactctgcctgtatgtgcccgtttcgatggcggtacagcaggttttcgctcaagcaacagcgcattctggcgcatgatccggtaaacacgtttggcattgatcgcaggcataccatcaagttctgcctgtctgcgaagcagcgcccatacccgacgataaccatacgttggcagctctccgataacatggtgtatacggagaagcacatccgtatcatcagtgtgacgactgcggcggccatccatccagtcatcggttcgttccccatccccgggcaataagggcgcgtgcgctatccacttttttgcccgtccatattcaacggcttctttgaggagttcattttccatcgttttcttgccgagcaggcgctggagttctttaatctgcttcatggcggcagcaagttcagaggcaggaacaacctgttctccggcggcgacagcagtaagacttccttcctggtattgcttacgccagagaaataactggctggctgctacaccatgttgccgggcaacgagggagaccgtcatccccggttcaaagctctgctgaacaattgcgatcttttcctgtgtggtacgccgtctgcgtttctccggccctaagacatcaatcatctgttctccaatgactagtctggcagccactcccagagcccctggaactctggcccaaggctctctgactgactccttcccagatcttctcagcttagcggctgaagactgatgctgcccgatcgccttggaagccccatagaccat

SEQ ID NO: 8280 - DNA, 882 bp, Homo sapiens
  SIMILAR (882)..(802): 811254mologous to Homo sapiens Human secreted protein, SEQ ID NO: 5576,accession number G01495,Smith-Waterman Score=99.
tcatccctctccttcccctggccttaaacacaggagctccttaggatctgttctcgaatccactgctcctaccatccggctcattttctctgctgccagctggacattcccatggggacggcccgtcagcatctcaaatgcactagtttcaaaaccaaactcatcctgtcccctgaccagacccagcttcacttccagccgtccaatcacatcagtgacacactgtgacacaccttgagcctgacatacaacagccccgtgccctggctccaggcaatctttcagctttatcgggtaagtagggttcaggggactatcttggccacgatccttgaagtcacctacaatttggaagtggcaaggctgattcccagctgtgggtgtgaaacagaggaaatctactgatgaaaggaggctcacctgggcaccaaggagcttcatcaagaaaagagccagaaaaacatctgagacccactgattgcagaacacgcctaaaaacgcatggtgggaagtgaacacaggaagtagctttataccacaaggaagagtactctgaagctggccctcttcttcagggacctttgaaggaaggataagaggccatggaaccgtggaagggagtcccacttggaagggtaaatacagaacaaatagccccattttctgaggcagaggggccaagagagattcattagggttcgaggaaagtaagaaaggctgcccaaggcttgaatgaaggaccgagggagctgttctggcagccactcccagagcccctggaactctggcccaaggctctctgactgactccttcccagatcttcttggcttagcggctgaagactgacacagcccgatcgcctcggaagccccatagaccat

SEQ ID NO: 8281 - DNA, 513 bp, Homo sapiens
  SIMILAR (465)..(340): 761254mologous to Homo sapiens Human secreted protein, SEQ ID NO: 5576,accession number G01495,Smith-Waterman Score=162.
tcagggatcaagaggggtcagatcactaagggccttcaagtccatgatagggactctggattttattctgagtgagacaaaaaggcattggagagtttccactggagaagggattgttgtaaaaggatctagcttttctagatctgtttcagtttctagaactgttgggagatctagccttttcacctggagaggataggaatgtcttggttctgccaggtctagagaatcctggaaggagagtctttctgttaccacaaagcaggcccccatcagacattgaatctgctggtgccttgattttggatttcccagcctccggaactgtgagaaataaatttctggcagccactcccagagcccctggaactctggcccaaggctctttgactccttcccagatcttcttggcttagcggctgaagactgacgctgcctgattgcctcggaacccccctggaccatcacagacgccgagcttcgggtaactctcacagtggagggtaagtccat

SEQ ID NO: 8282 - DNA, 410 bp, Homo sapiens; identical to SEQ ID NO: 446
  SIMILAR (203)..(259): 841254mologous to Homo sapiens Human secreted protein, SEQ ID NO: 5576,accession number G01495,Smith-Waterman Score=87.

SEQ ID NO: 8283 - DNA, 741 bp, Homo sapiens
  SIMILAR (435)..(25): 661254mologous to Homo sapiens reverse transcriptase,accession number L27428,Smith-Waterman Score=471.
ctaatgatcagtgatgttgagcttttttctcctatgattgttggctgcatctatatcttcttttgtaaagtgtctgttcatgtcttttgcccactttttaatggtgttgtttgtatttttcttataaacttgcttaagttccttagagatgctagattttagacctttgtcagatacatagtttgcaaatattttttcccattctataggatgtctgttttctctgttgatagttttctttgctgtgcagtagcaccttagtttaattagaaccaacttgccaatttttgcttttgttgcaattgcttttgccatcttcatcatgaaatctttgccagttcctgtgtcttgaatggtattgcctagattgtcttccaggacttttatagttttgggttttacatttaagtctctagtccatctggcagccacttccagagcccctggaactctggcccaaggctctctgactgactccttcccagatctcggcttagcagctgaagactgatactgccgaatcgcctgtggcttgtttttggtttggtttctatgctccatagctactgagactgacatctcttctcttgttgcaactttaatctgtccaaccaatatgcaggttagtctctccccacctgagagtttaggtaccaagtttcccaaggccttgccaattgctagcttctccctatatacctccagactcccaggagctatcccccatagatggccagacat

SEQ ID NO: 8284 - DNA, 615 bp, Homo sapiens
  SIMILAR (370)..(570): 471254mologous to Human T-cell lymphotropic virus type 1 Gag,accession number S74562,Smith-Waterman Score=188.
atgagaaaaagtttgctgtccactgctctagagaatggaatggctagatccagccagaaaagcatctctgggctttccttagctcatgggcagaagggaggacaagatgtatctgcccttttgctggtggtgtcccttaagaagcaggttcttctggcgcacaatccttttataaccattgctagggtcatcgtgccaaacctcttcacacggacacgtgtaacatttggtgccaaagacctgggacagaaggactccttcgggagaccggtcccctgtcttcgccctcactccgtgaggagatccacctatgacctcaggtcctcagaccagcccaaggaacatctcactgatttcaaatcgggatcttgcttcaagtgccggaaatctggccactggaccaaggaatgccagcagcccaggattcctcctaagccatgtcccatctgtgcaggtccccactggaaatcggactgtccatcttgcccagcagccactcccagagcccctggaactctggcccaagactctctgactgactccttccccaccgatcccaaaggctctctgattgactacttcccagatcttctctgcttagtggctgaagactga

SEQ ID NO: 8285 - DNA, 729 bp, Homo sapiens; identical to SEQ ID NO: 444
  SIMILAR (293)..(727): 691254mologous to Homo sapiens Similar to splicing factor, arginine/serine-rich 4,accession number BC002781,Smith-Waterman Score=441.

SEQ ID NO: 8286 - DNA, 330 bp, Homo sapiens
  SIMILAR (159)..(7): 521254mologous to Homo sapiens neutral protease large subunit,accession number M27826,Smith-Waterman Score=120.
atgggggctgtctgtgaggccttgcggcagtacggcccagaaggggacagacttaccttccactgtgagagttacccgaagctcggtgtccatgatggtttagggggcttccgaggagatccggcagtgtcagtcttcagccgtgaagctgagaagatctgggaaggagtcaatcagagagccttgggccagagttccaggggctctgggagtggccgccagaaaatgaaaggaaatgaaattaagagaagggagagattgaagggtggcaccaagattgaaaggagaaagtggttgagggatagtgagagaggttggagaagagagtaa

SEQ ID NO: 8287 - DNA, 990 bp, Homo sapiens
  SIMILAR (1)..(117): 821254mologous to Homo sapiens Human secreted protein, SEQ ID NO: 6532,accession number G02451,Smith-Waterman Score=168.
atgggcaaagactttatgactaaaacaccaaaagcaattgcaacaaaagccaaaattgacaaatgggatctaatcaaactaaagagcttctgcacaacaacagaagctatcatcagggctcaggaaacaaatccaggatgtgaaaggaagctctgcccttcgctggactgtagtgagaagcggatgggtgcggaggaggaaggcaagtgggagggtcaggcttcaaccagagaggagcagggggcttccgaggcaatcaggcagtgtcagtcttcagctgctaagctgagacgatctgggaaggagtcagtcagagagccttgggccagagttccaggggctctgggagtggctgccagactgccttcagaaaagctgcagctgatcccagcacatgactcacacagcatctacctgtcacattccaagtgcctcgctgtgtcgtgggcatcaagtggcaaaatgaacaaagatcgaatgtcaggaggccctatccagggtcacatgcttggccgcacttcccctttcaagagctggtgggagaaagattttgagcagggtcaccgaagacaggttaagccatctcctattggcctacacaagcatcccacccagtttcctggcttttatcctagatcagtacaacccattctctatatgcagctagagggcccagagggcagagctgagagtcacagcagtgaacaaggagctcttgttgggggaaggaggcttcgttgggcgatgggaacagaggggtggtggcagcgcttcaccacttcactggggcagcagccaggcagcactcaggtagccctttggaacgtgggccacaccctcaactgtgatcacccaggtcctgagtggagggacactggctggaaatcctcaggcctgaagctgagtcctgcctcagaagcagccccaccagccagccagatgctggcagctgctctcccactggctgcccagacctgccctcctatgtaa

SEQ ID NO: 8288 - DNA, 588 bp, Homo sapiens; identical to SEQ ID NO: 2005
  SIMILAR (124)..(195): 791254mologous to Homo sapiens Human secreted protein, SEQ ID NO: 5576,accession number G01495,Smith-Waterman Score=86.

SEQ ID NO: 8289 - DNA, 678 bp, Homo sapiens
  SIMILAR (576)..(463): 811254mologous to Homo sapiens Human secreted protein, SEQ ID NO: 5576,accession number G01495,Smith-Waterman Score=150.
tcaacaagtggcctgacccttgaagggtttcttcaccgtgtctggtaaagtttccaaattagttacaggaaactcaatacctcgcacataagcccattccttcttctttgtttggtttattccataggcaatggagcccccaatttgtttttcaactggcacagagtcgatgctcatggaatgatacgtgatggggagagtgagtaagtgaatgaatgaatgaatgctattcctgtagcgagcccatgcatggtttgttctctgatcgtgcatgtgcttggctctagacccatgtaaccatggtgaaggccaccaaccagatttcagtggagtgaagttcaggaggcatggagctgacaaccatgaggcctcggcagccaccgccaccaccgccgccgccaccaccgtagcagcagcagcagcagcagcagcagcagcagcagcagcaagagtaactctgactggcagccactcccagagcccctggaactctggcccaaggctctctgactccttcccagatcttctcagcttagcggctgaagactgacgctgccggatcgcctcggaagcccccagaccatcacggatgccgagcttcgggtaactctcacagtggagggtaagtccgtccccttctgggctgtactgccgcaaagcttcacagacagcccccat

SEQ ID NO: 8290 - DNA, 411 bp, Homo sapiens; identical to SEQ ID NO: 447
  SIMILAR (109)..(222): 861254mologous to Homo sapiens Human secreted protein, SEQ ID NO: 5576,accession number G01495,Smith-Waterman Score=172.

SEQ ID NO: 8291 - DNA, 534 bp, Homo sapiens
  SIMILAR (213)..(284): 831254mologous to Homo sapiens Human secreted protein, SEQ ID NO: 5576,accession number G01495,Smith-Waterman Score=93.
atgagggtgagaaacagggaagaaggaaatgtggggaaatggggtgaacgtcaggtggatcagagagatgcagtcatgagggtcaggtgtggtatctggaataatgtgggagaccggattgaagtccgggccgagaacaatggtaattgtgggactcaacaaagagtgggtacaactgaaggagccgggggagcagaaagtataagtgtcaggcttccgaggcgatcgggcagcgtcagtcttcagctgctaagccgagaagatctgggaaggagtcagtcggagagccttgggccagagttccaggggctctggaagtggctgccagatgaatcctctgtctggccggccccaggttgtctgcttctttactgcacacatgttgacaaagaaaagggaagaaggagcctccatgttgaacatgccttgcttccagtgaaaggaagagatgatccaagcaaatttaggaccaatagcagactcttcacactgcctggggatagagggaccaccctgggctcctcttactcctgg

SEQ ID NO: 8292 - DNA, 774 bp, Homo sapiens; identical to SEQ ID NO: 2012
  SIMILAR (2)..(88): 721254mologous to Homo sapiens putative p150,accession number U93564,Smith-Waterman Score=107.

SEQ ID NO: 8293 - DNA, 825 bp, Homo sapiens
  SIMILAR (292)..(681): 361254mologous to Human T-cell lymphotropic virus type 1 Gag,accession number S74562,Smith-Waterman Score=188.
atgactgatacacaagtaaacgagcagacaatagaaactgccaatccatctgaccttgcccctcctccccaggctgctcctcaccaggccaagccaggtcccaattcttcctcaacctccactctcccaccctataatgcttctatcacctcacctcttcacacccagtctggcttacagtttctttctacccagagggaccagaaggccatcttattctcaatatgtattttattacccaatccactcccaacattagaaaaagctccaaaaattagattccgccctcaaaccccacaacaggacttaattaaccttgccttcaaggtgtacaataatagagaagaggcagccaagcggcaatgtatttctggattgcaattacttgcctccgctctgagagaaaccccagccacatctccagcacacaagaacttcaaaacgcctaaaccacagtggccaggcattcctccaggacctcctcccccaggatcttgcttcaagtgccggaaatctggccactgggccaaggaatgcccgcagcccaggattcctcctaagccgtgtcctatctgtgcaggtccccactcgaaatcggactgtccagcttgcccaaaagccactcccagagcccctggaactctggcacaaggctctctgattgactccttcccagatcttcttggcttagcggctgaagactgatgctgccggatcgcctcggaagcctgggctgtactgcctcaaggcttcacagacagccgccattacttcagtcaagcccaaatttcttcctcatctgttacctatcttggcgtaattctc

SEQ ID NO: 8294 - DNA, 1802 bp, Homo sapiens
  SIMILAR (603)..(1772): 1001254mologous to Homo sapiens bG153O3.1 (similar to C.elegans hemicentin precursor),accession number AL133515,Smith- Waterman Score=2035.
atgcccgggcaccaaaaagcacctctgagacccgcagtttccaaaaaggtagtcaatgttggagaaaggcaaaatcaagtaattattgaaaccggaggggattttgccgatttcggaaccaccatcaaacaggattttcgcctgctggggcaaaccagcgtggaccgcttgctgcaactctctcagggccaggcggtgaagggcaatcagctgttgcccgtctcactggtgaaaagaaaaaccaccctggcgcccaatacgcaaaccgcctctccccgcgcgttggccgattcattaatgcagctggcacgacaggtttcccgactggaaagcgggcaggggcttccgaggcgatcgggcagtgtcagtcttcagccactaagccgagaagatctgagaaggagtcagtcagagagctttgggccagagttccaggggctctgggagtggctgccagaaaataccagaaaatgaaaggaattgaaattaagagaagggagagattgaagtgtggcgccaagattgaaaggagaaagaggttgaaggatagggaggttggagaagagagtaaaaagaggccacttactggatttgaaattgaaccacccaaagtcactgtgatgcccaagaatcagtctttcacaggagggtctgaggtctccatcatgtgttctgcaacaggttatcccaaaccaaagattgcctggaccgttaacgatatgtttatcgtgggttcacacaggtataggatgacctcagatggtaccttatttatcaaaaatgcagctcccaaagatgcagggatctatggttgcctagcaaaagcccctaagttgatggtagttcagagtgagctcttggttgcccttggggatataaccgttatggaatgcaaaacctctggtattcctccacctcaagttaaatggttcaaaggagatcttgagttgaggccctcaacattcctcattattgaccctctcttgggacttttgaagattcaagaaacacaagatctggatgctggcgattatacctgtgtagccatcaatgaggctggaagagcaactggcaagataactctggatgttggctcacctccagttttcatacaagaacctgctgatgtgtctatggaaattggctcaaatgtgacattaccttgttatgttcagggttatccagaaccaacaatcaaatggcgaagattagacaacatgccaattttctcaagacctttttcagttagttccatcagccaactaagaacaggagctctctttattttaaacttatgggcaagtgataaaggaacctatatttgtgaagctgaaaaccagtttggaaagatccagtcagagacaacagtaacagtgaccggacttgttgctccacttattggaatcagcccttcagtggccaatgttattgaaggacagcagcttactttgccctgtactctgttagctggaaatcccattccagaacgtcggtggattaagaattcagctatgttgctccaaaatccttacatcactgtgcgcagtgatgggagcctccatattgaaagagttcagcttcaggatggtggtgaatatacttgtgtggccagtaacgttgctgggaccaataacaaaactacctctgtggttgtgcatgttctgccaaccattcagcatgggcagcagatactcagtacaattgaaggcattccagtaactttaccatgcaaagcaagtggaaatcccaaaccgtctgtcatctggtccaaggtaaatgatacatctagttatatttcctga

SEQ ID NO: 8295 - DNA, 988 bp, Homo sapiens
  SIMILAR (242)..(60): 611254mologous to Homo sapiens neutral protease large subunit,accession number M27826,Smith-Waterman Score=171.
agtgtggtggaattcgagttggggagttttaagaggtttagaagcctggcccgtcaatacccacaacaggttatggaggcaagggaaacaggcccttgaaaagaaggtaatgtggcgtgggtagcctccgtattgattaagaaggggacgggcttaccttccactgtgagagttacccatagctcggcatccgtgaatggtctagggggcttccgaggcgatcgtgcagtgtcagtcttcagctgctaagccgagaagatctgggaaggagtcagtcagagagccttgggctagagttccaggggctctgggagtggctgccagttctttggcccaggcccccagccacgatttcgacttggaacttggctctctgcatgaagctgaaggaattcctcacagccctgctgatggcctagatgtctcagagctgaattattcagtcagcaactcaacaaatatttatccagtgtgttcagcatgccaggccctgtgccaggacctggagacaccatcctgtcctcgaggggctgccgtacccgttggggagatgcagagcctagctacggccacacagcaggaaaggaccaggccatgggtactggcgtgggctgagatccccagcttcaggctggttctgggcacataccagggagaaatgtttgtccaggagaacgtatctgctggaggggcaccccagattagatccaagcactcccacgtactaaccaccactggagaaagaagtagcacaaggaagggacttaatacatgcttccggatgcctatggagctaaattccactggaggcccttcagggaccccagggctgcccccaattttcccaagtctgctgtatcccagttattccgacagtggagatgaaacagggcaggcagcaattggcatcggatttccaggaccagcaggacttggaattttacgagatcttgagttggaagccaggaatcctgataataccacctag

SEQ ID NO: 8296 - DNA, 1671 bp, Homo sapiens
  SIMILAR (926)..(985): 1001254mologous to Homo sapiens 2P domain potassium channel TREK2,accession number AF279890,Smith-Waterman Score=99.
atggaactggtcccggaggaagccactgctgtgtctgcccgggcatatacagggcggtggcccctggatgctgctgcaagaaccatccttgtgactgctcctggagtggggcataccaacattgttttatgtggacaagcatccctagatgcttacattaaaagtatttgtctaaaaaaagaaggaaggaaggaaggaaagaagaaaggaaggaaagaaagaaagagagataaatatggaaagaaagagaaaaaaaggaagaaaggaagaaagaaaggaagaagaaagaaagaaaagaagaagaaagaaagagagaaagaaagaaggaaagaagagaaagaaggaaagaagagaaagaaagaaaaagaaagaaagaaagagaaagaaagaaagaaactgtctattgggaagggcgttgtttactgcttatccagcaatacccagaaaaagcaagtgagtcagaccaagatccgggtcatctcaaccatcctgttcatcttggccggctgcattgtgtttgtgacgatccctgctgtcatctttaagtacatcgagggctggacggccttggagtccatttactttgtggtggtcactctgaccacggtgggctttggtgattttgtggcagcgcaccctagtgaccatctttgctgggtaatagtgacttgcaaaggtaaatatttactcccagatagcccacaggagaaagctacagatttctctggcgtagcacagaaacgaaatgaacctcaaaaaccacttactggtgcgggaactcagatcgtatcctacagctctaatgatgcaggagagagttgtctgaaaggaaaaaccaaaagcagctgcaccaaaccgaagggggcttggcacagagaagttggaattctaacgttaagaagtggcagcagctgtcgagcctcatgctgtcctcagtatgatcggagattggctacgggttctgtccaaaaagacaaaagaagaggatgccgtccccctctctttaagtcaccatctccaaatctgaggcttcttggggttgcccaccacgtgggtgaaatcaaggcccatgcggcagagtggaaggccaatgtcacggctgagttccgggagacacggcgaaggctcagcgtggagatccacgataagctgcagcgggcggccaccatccgcagcatggagcgccggcggctgggcctggaccagcgggcccactcactggacatgctgtcccccgagaagcgctctgtctttgctgccctggacaccggccgcttcaaggcctcatcccaggagagcatcaacaaccggcccaacaacctgcgcctgaaggggccggagcagctgaacaagcatgggcagggtgcgtccgaggacaacatcatcaacaagttcgggtccacctccagactcaccaagaggaaaaacaaggacctcaaaaagaccttgcccgaggacgttcagaaaatctacaagaccttccggaattactccctggacgaggagaagaaagaggaggagacggaaaagatgtgtaactcagacaactccagcacagccatgctgacggactgtatccagcagcacgctgagttggagaacggaatgatacccacggacaccaaagaccgggagccggagaacaactcattacttgaagacagaaactaa

SEQ ID NO: 8297 - DNA, 418 bp, Homo sapiens
  SIMILAR (202)..(363): 321254mologous to Caenorhabditis elegans cyclin D,accession number AF053067,Smith-Waterman Score=80.
tttcgtctcgccatggcgcaggtgctgatcgtgggcgcctggatgacaggaagcttgtgcgctgcgctgctgaggaggcagacgtccggtcccttgtaccttgctgtgtgggacaaggctgacgactcaagtgcagaagtctacttcagacatcgtgtgacacagatcaacctaagagatgacaaatgggaagtatccaaacaaacaggctcccctgagcagtttgatcttattgttctcacaatgccagttcctgagattctgcagcttcaaggtgacatcaccaccttaattagtgaatgccaaaggcagcaactggaggctgtgagctactcctctcgatatgctctgggcctcttttatgaagctggtacgaagattgatgtcccttgggctgggcagtacatcaccagtaatt

SEQ ID NO: 8298 - DNA, 1209 bp, Homo sapiens
  SIMILAR (237)..(139): 511254mologous to Homo sapiens Schwannomin-binding protein C- terminal fragment,accession number W48927,Smith-Waterman Score=89.
ctaaggcacggtattaataataattctcacagtgcggctttgaactgaatcttcagcatcacctagaaacttgtaaaaaatgcaaattgtccatgcatacctcgatacaaccagaaactcagactgtggcccagtaatctttttttctttttccttctttctttcatttaggtcatcatctttcaatctttctttctctttctttctttctctctctctctctttctgtctgtctctcaagccatgctgaggagcccaagtacctacattgctggtgggagtgttaactgttacaatctcgacggtgcaaaatttggcaatatctcttttggggaaggcaaagtaaggggaagggattttatcagtctctggaagaatgtatagagtactgtaaggcgaaaagagagggccattctgtggagaggtgtcacgagttcccaaggccactttcaggcttgatgattcatgagaagaacttacaggcttcagaaaagctgttaaattcacagggtatcgtttacctaggcttccaggattatctcttctctcaccaaccattctttcatggactctttcttctcttttcagcccataagtgttggtatttctcagggttctgtgataagctatcttctcttctaattctacccataatccatcaggaatctcatccactcccatagtttctagtctgtattccaataactctgcgccatggcgagagggagcagcgatccgcgctgagtctctgcggcggggccgttcggcccgggctttctggaaaggcggccgaaccggcgctagcgctctttggttccgtgctccctgggccgacctgggccctgagctttcctccggccggcctggatcaaatcctggctccaaggcctttaaggcaagtgactttatctccaaattgatatcctcatttacaaaatggtaataataacgtcccttcctcatgggcctcttgtgaaaagcgaatgggtagatactcatacagcactcagaactgcacatatgggatgatctggacatggttttgagccccatgatcaccacattcttttcagaccataacactgaacttgtatttttatcatcaaaattgagcaagagagtaccaagagacaccgaattacttgactggtgaacatatttcctgccctcattctgtagcagcagccgaacctgtgcctgatgatccat

SEQ ID NO: 8299 - DNA, 687 bp, Homo sapiens
  SIMILAR (340)..(522): 931254mologous to Homo sapiens unnamed protein product,accession number AK002080,Smith-Waterman Score=301.
atgcaaaactggatacagagcataaaagtggaaaatttgcagcctgatgatgcgatagaaaacaacccattttctggggagaaactcaagctagctggagctgtgagaagagggccaccatcttctagatcccagaatggtagatccaatggcagcttgcaccatgcagctggaaaagctgcagacactcaatgccagcctgtgaaagcagctgggaggagggctgtatcttgcaaaaccacaagggtagagctgcccaagactgtcagaaccaagccaaaggagcacaaagtactctctgccttttggcattctacctccttggctgcgtgtctactgctggtcccagtaattagtgaatgccaaaggcagcaactggaggctgtgagctactcctctcgatatgctctgggcctcttttatgaagctggtacgaagattgatgtcccttgggctgggcagtacatcaccagtaatccctgcatacgcttcgtctccattgataataagaagcgcaatataggagtggaaaatatcaaggatgatttcggatttttgcccaaaaaagctaggagattggtggctccattttcaaaaatgggaaagatgggggaggaaaaagttcagaataatgaaagtaggcaatcaagagccagtgatgaacgttttactgacaatactatatag

SEQ ID NO: 8300 - DNA, 1543 bp, Homo sapiens
  SIMILAR (428)..(333): 751254mologous to Homo sapiens Human secreted protein sequence SEQ ID NO:141,accession number Y87102,Smith-Waterman Score =128.
ggggctttgataatgtgattattctttattcagaattgaaattttcataaggataatcaagtttttggcatacaaactgttattgtgatttaatgtaatttttttgagagagtcgtttgttattttttaagtaccacttttcctccaacaaggagtagtcatagcaattcagaaaagtagggaaggtgcaaggtgtgaggaatttccattctagcatgggttgtaactattaaaaattccaaaattgattttatactccacatgaaaaatgataataagtgaagaacaattttccagtaatttttcttagcaaaatagaaaacaaaataatcaataacagaaaattgtgaaaataaaaaccccataccacatgtagagaataaggatataggcactaaatataattctttaaagcttccagaacacataagggcagaagtgatgcagccatcaaagttggactgagtaaatccatcccctccacatgcaaggaaaggtttgtgatgcagagtcatttggccaggacagttggcagcagcatttgtaacctgtgaatgtctccatttttggcatttggtagcaattggctgaggcaaacccggcaaaatgttttccagctgctggaagactaactcttgcacatcctcaatgctgtgttccaagtatgtaactccaaatgggacagtggtgtgaatcacgagggaaggcccaatttctgatgactctatattgcgcttcttattatcaatggagacgaagcgtatgcagggattactggtgatgtactgcccagcccaagggacatcaatcttcgtaccagcttcataaaagaggcccagagcatatcgagaggagtagctcacagcctccagttgctgcctttggcattcactaattaaggtggtgatgtcaccttgaagctgcagaatctcaggaactggcattgtgagaacaataagatcaaactgctcaggggagcctgtttgtttggatacttcccatttgtcatctcttaggttgatctgtgtcacacggatgtctgaagtagacttctgcacctgattctttcaagtaatgcttaataagtgaagaaattccttgaggtgccacaaagttacagtctccttctttcatcaccattccttcaataggcgagcttagaggcctcaaaacgccataggctaacaggttcatcataaataagttggtgttttttggcataatgaggagtagcaggtaatgtagtgagcagccaagtcagctgtgcactgcggattatgaggactgcaggctgtagtcattcttccccatgagttgtcacccatgtctcaagcagcaaggtacaagggaccggacgtctgcctcctcagcagcgcagcgcacaagcttcctgtcatccagagcgcccacgatcagcacgtgcgccatggcgagagggagcagcgatccgcgctgagtctgtgcggcggggccgttcggcccggcctttctgtaaaggcggccgaacgggcgctagcgatctttggttccgtgctccctgggc

SEQ ID NO: 8301 - DNA, 416 bp, Homo sapiens
  SIMILAR (159)..(416): 961254mologous to Homo sapiens nuclear factor IV,accession number X57500,Smith-Waterman Score=430.
ttcagggttccgctatggaagtgatatagttcctttctctaaagtggatgaggaacaaatgaaatataagtcggaggggaagtgcttctctgttttgggattttgtaaatcttctcaggttcagagaagattcttcatgggaaatcaagttctaaaggcctttcatggaagacttgcggcaatacatgttttcatccttgaaaaacagtaaaaaatatgctcccaccgaggcacagctgaatgctgctgatgctttgattgactccatgagcttggccaagaaagatgagaagacagacacccttgaagacttgtttccaaccaccaaaatcccaaatcctcgatttcagagattatttcagtgtctgctgcacagagctttacatcccctggagcctctaccctcaattcagcag

SEQ ID NO: 8302 - DNA, 2133 bp, Homo sapiens
  SIMILAR (1021)..(1335): 1001254mologous to Homo sapiens Ku (p70/p80) subunit,accession number M30938,Smith-Waterman Score=543.
atggggcacaggaaaaagaagaggaaagagtcacgcccagaatccatcatcatctaccgctcagacaatgagaaacagatgagagcccggagaatcagaagccacttggcctgtttgccctttgctcccatttttccttgtttgcttctttgtctgaaaatttatgctgtcctgctgcctccgctgggcttcgtttccacctttgctggaggagatttagctgacaacctcacagatcttccccgccccttctgccgagctgatctttctcttggaaatcttacccgcagggaagggcgagtgtccgtgcctgcctgcctgcctgctgcagcccgcgcaaagctgagcggccagggcgctgctgttcctttaaacgtttcaggcggctcaaacaccacacgctcccgactacggcggaatggagagaatgtgcgcatgctcggcgggaatctgcgcatgctcggcgggaatctgcgcatgctcggagagaatctgcgcatgctcggccggaatctgcgcgagctcggcgggaatctgcgcaagctcggcgggaatctgcgcatgctcagagttccggggcacggtttccccgcccctttcaggcctagcaggaaacgaagcggctctttccgctatctgccgcttgtccaccggaagcgagttgcgacacggcaggttcccgcccggaagaagcgaccaaagcgcctgaggaccggcaacatggtgcggtcggggaataaggcagctgttgtgctgtgtatggacgtgggctttaccatgagtaactccattcctggtatagaatccccatttgaacaagcaaagaaggtgataaccatgtttgtacagcgacaggtgtttgctgagaacaaggatgagattgctttagtcctgtttggtacagatggcactgacaatcccctttctggtggggatcagtatcagaacatcacagtgcacagacatctgatgctaccagattttgatttgctggaggacattgaaagcaaaatccaaccaggaaagaagtttgagaagaggcatattgaaatattcactgacctcagcagccgattcagcaaaagtcagctggatattataattcatagcttgaagaaatgtgacatctccctgcaattcttcttgcctttctcacttggcaaggaagatggaagtggggacagaggagatggcccctttcgcttaggtggccatgggccttcctttccactaaaaggaattaccgaacagcaaaaagaaggtcttgagatagtgaaaatggtgatgatatctttagaaggtgaagatgggttggatgaaatttattcattcagctcatactgggggaaccgggcccatggttgggatccatgggtcgctctagtctcccgttctgtggtcgcacacaccttgagggcacccacacagtttgttcatctcctgcaaaaacgcaagcgtacccttatccccacgcattctggagctgcaagagcaggtgtttacaacctcaccaaatctttagctttggaatgggcctgcagtggaatacggatcaattgtgttgcccctggagttatttattcccagactgctgtggagaactatggttcctggggacaaagcttctttgaagggtcttttcagaaaatccccgctaaacgaattggtgttcctgaggaggtaaggtctcctctgtggtctgcttcctactgtctcctgcagcttccttcatcactggacagtcgggtggatgtggatgggggccggagtctctatactcactcgtatgaggtaccagcttcagagcccgctggctcaggggaacaacttagaggacccagatccattttctcagaacagaggagcaattacatctggagcctgccacttgtcgactggccgtcctgtggcccattggtctccttaaagagcaatgccacttcagggctcagcaatgatctgtgttgcaggaaggttggacatgcaggggcagtgacagctccgttgaccttggttaacagggagtccatgctaatgggccgtctacagcctgcctccatcactgtgcctgtcacaccagttctgggctggccggtgatgaagtccagctatcaactggctgagttttcttga

SEQ ID NO: 8303 - DNA, 1155 bp, Homo sapiens
  SIMILAR (163)..(1068): 1001254mologous to Homo sapiens Ku (p70/p80) subunit,accession number M30938,Smith-Waterman Score=1550.
atggatgtgattcaacatgaaacaataggaaagaagtttgagaagaggcatattgaaatattcactgacctcagcagccgattcagcaaaagtcagctggatattataattcatagcttgaagaaatgtgacatctccctgcaattcttgtggccatgggcttcctttccactaaaaggaattaccgaacagcaaaaagaaggtcttgagatagtgaaaatggtgatgatatctttagaaggtgaagatgggttggatgaaatttattcattcagtgagagtctgagaaaactgtgcgtcttcaagaaaattgagaggcattccattcactggccctgccgactgaccattggctccaatttgtctataaggattgcagcctataaatcgattctacaggagagagttaaaaagacttggacagttgtggatgcaaaaaccctaaaaaaagaagatatacaaaaagaaacagtttattgcttaaatgatgatgatgaaactgaagttttaaaagaggatattattcaagggttccgctatggaagtgatatagttcctttctctaaagtggatgaggaacaaatgaaatataaatcggaggggaagtgcttctctgttttgggattttgtaaatcttctcaggttcagagaagattcttcatgggaaatcaagttctaaaggtctttgcagcaagagatgatgaggcagctgcagttgcactttcctccctgattcatgctttggatgacttagacatggtggccatagttcgatatgcttatgacaaaagagctaatcctcaagtcggcgtggcttttcctcatatcaagcataactatgagtgtttagtgtatgtgcagctgcctttcatggaagacttgcggcaatacatgttttcatccttgaaaaacagtaagaaatatgctcccaccgaggcacagttgaatgctgttgatgctttgattgactccatgagcttggcaaagaaagatgagaagacagacacccttgaagacttgtttccaaccaccaaaatcccaaatcctcgatttcagagattatttcagctctttgcaaatgcaacatctgctactctcgctctaggagagttccaaagaaatggaatccctgggttgaaggacatgtatatttaa

SEQ ID NO: 8304 - DNA, 374 bp, Homo sapiens
  SIMILAR (106)..(270): 461254mologous to Homo sapiens high mobility group protein 14,accession number J02621,Smith-Waterman Score=106.
tttaaaggaacagcagcgccctggccgctcagctttgcgcgggctgcagcaggcaggcaggcaggcacggacactcgcccttccctgcgggtaagatttccaagagaaagatcagctcggcagaaggggcggggaagatctgtgaggttgtcagctaaatctcctccagcaaaggtggaaacgaagcccagcggaggcagcaggacagcataaattttcagacaaagaagcaaacaaggaaaaatgggagcaaagggcaaacaggccaagtggcttctgattctccgggctctcatctgtttctcattgtctgagcggtagatgatgatggattctgggcgtgactctttcctcttctttttcctgtgccccat

SEQ ID NO: 8305 - DNA, 1231 bp, Homo sapiens
  SIMILAR (226)..(318): 961254mologous to Homo sapiens nuclear factor IV,accession number X57500,Smith-Waterman Score=160.
atggtatgcgagctgtgcgtgtcggcgacgcaggcggccgtggttaagcgcgcttgtggggcggataaggaggtgacagtcgtggtgggcatgagggcacgccagtatttgccgccggaaggagcggccttcggtgcagacggtagttgcgagggctctgtccgcggcggtgcagttggggcgatggttagcgccacggtgctacacgcggatgtagagggcacggactgtttagtgtatgtgcagctgcctttcatggaagacttgcggcaatacatgttttcatccttgaaaaacagtaagaaatatgctcccaccgtccacatccctcagccccgccgagactcctgctcccgtctccagttaccccaggtcaccacagccacctctctgaaccagcgccccgttcacgtacccagctccaagagctcccttcacgatggctttcccgatgcccttgcccccgccgttgacaatgcccacttggccctgcagcaaaccaggcgccagttagctcctgcccttagccaaggaggccatcctgccagcggccgcatcctcccggagcagaaccgctccccgccggctgtccgcaacctccgccagcgtcggtccctgggcaggtgtgggtggaatgcatccttgggacatctttgcatagccccatctaggaagaagttctgtgatgtgtgaaactgtgagtttactcaaacaagtccaactctttaataagacataggtaagacgtcaggtctggaatggaaagagccaacagcagtagaaggcccaggtcccagcttcccaaagcccccaccagggctctctcaggaaggctgtggctgctgccctggcgctggatggggaatccacaatggggcacaggaaaaagaagaggaaagagtcacgcccagaatccatcatcatctaccgctcagacaatgagaaaacagatgaggagcccggagaatcagaaggtggagatcagcctaaagaggaggagggagatgatttcctagactatcctgtggatgatgatgatacagaaatctccaccctttcagaattcctaatgaaatggaagaggctgatttatacgcaaaaactggtaacacaagcagactatgctaactacttaatcctcagtagcactaatggagaagttcgggtgatagcaggagaaagctggagaagagaagctggattcaggatgcaatctgaacttgctgattga

SEQ ID NO: 8306 - DNA, 3357 bp, Homo sapiens
  SIMILAR (34)..(1509): 761254mologous to Cricetulus griseus Ku (p70/p80) protein,accession number L48606,Smith-Waterman Score=1873.
ggcgggcgaccaaagcgcctgaggaccggcaacatggtgcggtcggggaataaggcagctgttgtgctgtgtatggacgtgggctttaccatgagtaactccattcctggtatagaatccccatttgaacaagcaaagaaggtgataaccatgtttgtacagcgacaggtgtttgctgagaacaaggatgagattgctttagtcctgtttggtacagatggcactgacaatcccctttctggtggggatcagtatcagaacatcacagtgcacagacatctgatgctaccagattttgatttgctggaggacattgaaagcaaaatccaaccaggttctcaacaggctgacttcctggatgcactaatcgtgagcatggatgtgattcaacatgaaacaataggaaagaagtttgagaagaggcatattgaaatattcactgacctcagcagccgattcagcaaaagtcagctggatattataattcatagcttgaagaaatgtgacatctccctgcaattcttcttgcctttctcacttggcaaggaagatggaagtggggacagaggagatggcccctttcgcttaggtggccatgggccttcctttccactaaaaggaattaccgaacagcaaaaagaaggtcttgagatagtgaaaatggtgatgatatctttagaaggtgaagatgggttggatgaaatttattcattcagtgagagtctgagaaaactgtgcgtcttcaagaaaattgagaggcattccattcactggccctgccgactgaccattggctccaatttgtctataaggattgcagcctataaatcgattctacaggagagagttaaaaagacttggacagttgtggatgcaaaaaccctaaaaaaagaagatatacaaaaagaaacagtttattgcttaaatgatgatgatgaaactgaagttttaaaagaggatattattcaagggttccgctatggaagtgatatagttcctttctctaaagtggatgaggaacaaatgaaatataaatcggaggggaagtgcttctctgttttgggattttgtaaatcttctcaggttcagagaagattcttcatgggaaatcaagttctaaaggtctttgcagcaagagatgatgaggcagctgcagttgcactttcctccctgattcatgctttggatgacttagacatggtggccatagttcgatatgcttatgacaaaagagctaatcctcaagtcggcgtggcttttcctcatatcaagcataactatgagtgtttagtgtatgtgcagctgcctttcatggaagacttgcggcaataccatgttttcatccttgaaaaacagtaagaaatatgctcccacccgagggcacagttgaatgctgttgatgctttgattgactccatgagcttgggcaaagaaagatgaggaaggacagacacccttgaaggacttgtttccaaccaccaaaatcccaaatccttcgattttcagaggattatttcagtgtctgctggcacaggagcttttacatccccggggaggccttttaccccccaatttcaggcaggcatatttgggaatatgctggaatccttcccgctgagggtggacaacggaaaagttcaggatttcctctctcttaaaattaaaggaccctttttttcctctgatttgaagccaaggaaaaagggttcaagtggactgctcagggaattttccaaggacaaccttggaaggtgggacctacagctaaaaaattaaagactggagcaaggggggagcccactttcagcgtctccagtctggctgaaggcagtgtcacctctgttggaagtgtgaatcctgctgaaaacttccgtgttctagtgaaacagaagaaggccagctttgaggaagcgagtaaccagctcataaatcacatcgaacagtttttggatactaatgaaacaccgtattttatgaagagcatagactgcatccgagccttccgggaagaagccattaagttttcagaagagcagcgctttaacaacttcctgaaagcccttcaagagaaagtggaaattaaacaattaaatcatttctgggaaattgttgtccaggatggaattactctgatcaccaaagaggaagcctctggaagttctgtcacagctgaggaagccaaaaagtttctggcccccaaagacaaaccaagtggagacacagcagctgtatttgaagaaggtggtgatgtggacgatttattggacatgatataggtcgtggatgtatggggaatctaagagagctgccatcgctgtgatgctgggagttctaacaaaacaagttggatgcggccattcaaggggagccaaaatctcaagaaattcccagcaggttacctgcaggcggatcatctaattctctgtggaatgaatacacacatatatattacaagggataatttagaccccatacaagtttataaagagtcattgttattttctggttggtgtattattttttctgtggtcttactgatctttgtatattacatacatgctttgaagtttctggaaagtagatcttttcttgacctagtatatcagtgacagttgcagcccttgtgatgtgattagtgtctcatgtggaaccatggcatggttattgatgagtttcttaaccctttccagagtcctcctttgcctgatcctccaacagctgtcacaacttgtgttgagcaagcagtagcatttgcttcctcccaacaagcagctgggttaggaaaaccatgggtaaggacggactcacttctctttttagttgaggccttctagttaccacattactctgcctctgtatataggtggttttctttaagtggggtgggaaggggagcacaatttcccttcatactccttttaagcagtgagttatggtggtggtctcatgaagaaaagaccttttggcccaatctctgccatatcagtgaacctttagaaactcaaaaactgagaaatttactacagtagttagaattatatcacttcactgttctctacttgcaagcctcaaagagagaaagtttcgttatattaaaacacttaggtaacttttcgatctttcccatttctacctaagtcagctttcatctttgtggatggtgtctcctttactaaataagaaaataacaaagcccttattctctttttttcttgtcctcattcttgccttgagttccagttcctctttggtgtacagacttcttggtacccagtcacctctgtcttcagcaccctcataagtcgtcactaatacacagttttgtacatgtaacattaaaggcataaatgactcaaa

SEQ ID NO: 8307 - DNA, 2589 bp, Homo sapiens
  SIMILAR (2463)..(2516): 711254mologous to Homo sapiens Human secreted protein sequence encoded by gene 23 SEQ ID NO:146,accession number Y91473,Smith-Waterman Score=75.
tcatcttgaatcatattcccataattcccatgtgttgtgggagggacccagtggaagataatttgaatcatgggggcagtttcccccatactgttcttgtggtagtgaataagtttcatgagctctgatggttttatcaggggtttctgcttctgggtcttcctcattttctcttgccgctgtctgcaccagaaaacccaatgatgcgacggaattatcaacattatcatcctgaaacaattgctgagctcccagaggggccatttttctctttgaagaggccttcaagtttctcaccacatggctaccttttctcactggcaagaagtgaattaagtcatcagtaatctcagtcgggtccattaaaatcgcctgagcaattacatagattttgaaaaccagtgaagctgacctattaataacacagtcaattctccatttttcccaggccctctcagaggccacacactttatgctattatcttccctctggtcattccgttgtccattatcacctatccagtgtggcatatgaattgcctcatgtgtggtttggaaagcttgctgctgatcaaggttgggtttaccagccaatatttgtctgacaaacctgctcagagtaaggcagaaaggtggtggttgtacttccccctccactgggtaatcaatccactcctgggggaatttgcctctcagcacagctgcccctctaacgtgactagtgatctgccagcgctcggtgctcatccccgggatcttgaacttcgcctccctcttactttctgccagacccgcgagggccaggaagggctctgcaaaggttctcgaggtctccttccagccctggtggtaatcccgctcagcgccgcgccctcccccagatccaaacttttgctgggtcctccgggtggcggcggcggcgacggcggcggctgctggagccaagccggagctgcggcatcgtcttcccccgtcctccgccaccaccgcctccagggttcgggcatgccactttctcttggcttcggccgccgcgacccccgccttctctcctcctccgcctccccctctccgcttcgccaagccaacgaaccccaaaagaagtacagcgagcggggaaggcggcagaaagctgccccgcggcgccggagctcctcggatttggaggatcccgggactcggcgggagagctaggcgggctctcctccgacgcgtgtgtgcggacagctcggagccgggcgtgcggcggcccgcgcggagacgcacgctggcacacgcgctcacacacgcgagcacacacacgcgcacactacccggttcgtgcgcgcgggtcgctgttcctgttgcattatgcaaaggtggatttacatagcccatcttctccccacagtatgtgactaatacgtatcccggggaggagggagcgcggctgggggtgctaatcggaagggaacagacagtgagtgccatcttgctgggaggttccagaagcaaagcgccaacgacgacagtagcggtggcctcagctccaccagtaactgccgctggcaggagcaccacacgcttcgatccggattccgcctcgtatgctctccaagccttcgccacctccgcaggcgctctagaaaggcgtgatggccccagctcagtgcccgccagcccgaagaggacaagcagggctggaagggacttggttttggaaaaagccccacccgcccccaccaactgacggctgcgtcttctccttgcaatgggctcatccgaatccgacagggtcagggaggtggaaagggaagacgctggcgcggcagcagcggggatcccggggcatggtattgttttaggggtcgccgccgaggtccctcctgcccatcgttgagaactgccaccctgatcccagggctcggtggacacggcggcgggagcggagatgccgcctcgccgctgctgggcaccagggacggaggaccagaggcgcacctcggaaaggagtagctcagcgccttggcgcggagatttgcgggcactgatgatatctcgagcgctcgttcctccgcggtgacaatggataatgccaaacgcgcaagtgacggcgacaggtttcgaacgtacaactaacgtcacacccaaatgagccaggacgtcgctcagagcgcaaactgagatccacacagggacatcttcaaccgaatctttcttctgtctccattccggattgttattttccttgcttccatggaaggtttctgatatggtttggctttgtgtctccacccaaatctcatctcgaattgtaatctccagcgtgtcgaaggacggacctctaacccccacaagtggagaaaagtaggcgattggatcatgggggtggtttcccccatgctgttctagtgattgtgagtgagttctcacgagatctgatggttttataaggggctctgcgtgcttcgctggcacttctctctctcctgctgccttgtgaagaaggcgtctgcttccccttctgccatgattgtaagtttcctgaggcttcattgaccacagaagacttttatccaatgacacttcataacaagtctgagaattcat

SEQ ID NO: 8308 - DNA, 357 bp, Homo sapiens
  SIMILAR (102)..(13): 531254mologous to Oryctolagus cuniculus coronin,accession number AF100414,Smith-Waterman Score=69.
atgtagatgaggcagcgcaggggctgctgcttcgccacgaaggatttcccgtgccgtgggagcgggttcaggaccgctggtcggacctgagagtcccagctgtgggaagctcagctgtgtaatttgtagtaacgaagcagaagttacaacgaaaagacaagttttcctgtgcttggcagggcccccctcccccccaccaaggcctgcagtggatagagcctagcagatcctggacaatactatcctaaaagctacatctctgacagtgatttccagcgactttgtcaacacggtccgcccccagcaagtataagaggaaaaacaacaaatgtctttactgccttgtctttccccctt

SEQ ID NO: 8309 - DNA, 543 bp, Homo sapiens
  SIMILAR (148)..(501): 401254mologous to Xenopus laevis unidentified open reading frame 2,accession number X02585,Smith-Waterman Score=169.
atgttagaagccctgggagcactgaacaaaccagaaagctcccgacccttgatccctgagctccacctagcaagtacagcggcagctaacctgggagaacaccccaaccaacagagactgaaattcgcctcccaagagacaccagaggaaagcgcgaacgcagtcccccactaccacaaattatgcaatcgagtttcccacgtttggggaaatcgcagaggtcagcacatccggaacacaatggataaccctcgccctgagaaaaaccaccttcgtttagataatagtatctcccctgccagccctcctagccctgacacacagctgggactctcaggtccgaccagcggtcctgaacccactcccacggcacgggaactccttagtggcgaagcagcagcccctgcgctgcctcatctacatagaaatcgccctatccgtgatgtcactaacagcgcctttcccagtccccgtctgctcttccgccccaccctccgccgactcagccgatcaacccgctgccggagctggcgaaggaagtga

SEQ ID NO: 8310 - DNA, 1429 bp, Homo sapiens
  SIMILAR (418)..(1428): 811254mologous to Homo sapiens MJ0495-like protein SelB,accession number AF268872,Smith-Waterman Score=1360.
tttcgtgtagcctcagaaagtgcatggtaaagggaaaccagatcatgctgggcacactaccatgcagaatcctcaaaacaccagaaagctaagttgaaagacagtcgaaaagccagaaggagtatcgagctcatcgggcctgggagcagtcagaaggggggggacatttgttctctcatccacttgagcagcaaactgggcatattgtgctactcaaaaacagggaacatgggaggttgggagggagggatgcagctgagagttagctctgaaaactccatgggcaagtccagcagggagagggctgctgctgaccttccccagggtagctgctggcatgagcttccaggaaggctcataaacacaaggatctcgctcaagccccggcacgtctggaatctcagctcggtgctttgccaggtggtgaagaaggtgaagtccatgcagatgttccacatgcccatcacttcagccatgcaaggagaccggctgggcatctgcgtcacccagtttgaccctaagctgctggagcgcgggttggtgtgtgcccccgagtccctgcacactgtccatgcggccctcatctctgtggaaaagataccgtatttccgggggcccctgcaaaccaaggccaagttccacattacagtgggccatgaaacagtcatgggccggttgatgttcttcagtcctgctccagataactttgaccaggagcctatactggactctttcaacttctctcaagaataccttttccaggagcagtacctgtccaaggatttgacaccagcagtgacagacaatgatgaggccgacaagaaggccggccaggccacagagggccattgtcctcggcagcagtgggccctggtggagtttgagaagcccgtcacctgccctcggctgtgcctggtgattggctccaggctagatgcggacattcacaccaacacgtgccggctagcctttcatgggcaatcctgctccacgggctagaggacaggaactacgccgacagcttcctgcccaggctgaaggtgtacaagctgaagcacaagcatgggccttgtggagcgggcgatggatgactacagtgtgatcggccgctccctgttcaaaaaggaaaccaacatccagctcttcgtggggctcaaggtgcacttgtccactggggaactgggcatcatcgacagtgccttcggccagagcggcaagttcaagatccacatcccaggtggcctcagccccgagtccaaaaaagatcctgacaccccgccctcaaaaacgggcccgggctggccggtgggaggccaaccaggcaggaggagatccccgagcggagcgaacccccacaagatggggtggctaacccgacctttcaagcgttatgtcttcgacacccacaagcgcatggttcagtctccct

SEQ ID NO: 8311 - DNA, 344 bp, Homo sapiens
  SIMILAR (190)..(17): 271254mologous to Homo sapiens Human secreted protein, SEQ ID NO: 6477,accession number G02396,Smith-Waterman Score=72.
ccagatcgccgcgcgagggtggtgggcatcgaggtcccagcagcggaggagggaggtgccgccgtcgcccaggatgggctgggaatgaagcgatgtagccttttaagagatttgctctgacccatctgaagtccatatggctctgtatgatgaagacctcctgaaaaatcctttctatctggctctgcaaaagtgccgccctgacttgtgcagcaaagtggcccaaatccatggcattgtcttagtaccctgcaaaggaagcctgtcgagcagcatccagtctacttgtcagtttgagtcctacattttgattacctgtggaagagcattttccagacctttaa

SEQ ID NO: 8312 - DNA, 1349 bp, Homo sapiens
  SIMILAR (17)..(1054): 301254mologous to Streptomyces coelicolor A3(2) putative translation initiation factor IF-2(fragment),accession number AL355913,Smith-Waterman Score=196.
tcagcttcgccacgcacacggcagggccacagccgccagcagcacggcgccgaaaaggatggcggccagggcttcctggggtcgcaaccccccccgcgctcctgtgcgcaccagcgccgccgcggcgcgtgcagcgggaacgcggcgcccagctccagcgcgcgtcgcatgtccgcttccagcaggtccaggcagcccgagaaggccacccagagccgctcgaactcggcgcgctcgtcggcggccaggccccggtcgcgcagcacagcagtcagccgggcgcaggtggacaccgccagctcctgcgccttctggcgcgtcttttgcagctcctgccgcaggttctgcgagtccgccgagccaccgacggtcagcaccaggtggtggtagcacgcagtcgtccttgttgagcccgtccagcagcgccttgcactcctccccgccatcccggccttgggccgcgcggcacgaacgctcttcatggtcgtgactcgctcggcgctaccgccaacgtccacggagcccgcccgggacctcgacgtgcgcctgttctgggcacgcgcagttgcgggcgtggggcgggccagctggagtaggaagcgtagggagccgcctgagccccgcccccgctgggctggactccatgattgctctgcgtacacgtcactctgggaaacgcggtttctcattgggtcagctgtggcgcggctccgccccacggcggagtaggggtgggctatagggccagatcgccgcgcgagggtggtgggcatcgagtcccagcagcggacgagggaggtgccgccgtcgcccaggatgggctggaatgaagcgatgtagccttttaagtaagtgtcctcgcgctggcctcctctgcgcctcccctcccgcgggatggctgcgcctcggggcgcggcggccggcggggcccggagagttgaagggtgggaaggggcatccctgctctccggatccgctcccgggtccgccaggtggccccgcgccgccccagcccccgcgtcccaggtgggtgcccggtgcgcagccggcgcgccctgcccactccgccctcgggtctggaggaggggagcggtcggcgcggagaatgcaccctccgagctcgctgcgtcgacaccggcgggtgtggccggggtgccgggtccggcagttcggatctggcggggcgcggggcggtcgccgcgcggtttcccggaggctagggtcaagacagctgctgggtctttgttagtgatgtttctgttcccagttaaggtttctgtggcatctgccctgctggggctcttcctgtcgtcatttgccagcattaggttggtgtccaatgactccat

SEQ ID NO: 8313 - DNA, 1130 bp, Homo sapiens
  SIMILAR (3)..(167): 1001254mologous to Homo sapiens dJ860F19.3 (novel protein (ortholog of mouse metallocarboxypeptidase CPX-1)),accession number AL035460,Smith-Waterman Score=295.
ctctagactttcagcatcacaattacaaggccatgaggaagctgatgaagcaggtacaagagcaatgccccaacatcacccgcatctacagcattgggaagagctaccagggcctgaagctgtatgtgatggaaatgtcggacaagcctggggagcatgagctgggtactggcatggggagtggggagaggtaggcacagggcagggccccaggcatgaacccgctgcaagcccccatgtgtccccaggggagcctgaggtgcgctacgtggctggcatgcatgggaacgaggccctggggcgggagttgcttctgctcctgatgcagttcctgtgccatgagttcctgcgagggaacccacgggtgacccggctgctctctgagatgcgcattcacctgctgccctccatgaaccctgatggctatgagatcgcctaccaccggggttcagagctggtgggctgggccgagggccgctggaacaaccagagcatcgatcttaaccataattttgctgacctcaacacaccactgtgggaagcacaggacgatgggaaggtgccccacatcgtccccaaccatcacctgccattgcccacttactacaccctgcccaatgccaccgtgagtattttgagggcggcagtggaggtcttgtggggggcggacccttgtctctgtctcctgcccctcctgacctgccccatccaggtggctcctgaaacgcgggcagtaatcaagtggatgaagcggatcccctttgtgctaagtgccaacctccacgggggtgagctcgtggtgtcctacccattcgacatgactcgcaccccgtgggctgcccgcgagctcacgcccacaccagatgatgctgtgtttcgctggctcagcactgtctatgctggcagtaatctggccatgcaggacaccagccgccgaccctgccacagccaggacttctccgtgcacggcaacatcatcaacggggctgactggcacacggtccccgggagcatgaatgacttcagctacctacacaccaactgctttgaggtcactggtggagctgttctgtgacatgttccctcacgagaatgaattgccccatgagtgggagaacaacacagacgcg

SEQ ID NO: 8314 - DNA, 2356 bp, Homo sapiens
  SIMILAR (1977)..(2225): 481254mologous to Homo sapiens dJ860F19.3 (novel protein (ortholog of mouse metallocarboxypeptidase CPX-1)),accession number AL035460,Smith-Waterman Score=163.
atgtgggggctcctgctcgccctggccgccttcgcgccggccgtcggcccggctctgggggcgcccaggaactcggtgctgggcctcgcgcagcccgggaccaccaaggtcccaggctcgaccccggccctgcatagcagcccggcacagccgccggcggagacagctaacgggacctcagaacagcatgtccggattcgagtcatcaagaagaaaaaggtcattatgaagaagcggaagaagctaactctaactcgccccaccccactggtgactgccgggccccttgtgacccccactccagcagggaccctcgaccccgctgagaaacaagaaacaggctgtcctcctttgggtctggagtccctgcgagtttcagatagccggcttgaggcatccagcagccagtcctttggtcttggaccacaccgaggacggctcaacattcagtcaggcctggaggacggcgatctatatgatggagcctggtgtgctgaggagcaggacgccgatccatggtttcaggtggacgctgggcaccccacccgcttctcgggtgttatcacacagggcaggaactctgtctggaggtatgactgggtcacatcatacaaggtccagttcagcaatgacagtcggacctggtggggaagtaggaaccacagcagtgggatggacgcagtatttcctgccaattcagacccagaaactccagtgctgaacctcctgccggagccccaggtggcccgcttcattcgcctgctgccccagacctggctccagggaggcgcgccttgcctccgggcagagatcctggcctgcccagtctcagaccccaatgacctattccttgaggcccctgcgtcgggatcctctgaccctctagactttcagcatcacaattacaaggccatgaggaagctgatgaagcaggtacaagagcaatgccccaacatcacccgcatctatctgcattggtaagagctaccagggcctgaaggtgtatgtggtggaaatgtcggacaagcctggggagcatgagctgggggagcctgaggtgcgctacgtggctggcatgcatgggaacgaggccctggggcgggagttgcttctgctcctgatgcagttcctgtgccatgagttcctgcgagcggaacccacgggtgacccggctgctctctgagatgcgtatttttctgctgccctccatgaaccctgatgggtatgagatcgccctacaccagaagttcatagctggtgggcttgtccgagggccgctggaacaaccagagcatcgatcttaaccataattttgctgacctcaacacaccactgtgggaagcacaggacgatgggaaggtgccccacatcgtccccaaccatcacctgccattgcccacttactacaccctgcccaatgccaccgtggctcctgaaacgcgggcagtaatcaagtggatgaagcggatcccctttgtgctaagtgccaacctccacgggggtgagctcgtggtgtcctacccattcgacatgactcgcaccccgtgggctgcccgcgagctcacgcccacaccagatgatgctgtgtttcgctggctcagcactgtctatgctggcagtaatctggccatgcaggacaccagccgccgaccctgccacagccaggacttctccgttgaacggcaacatcatcaacggggcttgactggcacacggtccccgggaagcatgaatgacttcagctacctacacaccaactgctttgaggtcactgtggagctgtcctgtgacaagttccctccagaagaatgaatttgccccaaggagtgggaagaacaacaaagacgccctcctcacctacctggagcaggtgcgcatgggcattgcaggagtggtgagggacaaggacacggagcttgggattgctgacgctgtcattgccgtggatgggattaaccatgacgtgaccacggccttggggccggggattatttggcgtcttgcttgacccccaggggacttacatggttgacttgccaagttccgagggctaccattcagtgacacggaactgtcgggtcacctttgaaagagggccccttcccctgcaatttcgtgctcaccaagactccccaaacagaggctgcgcgagctgctggcagctggggccaaggtgcccccggaccttcgcaggcgcctggagccgcttaaggggacagaaggattgatacctgcggtttaagagccctagggcaggctggacctgtcaagacgggaaggggaaaagtagagagggagggacaaagtgaggaaaaggtgctcattaaagctaccgggccccttaaaaaaaaaaaaa

SEQ ID NO: 8315 - DNA, 517 bp, Homo sapiens; identical to SEQ ID NO: 2735
  SIMILAR (3)..(419): 1001254mologous to Homo sapiens Hb2E,accession number AF235097,Smith-Waterman Score=747.

SEQ ID NO: 8316 - DNA, 2116 bp, Homo sapiens
  SIMILAR (1231)..(1449): 261254mologous to Homo sapiens p40,accession number U93567,Smith-Waterman Score=64.
ttattgtctcattctcatcacatatgatgatgattcttgaagttcttgagtcactggcatgctacaagtgacacttttgtgcgtgtgccctatgagcaaatcctgcaggtagagaaaccctcttaacttcagtgaatgttcaataactttttccagcatcaaagactggaggaaaaaattatcgaaattctgactgctgccctggagaaaatagaatgtaactccctggtaataatcctccacgtctaaagtaagaattgaagcaaaataactacttgattccagattttttccttcactttcttcacctttgattccagatttcttccaaacacaagaaggtttcttttttgtgggaagtagttgactagacactaagggctgaagccagaataaaataggaaagaagggaccagatggtgcggaagtaagaattagtcctaggtcttgtgctttcgtgtgcatttcagacatcagcagggaggaaagaagaaagagccagtatacatgcaaagccaccagtccagtgtcaaggaaaacgagaaatactgagaatgccacgcagaagaaatcagtttgaggatgtagcctcttgttcccaagaataactgtatttggatcatcaggggattctaattttaaaatgactatggccaggctcaggagattccctcgggtcaccagggccctgggtttcaagcacaaaaccgggcagccatttgggcaggcactgagccagctgctggagtttttttttcataacccagtggcacctggaacgccagcgagacagaactgttcactcccctggaaagggggcctgaagccagggagccaagtggtctagctcagtggatcccacccccaaggagcccagcaagccaagatccactgggttgaaattcttgctgccagcacagcagtctgaagtcgacctgggatgcttgagggtgtaaacaaagcctccgggaagttcgaacactgcaactcggcaaagcctctggagccacactatgtctctagattcctcctctctgggcagggcatctgcagcagagctccggctggcatctggcaggtgcccctctgtgacgaagcttccagaggaaggaacaggcagcaatctttgctgttctgcagcctctgctggtgatacccaggcaaacagggtctggagtggacctccagcaaactccagcagacctgcagaagaggagcctgactgttagaaggaaaactaacaaacagaaagcaataacatcaacattaacaaaaagcacgcccatgcaaaaaacctatccaaagtgcacaaaactgaacagagaagagtatgacgaattgacagaagtaggcagaaggtgggtaataataacaaactcctttgagctaaaggagcatgttctaccctattgcgaggaagctaaaaaccttgaaaaaaaggttagacaaatggctaactagaataaaccagtgtagagaagaccttaaatggcctgatggagctgaaaaccaaggctcgagaactacgtgaagaatgcagaagccttaggagctgatgcgatcaactggaagaaagggtgtcagcaatggaagatgaaatgaatgaaatgaagtgagaagggaagtttagagaaaaaagaataaaaagaaatgagcaaagcctccaagaaatatgggactatgtgaaaagaccaaatctacctctgactggtgtacctgaaagtgatggggagaatggaaccaagttggaaaacactctgcaggatattatccaggagaacttccgccaatcttagcaaggcaggccaacattcaaattcaggaaatacagagaacaccacaaagatactcctcgagaagagcaaccccaatacagcaagcgcttagtaaacgtcttctgaaggaatactcgtaaccggatagaatggagacgaggaaccaatttaaaataaaagtacctgcctgtgattcccagcgtgtttcccaaggccatggtttcccattctatatccagaactttccagggacaggactattctcagagcaaagagtcattttctctagcttctttgcagtgatgaataaaagccactgtggaactcaaaaaaaaaaaaaa

SEQ ID NO: 8317 - DNA, 2661 bp, Homo sapiens; identical to SEQ ID NO: 929
  SIMILAR (1582)..(2088): 661254mologous to Mus musculus Pro-Pol-dUTPase polyprotein,accession number Y12713,Smith-Waterman Score=625.

SEQ ID NO: 8318 - DNA, 3258 bp, Homo sapiens
  SIMILAR (1)..(891): 991254mologous to Cloning vector pZC320 SopA,accession number U26464,Smith-Waterman Score=1551.
atgaaactcatggaaacacttaaccagtgcataaacgctggtcatgaaatgacgaaggctatcgccattgcacagtttaatgatgacagcccggaagcgaggaaaataacccggcgctggagaataggtgaagcagcggatttagttggggtttcttctcaggctatcagagatgccgagaaagcagggcgactaccgcacccggatatggaaattcgaggacgggttgagcaacgtgttggttatacaattgaacaaattaatcatatgcgtgatgtgtttggtacgcgattgcgacgtgctgaagacgtatttccaccggtgatcggggttgctgcccataaaggtggcgtttacaaaacctcagtttctgttcatcttgctcaggatctggctctgaaggggctacgtgttttgctcgtggaaggtaacgacccccagggaacagcctcaatgtatcacggatgggtaccagatcttcatattcatgcagaagacactctcctgcctttctatcttggggaaaaggacgatgtcacttatgcaataaagcccacttgctggccggggcttgacattattccttcctgtctggctctgcaccgtattgaaactgagttaatgggcaaatttgatgaaggtaaactgcccaccgatccacacctgatgctccgactggccattgaaactgttgctcatgactatgatgtcatagttattgacagcgcgcctaacctgggtatcggcacgattaatgtcgtatgtgctgctgatgtgctgattgttcccacgcctgctgagttgtttgactacacctccgcactgcagtttttcgatatgcttcgtgatctgctcaagaacgttgatcttaaagggttcgagcctgatattggctgcaatgccgtcagctgggcccctgctgttgtacctgtaagcctcatagaccacccatcggggcagaaacccaattacatcaagaggtttgcatcaggtggctgtgacaacctcatcaagctgtggaaggaaggaggaaggacggccagtggaagggaggagcagaagctagaggcgcacagtgactgggtttcgagatgtgggcctgggccccctccatcggcctgcccaccagcaccatcgccagctgctccagtgctcacaggccaccattccaagatgactgggaatcctgccaaaaccaatgctgaccccagcagcccaggcttcacgggactcactgggatccctgctgagacatggaatgccttctgtctgtcaccagtccccttgtccttccccactaagggttccaatcccttcttcgagggtttggagggctccctgaggtccaaaccactcagtcagtgtcccctggatgagacctctgccttcttggccctggacactgagtcctgtctcgtggcctctgcctttggagtgtgcacagttcactgggccttggtgtctacctccctggcctttgctcacagtgatcaccagaatgcctttccctcacctcttgctcacaacctcctccacaggatgaatgcccttctccttgggcataggatgcttcttgctctgggggagctgtgtgaaggggggcacttgcaggctgaggaggaagataacagagggggagagggggccagggtgaggcttcctgagggtgaagggagctgggtctgtgaggagcgtgaagagtggcgtgtccctgtgtggtctggctgtgctgggcccactgggagttgtggaggactgaggaagtggagggaggcatcgcaggcactgacgtggccagaaggcctcagacttcatcctgacagacgcaattttcagcagcatcgtcaaggcagtgatggcaagcctgcaaagaaggggcagccgggagctctagctcccagcagctggggtgtggaagctgcagaccgatttctgagctcagagcatcctgaagagggcatagaatgcaaatcaataaaaccagtattagctaagtatttggtgtggaccaggctgtttgtcgggctccttgctgagctcagagatgaatcagctccagaaacaactcctgctgggaggcggaggcagccccaggtctggagcggtgcccggcaaacctgtggacagagaacagagaggttggctgggggcctgggagagatgcaggcatgttctgggaatctaggggcagaaaaggagaaacagagcaagaaacttgctggtggctggcctatgagcccaacatctcttcatgctttgggccctaagttggttcctgccaaaagccagagacaccgtgcagaacacatgtccacatggcaggtaggcgttgtcagctcatcctattttaccggcaaccttgtcggtacattgctgacagggtatgtcattaagcgcattggctttaaccgcagctattatctggcctccttcatttttgccgctggctgtgccggccttggcctgatgattggattctggagctggttggcttggcgttttgtcgcgggcgtcggctgtgccatgatttgggtggttgttgagagcgcgctgatgtgcagtgggacgtcacgtaaccgtgggcgtttgcttgctgcgtatatgatggtttattacgtgggaacgtttttaggccagttactggtcagcaaagtttcaaccgagctgatgtccgtattgccgtgggttacaggtttgacgttggcagggatcttaccgctgttgtttacgcgtgtgctgaatcagcaggctgaaaaccatgattcgacgtcaattacgtcaatgctaaaactccgtcaagcgcggcttggcgtgaatggctgcattatctcaggaatcgttctgggatctctatatggcctgatgccgctgtacctcaattacaaagggggcaagtcttcacccaccccggctgttcggcctgcccggcataactccttaccgggaccagaagcaaaaaaataccgacccggatttatcatcggattgaccagctgtatagcgttcagtgttcaggccgcaaatgttgatgagtacattactcaactccccgctggtgccaaccttgccctgatggtgcaaaaagtcggcgcgtcggcccccgctattgattaccacagtcagcagatggcgctgcctgccagtacccagaaagtgattactgcgctggcggcgttgattcaactcggccccgattttcgttttaccacgacgcttgaaaccaaaggcaatgtggaaaacggcgtacttaaagggtga

SEQ ID NO: 8319 - DNA, 471 bp, Homo sapiens
  SIMILAR (89)..(172): 441254mologous to Mus musculus SPR2E protein,accession number AJ005563,Smith-Waterman Score=70.
atgactgggaatcctgccaaaaccaatgctgaccccagcagcccaggcttcacgggactcactgggatccctgctgagacatggaatgccttctgtctgtccccagtccccttgtccttccccactaagggatcagtggaccatcccctgcccggatcctctctctccacagactatggcagctggcagatggtaacgggctgtggcagtattcaggagcgggctgtcctgcacacagactcctctctccctttcagcttcccggatgagctccctaacagttgtctactgcaaattcttgaagagcaacatctgcagcggattgacccttgtgtcccagccagagacctagcggagtgtaccgtcagcatggaatcaacatcagaccagtgccatcattgtctcagtgccagtcctcagtggctgcaggcctgggccgccccttcttcctgtgactgttcctatctgtag

SEQ ID NO: 8320 - DNA, 423 bp, Homo sapiens
  SIMILAR (320)..(3): 251254mologous to Homo sapiens dJ543J19.5 (CGI-107 Protein),accession number AL109840,Smith-Waterman Score=135.
tcccggaagacagactcttccttcatggatgcatactgtgtccacgtaaggcagtgactccgtatggccatgtttctttcccgaggattgagccatgactcctcttctaattggatattaggtactttcaaaatgctcaccttccttaaaatttctggaaccacgttctgacagattgcaatcctctttctgtagatgacccctgttgattcatctcttttttcctccatgatttttactgagatgacatttttatccatggggttggggtactttcggagaaagctggcgaccacctgctcgaaggggtacttgtacacctggtgcacatccccgcgcaccggccacgcctccgcgagctcagagctgcccagggctccgcagaggcccggaggcgcccacactcggacagccacatgggcg

SEQ ID NO: 8321 - DNA, 683 bp, Homo sapiens
  SIMILAR (516)..(602): 441254mologous to synthetic construct BBO5 epitope,accession number A21467,Smith-Waterman Score=76.
gggaaatacccttgggaagtttagaggtaattttcaaaagcaaaaagtaagagataagagaatgtaaagccgttcacaaggtaataataataagatgctggggggcaggtagaattaaactaatgtcacagctgtgagggacatcataaaatgaagataccttccttaaaatttctggaaccacgttctgacagattgcaatcctctttctgtagatgacccctgttgattcatctcttttctcctccatgatttttactgagatgacatttttatccatggggtgggggtactgggaagacaggaggcagatggccaggtttttctggacactttttcaaacacaatccagtatgactgcagaattgatcaagctgaatcaggatcacacccatcaaagacttaactgagcagctactgtgttcacgcagggtgctatcctagagaagctgccatgcgcatgatctcattcagtccttctcaaagcgtggaaacctttcggagaaagctggcgaccacctgctcgaaggggtacttgtacacctggtgcacatccaccgagacccccatccccgcgcgccgcgggccccgcgcaccggccacgcctccgcgagctcagagctgcccagggctccgcagaggcccggacgaaatcgtcgacccggaaattccgggccggtaca

SEQ ID NO: 8322 - DNA, 1698 bp, Homo sapiens
  SIMILAR (326)..(433): 441254mologous to Mus musculus proline-rich protein,accession number M12099,Smith-Waterman Score=68.
tcagtgatgaaccggaaagctccacacgtcggtcatctgcaactccacggagctcacgagctgggattcccggaggctcttcctaaaaggaaagcctcttctttcagctggggcaggtgtgaacgtgatgccaagcacggccccttttcccgctccctgtaaagggagtcttcgaggaaatccctctcgacccacacatccctgaagcaaagcccgcagctggaaagagacactggcggtgccagcttccgcgtggatgaaggagaggagagaggggcaagcagcggaggcagcgcgggatacggaaggtggaagcggggcggtacctttcggagaaagctggcgaccacctgctcgaaggggtacttgtacacctggtgcacatccaccgagacccccatccccgcgcgccgcgggccccgcgcaccggccacgcctccgcgagctcagagctgcccagggctccgcagaggcccggaggcgcccacactcggacagccacatgggcgtggcctttttcctccgcttttcaaactttcgaaactttattggccactcggagaaacgcgcagtcggccacgcccacgcccctactgccagagtccggggcctggggttacagagcgcgggaggcgctggagcgctcccagagcacccggggccccgcggtctccacgctggcggcgccagagcggccctggtgccctcccgcggccgcgcgttaatccgtgtattcagcacggttctgaggcctcctatgccccagcgctgtagtgggcactgcggattccgcagggaggaaacaccagctctgctgatgagccggctgatttcacacccaatcaacaagcagaccaaatgccttgccttcactcttgttcctgtgggtgaactgtcagcactttgttttagcaccagtgtctccatttgtccactgaatccttcttctgacttcccttcacctgcccaaggcaggactctaatctttcctggcttttctgattgatttctcattccagagagtgtcccaccccataccgtggctgttggcaggattcccttcccagcaggcagctgactgagggcctcagttccttgctggctgttggttggaagccaccttctgctccttgccacgtggacctctccataaggcaccacccctaggaaggaggaacaaaagggaaaatggtgtttcagcgagcccacaaccagagccagtaaagcagctactggtggaagcaagcagccggccagcattcctagctgctgctgctgctcctgcagctgccctaacaggaagccagcgggcacggggggtccggaaagtgtagtttgcacgtctcctgccccagcagcaagggggcggggggttgaaagggagtgcggagggcggtagcagaaagcaggctctatccacagcaggccctcactcagagtaaaacccgagttctcatcgtggcatctcagggcccgataggactccttaaatctgttggccagcatcgagaacttgctgccgtggcacagagagcaggtggcactgcccgaccctcggcagtgaaaacagctgtcctcgggaatatccccttccaatccacctctactagctccatgaccaagaagaggggcctgatcttttactgcagactccaaggcttgtagagccctgaagatggtaaccagtgccaattgaga

SEQ ID NO: 8323 - DNA, 3135 bp, Homo sapiens
  SIMILAR (1)..(3135): 1001254mologous to Homo sapiens mucin,accession number AJ000281,Smith-Waterman Score=5287.
atgaagggggcacgctggaggagggtcccctgggtgtccctgagctgcctgtgtctctgcctccttccgcatgtggtcccaggaaccacagaggacacattaataactggaagtaaaactcctgccccagtcacctcaacaggctcaacaacagcgacactagagggacaatcaactgcagcttcttcaaggacctctaatcaggacatatcagcttcatctcagaaccaccagactaagagcacggagaccaccagcaaagctcaaaccgacaccctcacgcagatgatgacatcaactcttttttcttccccaagtgtacacaatgtgatggagactgttacgcaggagacagctcctccagatgaaatgaccacatcatttccctccagtgtcaccaacacactcatgatgacatcaaagactataacaatgacaacctccacagactccactcttggaaacacagaagagacatcaacagcaggaactgaaagttctaccccagtgacctcagcagtctcaataacagctggacaggaaggacaatcacgaacaacttcctggaggacctctatccaagacacatcagcttcttctcagaaccactggactcggagcacgcagaccaccagggaatctcaaaccagcaccctaacacacagaaccacttcaactccttctttctctccaagtgtacacaatgtgacagggactgtttctcagaagacatctccttcaggtgaaacagctacctcatccctctgtagtgtcacaaacacatccatgatgacatcagagaagataacagtgacaacctccacaggctccactcttggaaacccaggggagacatcatcagtacctgttactggaagtcttatgccagtcacctcagcagccttagtaacagttgatccagaaggacaatcaccagcaactttctcaaggacttctactcaggacacaacagctttttctaagaaccaccagactcagagcgtggagaccaccagagtatctcaaatcaacaccctcaacaccctcacaccggttacaacatcaactgttttatcctcaccaagtggattcaacccaagtggaacagtttctcaggagacattcccttctggtgaaacaaccatctcatccccttccagtgtcagcaatacattcctggtaacatcaaaggtgttcagaatgccaatctccagagactctactcttggaaacacagaggagacatcactatctgtaagtggaaccatttctgcaatcacttccaaagtttcaaccatatggtggtcagacactctgtcaacagcactctcccccagttctttacctccaaaaatatccacagctttccacacccagcagagtgaaggtgcagagaccacaggacggcctcatgagaggagctcattctctccaggtgtgtctcaagaaatatttactctacatgaaacaacaacatggccttcctcattctccagcaaaggccacacaacttggtcacaaacagaactgccctcaacatcaacaggtgctgccactaggcttgtcacaggaaatccatctacaggggcagctggcactattccaagggtcccctctaaggtctcagcaataggggaaccaggagagcccaccacatactcctcccacagcacaactctcccaaaaacaacaggggcaggcgcccagacacaatggacacaagaaacggggaccactggagaggctcttctcagcagcccaagctacagtgtgactcagatgataaaaacggccacatccccatcttcttcacctatgctggatagacacacatcacaacaaattacaacggcaccatcaacaaatcattcaacaatacattccacaagcacctctcctcaggaatcaccagctgtttcccaaaggggtcacactcaagccccgcagaccacacaagaatcacaaaccacgaggtccgtctcccccatgactgacaccaagacagtcaccaccccaggttcttccttcacagccagtgggcactcgccctcagaaattgttcctcaggacgcacccaccataagtgcagcaacaacctttgccccagctcccaccggggatggtcacacaacccaggccccgaccacagcactgcaggcaacacccagcagccatgatgccaccctggggccctcaggaggcacgtcactttccaaaacaggtgcccttactctggccaactctgtagtgtcaacaccagggggcccagaaggacaatggacatcagcctctgccagcacctcacctgacacagcagcagccatgacccatacccaccaggctgagagcacagaggcctctggacaaacacagaccagcgaaccggcctcctcagggtcacgaaccacctcagcgggcacagctaccccttcctcatccggggcgagtggcacaacaccttcaggaagcgaaggaatatccacctcaggagagacgacaaggttttcatcaaacccctccagggacagtcacacaacccagtcaacaaccgaattgctgtccgcctcagccagtcatggtgccatcccagtaagcacaggaatggcgtcttcgatcgtccccggcacctttcatcccaccctctctgaggcctccactgcagggagaccgacaggacagtcaagcccaacttctcccagtgcctctcctcaggagacagccgccatttcccggatggcccagactcagaggacaagaaccagcagagggtctgacactatcagcctggcgtcccaggcaaccgacaccttctcaacagtcccacccacacctccatcgatcacatccagtgggcttacatctccacaaacccagacccacactctgtcaccttcaggatctggtaaaaccttcaccacggccctcatcagcaacgccacccctcttcctgtcacctacgcttcctcggcatccacaggtcacaccacccctcttcatgtcaccgatgcttcctcagtatccacaggtcacgccacccctcttcctgtcaccagcccttcctcagtatccacaggtcacaccacccctcttcctgtcaccgacgcttcctcagtatccacaggccaccccacccca

SEQ ID NO: 8324 - DNA, 3875 bp, Homo sapiens
  SIMILAR (1239)..(3470): 991254mologous to Homo sapiens mucin 4, variant V3,accession number AJ277412,Smith-Waterman Score=3975.
cctctgaagatggaaacatcaggaatgacaacaccgtcactgaagacagacggtgggagacgcacagccacatcaccaccccccacaacctcccagaccatcatttccaccattcccagcactgccatgcacacccgctccacagctgcccccatccccatcctgcctgagagaggagtttccctcttcccctatggggcagacgccggggacctggagttcgtcaggaggaccgtggacttcacctccccactcttcaagccggcgactggcttcccccttggctcctctctccgtgattccctctacttcacagacaatggccagatcatcttcccagagtcagactaccagattttctcctaccccaacccactcccaacaggcttcacaggccgggaccctgtggccctggtggctccgttctgggacgatgctgacttctccactggtcgggggaccacattttatcaggaatacgagacgttctatggtgaacacagcctgctagtccagcaggccgagtcttggattagaaagatcacaaacaacgggggctacaaggccaggtgggccctaaaggtcacgtgggtcaatgcccacgcctatcctgcccagtggaccctcgggagcaacacctaccaagccatcctctccacggacgggagcaggtcctatgccctgtttctctaccagagcggtgggatgcagtgggacgtggcccagcgctcaggcaacccggtgctcatgggcttctctagtggagatggctatttcgaaaacagcccactgatgtcccagccagtgtgggagaggtatcgccctgatagattcctgaattccaactcaggcctccaagggctgcagttctacaggctacaccgggaagaaaggcccaactaccgtctcgagtgcctgcagtggctgaagagccagcctcggtggcccagctggggctggaaccaggtctcctgcccttgttcctggcagcagggacgacgggacttacgattccaacccgtcagcataggtcgctggggcctcggcagtaggcagctgtgcagcttcacctcttggcgaggaggcgtgtgctgcagctacgggccctggggagagtttcagtgaaggctggcacgagcagcgtccttggcagttggcccaggaactggagccacagagctggtgctgccgctggaaggacaagccctacctctgtgccctgtaccagcagaggcggccccacgtgggctgttgctacatacaggcccccacagcccgcctggatgttcggggacccccacatcaccaccttggatggtgtcagttacaccttcaatgggctgggggacttcctgctggtcggggcccaagacgggaactcctccttcctgcttcagggccgcaccgcccagactggctcagcccaggccaccaacttcatcgcctttgcggctcagtaccgctccagcagcctgggccccgtcacggtccaatggctccttgagcctcacgacgcaatccgtgtcctgctggataaccagactgtgacatttcagcctgaccatgaagacggcggaggccaggagacgttcaacgccaccggagtcctcctgagccgcaacggctctgaggtctcggccagcttcgacggctgggccaccgtctcggtgatcgcgctctccaacatcctccacgcctccgccagcctcccgcccgagtaccagaaccgcacggaggggctcctgggggtctggaataacaatccagaggacgacttcaggatgcccaatggctccaccattcccccagggagccctgaggagatgcttttccactttggaatgacctggcagatcaacgggacaggcctccttggcaagaggaatgaccagctgccttccaacttcacccctgttttctactcacaactgcaaaaaaacagctcctgggctgaacatttgatctccaactgtgacggagatagctcatgcatctatgacaccctggccctgcgcaacgcaagcatcggacttcacacgagggaagtcagtaaaaactacgagcaggcgaacgccaccctcaatcagtacccgccctccatcaatggtggtcgtgtgattgaagcctacaaggggcagaccacgctgattcagtacaccagcaatgctgaggatgccaacttcacgctcagagacagctgcaccgacttggagctctttgagaatgggacgttgctgtggacacccaagtcgctggagccattcactctggagattctagcaagaagtgccaagattggcttggcatctgcactccagcccaggactgtggtctgccattgcaatgcagagagccagtgtttgtacaatcagaccagcagggtgggcaactcctccctggaggtggctggctgcaagtgtgacgggggcaccttcggccgctactgcgagggctccgaggatgcctgtgaggagccgtgcttcccgagtgtccactgcgttcctgggaagggctgcgaggcctgccctccaaacctgactggggatgggcggcactgtgcggctctggggagctctttcctgtgtcagaaccagtcctgccctgtgaattactgctacaatcaaggccactgctacatctcccagactctgggctgtcagcccatgtgcacctgccccccagccttcactgacagccgctgcttcctggctgggaacaacttcagtccaactgtcaacctagaacttcccttaagagtcatccagctcttgctcagtgaagaggaaaatgcctccatggcagaggtcaacgcctcggtggcatacagactggggaccctggacatgcgggcctttctccgcaacagccaagtggaacgaatcgattctgcagcaccggcctcgggaagccccatccaacactggatggtcatctcggagttccagtaccgccctcggggcccggtcattgacttcctgaacaaccagctgctggccgcggtggtggaggcgttcttataccacgttccacggaggagtgaggagcccaggaacgacgtggtcttccagcccatctccgaggaagacgtgcgcgatgtgacagccctgaacgtgagcacgctgaaggcttacttcagatgcgatggctacaagggctacgacctggtctacagcccccagagcggcttcacctgcgtgtccccgtgcagtaggggctactgtgaccatggaggccagtgccaacacctgcccagtgggccccgctgcagctgtgtgtccttctccatctacacggcctggggcgagcactgtgagcacctgagcatgaaactcgacgcgttcttcggcatcttctttggggccctgggcggcctcttgctgctgggggtcgggacgttcgtggtcctgcgcttctggggttgctccggggccaggttctcctatttcctgaactcagctgaggccttgccttgaaggggcagctgtggcctaggctacctcaagactcacctcatccttaccgcacatttaaggcgccattgcttttgggagactggaaaagggaaggtgactgaaggctgtcaggattcttcaaggagaatgaatactgggaatcaagacaggactataccttatccataggcgcaggtgcacagggggaggccataaagatcaaacatgcatggatgggtcctcacgcagacacacccacagaaggacactagcctggcgcgcgtgcacacacacacacacacacacgagttcataatgtggtgatggccctaagttaagcaaaatgcttctgcacacaaaactctctggtttacttcaaattaactctatttaaataaagtctctctgactttttgtgtctcc

SEQ ID NO: 8325 - DNA, 3334 bp, Homo sapiens
  SIMILAR (1637)..(2038): 301254mologous to Homo sapiens mucin 4,accession number AJ276359,Smith-Waterman Score=75.
  misc_feature (1)...(3334): n = a,t,c or g
atggtttggggttttacatgctcaacaacagcgacactagagggacaatcaactgcagcttcttcaaggacctctaatcaggacatatcagcttcatctcagaaccaccagactaagagcacggagaccaccagcaaagctcaaaccgacaccctcacgcagatgatgacatcaactcttttttcttccccaagtgtacacaatgtgatggagactgttacgcaggagacagctcctccagatgaaatgaccacatcatttccctccagtgtcaccaacacactcatgatgacatcaaagactataacaatgacaacctccacagactccactcttggaaacacagaagagacatcaacagcaggaactgaaagttctaccccagtgacctcagcagtctcaataacagctggacaggaaggacaatcacgaacaacttcctggaggacctctatccaagacacatcagcttcttctcagaaccactggactcggagcacgcagaccaccagggaatctcaaaccagcaccctaacacacagaaccacttcaactccttctttctctccaagtgtacacaatgtgacagggactgtttctcagaagacatctccttcaggtgaaacagctacctcatccctctgtagtgtcacaaacacatccatgatgacatcagagaagataacagtgacaacctccacaggctccactcttggaaacccaggggagacatcatcagtacctgttactggaagtcttatgccagtcacctcagcagccttagtaacagttgatccagaaggacaatcaccagcaactttctcaaggacttctactcaggacacaacagctttttctaagaaccaccagactcagagcgtggagaccaccagagtatctcaaatcaacaccctcaacaccctcacaccggttacaacatcaactgttttatcctcaccaagtggattcaacccaagtggaacagtttctcaggagacattcccttctggccagcggcggctgtgggaggctgtgaagaggaggaaggccttgtgcaaacgcaagtcgtggatgagtaaggtgggtgaggaggtggaccaagttggaggtgcgtcctccttttgccagacctcctcttgtgcctcttgctgtatgcagagcgtcgtgatgacaacctcagtgctcctagatagttggcaagatgatactcagagagacaaagtctcagggaagaattcagcttcaagtccactttctggaattgactgtaattcgccaccttctcttacttcagacagtaacttagactctcaatttccacagttcccagaccgtcagctgtgccctccccactcccagcacgttgagagcagcagtacttggctctccaccctcaagacaggaaatttgcttagctcctaccatgcgccctgctgcacagtggccccaatgcctgcaaaagagacagcaccctattcactgcccaaggtcatgagaagggccatgctggattccaaagccatgctcttgccaccaacaccgccctgccctaccaagctctccaccaacaccgccctgccctgccaagctctccaccaacaccgccctgccctgccaagctctcaaccaacaccaccctgccctgccaagcttctccaggtcctcaacctccccgactcactgctgttctccgcagcccaggaactggagccacagagctggtgctgccgctggaatgacaagccctacctctgtgccctgtaccagcagaggcggccccacgtgggctgtgctacatacaggcccccacagcccgcctggatgttcggggacccccacatcaccaccttggatggtgtcagttacaccttcaatgggctgggggacttcctgctggtcggggcccaagacgggaactcctccttcctgcttcagggccgcaccgcccagactggctcagcccaggccaccaacttcatcgcctttgcggctcagtaccgctccagcagcctgggccccgtcacggtccaatggctccttgagcctcacgacgcaatccgtgtcctgctggataaccagactgtgacatttcagcctgaccatgaagacggcggaggtggtccctgtgtgctgtgtgctggttgcgagtgggccgtggttgcggtgggcgtgtgcatggggccctggttgcgtgtgcgtgttgcagtggccgtggttgctgttgcgtgttgcaggggccctggttgctgttgctgtgtgcagttggccgagtgcgttgtggtgccgggcccggtggctggctgcaagtgtgacgggggcaccttcggccgctactgcgagggctccgaggatgcctgtgaggagccgtgcttcccgagtgtccactgcgttcctgggaagggctgcgaggcctgccctccaaacctgactggggatgggcggcactgtgcggctctggggagctctttcctgtgtcagaaccagtcctgccctgtgaattactgctacaatcaaggccactgctacatctcccagactctgggctgtcagcccatgtgcacctgccccccagccttcactgacagccgctgcttcctggctgggaacaacttcagtccaactgtcaacctagaacttcccttaagagtcatccagctcttgctcagtgaagaggaaaatgcctccatggcagaggtcaacgcctcggtcagtgctgcaggccgcgctctggtgaacgtgagcacgctgaaggcttacttcagatgcgatggctacaagggctacgacctggtctacagcccccagagcggcttcacctgcgtgtccccgtgcagtaggggctactgtgaccatggaggccagtgccagcacctgcccagtgggccccgctgcaggtgcatagggctgtggccaggaggtggaggacagtgctggggaacccaagctgggcaagacactgcaaggggtccaggaattaggatggctcgagagatcagagaccagggaagagaggacagtggaaaaggagagttgtgagtgcctgctctgtgtggagaataaaggcgctatattacaaactctgaaacccaaaagagccataggggggcttagaactatttcgaagatgagaaaactgcagcttagagatgacaaggaacctgccccaggacgcagtaggttaagcagcagggcatggtttccaaagccnnnnnnnnnnnnnnnnnnnnnnnnnnnnnnnnnnnnnnnnnnnnnnnnnnnnnnnnnnnnnnnnnnnnnnnnnnnnnnnnnnnnnnnnnnnnnnnnnnnnnnnnnngaattccgccactctgaatag

SEQ ID NO: 8326 - DNA, 468 bp, Homo sapiens
  SIMILAR (37)..(183): 321254mologous to Leishmania major L8453.1,accession number AC008054,Smith-Waterman Score=55.
catcttcaccacctctcggccatcctcgacccatttcccagagctgccccaggccggcagtgagctgttcccgtggccccagcgcccttctctgcagacccctccttgggccagaagacgccccacttgagggtcgtcttggccaggggacctctttggggacccagatatccaagtgtgagtgtgggtaacggacactggagtggggctggggtcgctgacgagcagcagcaccgagccgtcctgcaggcgcgcgtcgcgcaccgtctggtggtcgtccagccgccgcgcgttgtagtagaaggcgcgcttccaggagctcacgccctggcccaccagctgggcgcgcaggtcgctgagcgtgtcccgcggccgcacggtcagcggtagcagcagcgcctcgtccgccaggtgcaccttgatgtggtagcgcttccagcgcgacagcccccgccgcagcccctccat

SEQ ID NO: 8327 - DNA, 1777 bp, Homo sapiens
  SIMILAR (444)..(806): 301254mologous to Homo sapiens Ps 2=basic proline-rich protein(PRB1L precursor protein=basic proline-rich proteins (Ps, PmF, PmS, and Pe) precursor) {C-terminal},accession number S62941,Smith-Waterman Score=82.
cagacagcagcagactctgctctaggaggagctccagggggcacacagtgggtctctggggacaaagtcctgggttaggcaccaaggggagaggtggagggggataggaagacccccctccaggcacacccaggggccagcaagacccaagtcattctgcaaagcagctccagcaggtctgcctgccggagtgaagtggggtccttctctcttcccctccttctccccctcctctcagccaagcgggaattgcagggtagatgcccgaagtttggcagatgctctgaagggaggcgagcaggagaccccgggccaagtgctgtccccgagctaagcaaacgcacagtctgggcacggctgtccccgtggtggtgatttactatccacctgtccatgctctgagtcctgcagccaacaggactcttaactaaaacattatttcttcccagcctctgggcactccgcccatggtgcctggagagtgtacacggccctcgaggacatgcgtagcctcggcaccccctccccaaagaccctccccaggggctgcgcaacgatgacgtggctgcaggtcagaggtgcaacggaggcccggcacactgccctgagggtctccacccggaattcccacaacggactccctgcaatgcccccgcgatgacctcccacagctaggcccagttccccaacccccaagatcctcgtcctcttggccagagttcttcagaaccccttccccgctgccccaagaccctatgcaagacgaggcatccggatttaaggggaagggggaaacagcccagggggtgggcacaggtgcctcctggggaggtatttgggggtggaaatggggcacagttggaggcctgagaaggagctaggatgtccgcatctcctcgcttagtcattggagagttcggacacgactgcttcaccccccagccagggcctgttcactgcacaaaagggcctgtgggggccccaaagaaggctaggtgctctctggctgggaaggagggaatctgagaagacttcctggaggagactgcaatcccaggtgtattggagctgcagagaagaggttgaaaagtgctccaggcagggggcacggcttgggcaaaggcgtggctgggagaatgtcctgggcaagagcggaagtgcctctgagtgcctctcctgccccttctgtgcttctcttcttgcgatgccctctggctgcccatgggagctttccaaggtggcacagtgctttccactgaagacagggcacccagggccccaagaggggagcaacaacctcaaagtcacacagcagagctgaaaggctcaaggctccctcccgataggctgggcaggagcaaaaatgtcctaggtccttgtcagggactggggctccagcaggagtgtctgaagcagtgtgcatcagctggtcaggccagggtttcatggtccacctggggagcccagaccctgggagttgagatcttaggcttcccagggaggcaggagaaagttgcctttccaaaagtgccctctaccccagcctattccttcagccagtacccaggtccccttggtcatggctctgcctcctccaacccagactacctggggtcgctgacgagcagcagcaccgagccgtcctgcaggcgcgcgtcgcgcaccgtctggtggtcgtccagccgccgcgcgttgtagtagaaggcgcgcttccaggagctcacgccctggccacaccagctgggcgcgcaggtcgctgagcgtgtcccgcggccgc

SEQ ID NO: 8328 - DNA, 904 bp, Homo sapiens
  SIMILAR (132)..(767): 431254mologous to Homo sapiens keratin associated protein 4.7,accession number AJ406939,Smith-Waterman Score=502.
cactcactcattcactcactcacccactcactcccatctcctccagttcaatccccagcatggctgcgtccactatgtctgtctgctccagcgacctgagctacggcagccgcgtctgccttcctggttcctgtgactcttgctccgactcctggcaggtggacgactgcccagagagctgctgcgagcccccctgctgtgcccccagctgctgcgccccggccccctgcctgaccctggtctgcaccccagtgagctgtgtgtccagcccctgctgccaggcggcctgtgagcccagcccctgccagtcaggctgcaccagctcctgcacgccctcgtgctgccagcagtctagctgccagccagcttgctgcacatcctccccctgccagcaagcctgctgcgtgcctgtctgctgcaagccagtctgctgtgtgcccgtctgctgcaagcctgtctgctgcaagcccatctgctgtgtgcccgtctgctctggggcttcctcttcatgctgccagcagtctagccgccagccggcttgctgcaccacctcctgctgcagaccctcctcctccgtgtccctcctctgccgccccgtgtgcaggtccacctgctgtgtgcccatcccctcctgctgtgcccctgcctccacctgccagcccagctgctgccgcccggcctcctgcgtgtccctcctctgccgccccacgtgctcccgcctctcttccgcgtgctgcggcctctcctcaggccagaagtccagctgctgacgggcaggtcccgtttctccagagttgttccagggccatctctgacttccgaaaatccttgcagccctgagccctgtctgagtctcctctgcccatagccactgcacctccagccagcaatgctgagctttcat

SEQ ID NO: 8329 - DNA, 453 bp, Homo sapiens
  SIMILAR (164)..(229): 361254mologous to Caenorhabditis elegans B0353.1,accession number U23413,Smith-Waterman Score=40.
gcccagtccttgggaagggccaggccctggagaggagcttcttcagggcgcgtcccagactctgcgtctcgagtgaacgcctactgtgtgcctggctctgagcacgggattgtcgctgccacggcatctttaggaaccttcccactaacccagtgggaagggcacaatggctgttaccagcgatcgctcttccctccccagtcaatgccaactcccccctgccccgcctcagagaccccgctgtctttagatacaggccaccgccaagccctgggtcttccccaagatcaattactgcgcacccggttcccctggggtccttcagttaatcctcctcaccccgaagtctggaacctgccttgcacatggaagcggttagctacttcgcttcagcaaaagttcactttcggacccaagttgggaattactaatgtagacagtgattccttatcg

SEQ ID NO: 8330 - DNA, 803 bp, Homo sapiens
  SIMILAR (136)..(240): 411254mologous to Canis familiaris brain-specific synapse associated protein, Bassoon,accession number AJ012166,Smith- Waterman Score=56.
atgacggcctgcaagattgaaacgactgaccttgttgaattgggacctggcgttttggaggctctgataggcaagaaggccagagcaggcaaggaaactgtgaagccaatgactggccagtttctacagctctcgccagagcctagaggtgcaaccggaaagaacaagtcccctggaaacgaccccgctgctgccatcgccactgctggtgctgctgctacggcaggccctggctctccatgcagtctccagaatgccctcatctactcccattcatttcttgagcaccacctgaaggctgaacacccagcacacaggacagaccctggtactcagcaggtgctgcataagcgtctgttaaatgcaggactggagcagtgcagaaacagctcttactctgaaatcgcaggcgcttcccggggagtcccgcaccggcgcagacggcggatccagggcgtggagggggccggggaacgggttcagagtgccatctaccggcagttcgtcggactggcaggaaaggccttggccctgcggcgggatggagccccccagactgcgctgtttgctacgctgctccggatccattcactctccaaccgctctgcaatcacttcgcaatcaccagtaaactttgccgcctacttgagaagagaaagttcccccctggggcagagggaggaggaaaatgctttttatattatggtagtggccatgtggaaaagacatatttccctcaacattcgattccgaatgaaaacgcacgtttgtaaagcatatgtgaaacatgtcatgcacgaaag

SEQ ID NO: 8331 - DNA, 2673 bp, Homo sapiens
  SIMILAR (1262)..(1477): 361254mologous to Chlamydomonas reinhardtii vegetative cell wall protein gp1,accession number AF309494,Smith-Waterman Score=87.
atgacgagagcgggccccccgcgacagaccaccacggcccgcaccgcccttctggcggccccccagcgacccgccgcggcgctgctaccgccccgcccaggcccagggaccgcgcccagcgaggcgcgcgcccgctgtgggagcggggatagagagggggggcgatgtaccgtgcaccgcgcgccgtcgcgcgctccggacacgcacgcgcgagcgagccatcgccggcatccagccgcccccctcggggcaagtggaggatcagagttctccaactttagcgtgtgtgagaatgatctgaagaaaacaacagtgagattccacttcgcacctactgagacggctatacactcagcttctcctgatgggtcactcatctcatgcctgagatttgccttctctgaacctccattatcccatatgcctaacgaggacgagaacatctctggaaagggttgctgtgaggacagcgtaggagacagcgctcagcgttcaggctcactggagctccctgcagaggcccgggccagccctgacgcctggctgcggtggacgccctcagagctagggcacccatcttccagagaagagcctagaggtgcaaccggaaagaacaagtcccctggaaacgaccccgctgctgccatcgccactgctggtgctgctgctacggcaggccctggctctccatgcagtctccagaatgccctcatctactcccattcatttcttgagcaccacctgaaggctgaacacccagcacacaggacagaccctggtactcagcaggtgctgcataagcgtctgttaaatgcaggactggagcagtgcagaaacagctcttactctgaaatcgcaggcgcttcccggggagtcccgcaccggcgcagacggcggatccagggcgtggagggggccggggaacgggttcagagtgccatctaccggcagttcgtcggactggcaggaaaggccttggccctgcggcgggatggagccccccagactgcgctgtttgctacgctgctccggatccattcactctccaaccgctctgcaatcacttcgcaatcaccagtaaactttgccgcctacttgagaagagaaagaatgagcatagctttgtcattggaaaaaaataaaaaacctttaacagaagaagaagcaatagcagcagcagcagctggacatgagcccccgcagaaccaaataacagaaatcaccatgaaggagccaaagtctacacatagcgagccagacgcctacacctcggccccccggggctcgggcccgacttattgtgccggggccggcaactcgcgggccggcgggggcctcaccaagtacaactctgctcacagcagctcccgggtgcccaggcccagactgcctagccagcgccgcggggcctcctgcggcctcgggcctggcccgcaccagcccgcaccccggacgcgaggtctgacccatgaccccggggacgcccagagcccagtccttgggaagggccaggcccctggagaggagcttcttcagggcgcgtcccagactgcgtctcgagtgaacgcctactgtgtgcctggctctgagcacgggactgtcgctgccacggcatctttaggaaccttcccactaacccaatacaggccaccgccaagccctggtctggcccaagatcaattactgcgcacccggttcccctggggtccttcagttaatcctcctcaacccgaagtctggaactgcttgccatggaacgacagacaactcaaaagagccaagacaaaattgaaagagaagaacagaattgaaggactggcagtacccaacttcaagacttactacagagctgcagcaatcaagacagtaaggacttcttccatggagaagcccctcaccgtcctgcgagtgagcctgtaccatcccacgctgggcccatctgcctttgccaatgtcccaccacggctgcagcatgataccagccctctgcttctcggacgggggcaggacgcccacctccagctgcagctccctcgcctctcccgccgtcacctgtccctggagccctacctggagaaaggcagtgccctgctggccttctgcctcaaggccctgagccgcaagggctgtgtgtgggtcaatgggctgacgctgaggtacctggagcaggtccccctgagcaccgtcaacagggtctccttctcaggcatccagatgctggttcgcgtagaagaaggcacatccctggaggcttttgtctgctatttccatgtcagcccttcacccctgatttacagacctgaggctgaggaaactgacgaatgggaaggcatctcccaggggcagcctccccctggttcaggctgtcaacaatttctgttttctgcccaaaaggatgatcgttttgcacccagggcaagctacaaggaggtccaacttcactcacaggccctgagcatcttctccatcaggaaaacagagctggaaccgtcaggctggcttcagggcctggtcttcgcacttgatatcactatccctcacctgctcagacagccagagcaggcgggtattttaaccctcgcattcctctgcttttccaagaatgtgaatcttgccaagctgtccgtgagagacacgggctcccctcgagggagacttgcaaatgctccataa

SEQ ID NO: 8332 - DNA, 504 bp, Homo sapiens
ggggtttaaaccaccagtgacccttatcatcctgctccagagattggcttgggatagtcacccaatgcgggccaatgcaaggtgacttgccaggggcttctgggaaagaagtttcctttctctgaggaaatgtgaatgaggacatccataactcaggttgtgtctggcagccatcttgtgatcatctggcaagacagcccaagaataaagccgtcaccatggagactaagaagagacagaaagacactgggtcttcattgttttcgtccagctgttcatgaggccttatctgaagcccacgtgacctccggactactcacttacatgagagaataaagctcttttttgtttagaccaaataaatacataatacaattacataatcccttgattcctttttatgactgagctcagagactatattttgtcattttaaatcacctttgtcttacagtttatttaactgaaacaaataaacaaaccaaaacacgccaaaaaaaaaaa

SEQ ID NO: 8333 - DNA, 879 bp, Homo sapiens
  SIMILAR (33)..(413): 341254mologous to Mus musculus proline-rich protein,accession number M12099,Smith-Waterman Score=117.
atgagtatggccagcaatgtcaatgccacaaaaggccacgtgggcctttcggattccattctcctggccccagaggaggaagttacatttcagacctgtcaggacaggagtcgccagaggccggtggtggatttcctccccgcatctcagctctccgtccaaagtcaaattgctcttttctccgcccacgcgggcgtggcagctgatatccggccgctgggcgtccccgcgcccccgggggccccgccctgcagctatctccgcggcccacccggcggcgcctccctgcagggctgctccccagcccaaaccgccgcggcgcgacgtggagccagccccgcaaagctgcatccaccccccgaggaccagcccctcgaaggcaaggccaggacctccccgggcggctgcagccataaatttaagaacggtgtgagttcctgccagctgctgatgacaggttttccagaagggaatgatattgccggcaaggcagtgattaagtgtgatgacaactaccaatttagtgaagggagaaagaattgtgccatgaaaaatggaaaactcctgagaagctgttccagcgtcaggagagcagcagacaagctggactggggaagattcttcctggtcccatacttcctagccatgctgttggcagggattaacatcattgcaattctctgggtagaccttgggaggtttaaaccaaccagtgacccctatcatcctagctccagagattggcttagggatagtcacccaatgcaggccaatgcaaggaaatacctctgtacactcaccagacactggctgctggttgtcacggtgctaagagctgtgggaaacatgaagagcaatgagaccaggtccctgctctga

SEQ ID NO: 8334 - DNA, 1288 bp, Homo sapiens
  SIMILAR (636)..(1103): 281254mologous to Equine herpesvirus 1 membrane glycoprotein,accession number M86664,Smith-Waterman Score=125.
ctaaattccactgttccattgtatgaaaataaaataatcttcctctcctccaccaccaaagtgcatgtgggtcacgtccagcctggggagactgtaaacgatgccacctacgcgcttccttgcgcatctccctgaccaggcgtacgtgtgcttctgctgcgtggagggcaaggagcgaaacctcagccgcagcaaacacacctctccacattccagcacacctgcccacctgctgtccaagcccccgaggagctcagaggttgtgtatcacagccaggtgcttccaggaactccccgccccacgtcgcagctgcacctggagctggtgcttccggtttttgcccgtctacctggacataggggaattgaaagagaacagtcctcaccctacagtgcagggggcaccacaggggctacacagaggaggactgagtcaactcctgatgagatggtgtggaaccatatggaaaagtggcagctgccgcaggacctcaacgtgggagaggctactgttgcccctggagaagacaacggcacggacgccatcggcacggccacccatcgctctgcagagaagacaacggcacggacgccatcggcacggccacccatcgctctgcagagaagacaacggcacggacgccatcgccacggccacccatcgctctgcagagaagacaacggcacggacgccatcggccacggccacccatcgctctgcagagaagacaacggcacggacgccatcgccacggccacccatcgctctgcagagaagacaacggcacggacgccatcgccacggccacccatcgctctgcagagaagacaacggcacggacgccatcgccacggccacccatcgctctgcagagaagacaacggcacggacgccatcggccacggccacccatcgctctgcagagaagacaacggcacggacgccatcggccacggccacccatcgctctgcagagaagacaacggcatggacgccatcggccatggccacccatcgctctgcagagaagacaacggcatggacgccatcggccatggccacccattactctgcagagaacataacggcacagatgccatcgccacggccacccattgctctgcagagaacataacagcacggatgccatcggccatggccacccattgctctgcagagaacataacagcatggacgccattggccatggccacccatcgctctacaaagaagataacggcatggacgccatcgccacggccacccattgctctgcagagaacataa

SEQ ID NO: 8335 - DNA, 588 bp, Homo sapiens
  SIMILAR (463)..(582): 271254mologous to Homo sapiens endoglycan,accession number AF219137,Smith-Waterman Score=37.
  misc_feature (1)...(588): n = a,t,c or g
cccagcatcgacactatcagatagatcactagtccgagnggaggaattcctcacctgcacctccctgctagacctcctgctgcccactggcttggagccactggactcagaggagcctagtgagaccatgggcctgggagctgggctgggagcccctggctcatgcttccccagcgaagagaatgaagagtctcggattctgcagccaccacagtacttctgggaagaggaggaagagctgaatgactcaagtctggacctgggacccactgcagattatgtttttcctgacttaactgagaaggcaggttccattgaagacaccagccaggctcaagagctgccaaacctcccctctcccttgcccaagatgaatctaggtgagcctccctggcatatgcctcccagagaggaggaagaagaggaagaggaagaggaggagagggagaaggangaggtanagaaacaaaggaggaggaagcanagagaaaaataaaacaaagcaagacaggggcanaaaaagaaggaggagatctgaatctcgtcttttcagganganatcgagctggaaataaagagagactgtga

SEQ ID NO: 8336 - DNA, 1357 bp, Homo sapiens
  SIMILAR (874)..(815): 521254mologous to Homo sapiens endoglycan,accession number AF219137,Smith-Waterman Score=42.
ctacaggtgtgctaggtgccccaccagtgtaagcaagtgtgcgtttcttcccggcactcctgtatcagcaatctgtttacaaggtgtcgatgacacgtggctgaacacatctgggtcaggaggaccctgagcttggattcggatctgcgtagaatcccagggtatcctggattgagcttcagctgcctgcccttctaggagctgctggttgaagatcttcttgtcccaaggtagcagaggaaggtgtcagttccatgtctccaggggccagtggggaagaggctgaggttctagagccaaggggatcttcatctgggtgctcggccccactgggagctgtggtttgagggaatgaaggcaaggccggcacctcctcgtgctggccagacaaaccagctgctcctgcagtggcttcctcgcttgcttcctgaggagcctcgaactctaccccaagccctgcagctggcagcactgtggcctctgcctcttggctggtggagtcctggtcccccggagtcactgtagttggggtgactgaaggcagcagcaagctgggccccatgctgctctccacctccacacctgatgaggcctggtccccggagtcttcatgcctgcttttggtggcccctggggtctggctgctgcctgaggctggctttcttcttgggatccattcacagggagcagctcctccctctccctcctcctcttgtttctctacctcttccttctccctctcctcctcttcctcttcctcttcttcctcctctcttccgatggccactccatgtgatttgggcttctcaaagtgtggcagtaggctctcgcctcctgccaaggctctgctagaagatgctctgactcccagaggtggcgcctgagcctggatgagggacagagccagcatcggggctgaccctgtgtggctctgcccttccctcccgtcatctttcctttgcttttctttgaaagctgtgtgcacatccagcgctctccctgctacaccactggcttcctttctccaacgcagaaaaccaagccgtctaagcagggccttggggtttgctcttcccaggtcagtaggcatccagcgctggggcagctgcttcaggacatcgccgaggacaagtctcctccccattctggttccaccatctgtagcctgtggctttcatcctcaagggctccatgcgaccgctgcacatccaggcccagttccaaggtgcaaggctacttgtgccagcaagatagcagaagcaggacaagagctggctggaagacacctaccgtggtgggaagacatgtacccgtgaagatcgagaaagagtccatccggccagcaaacttcggctga

SEQ ID NO: 8337 - DNA, 498 bp, Homo sapiens
  SIMILAR (102)..(179): 731254mologous to Mus musculus Gag polyprotein,accession number Y12713,Smith-Waterman Score=90.
  misc_feature (1)...(498): n = a,t,c or g
actgggctgtctattgatctcatttttgcccttctttaacttttacttcctcattctttttctgaggtatnnnnnnnnnnnnnnnnnnnnnnnnnnnnnnngatcaggctgaatttattgacttgggcccactaagtagggactctgcatttaatgttgcagcttgaggagttaaaaaagcannnnnnnnnnnnnnnnnnnnnnnnnnnnnnnnaataaatttttcnnnnnnnnnnnnnnnnnnnnnnnnnnnnnnnnnnnnnnnnnnnnnnnnnnnnnnnnnnnnnnnnnnnnnnnnnnnnnnnnnnnnnnnnnnnnnnnnnnnnnnnnnnnnnnnnnnnnnnnnnnnnnnnnnnnnnnnnnnnnnnnnnnnnnnnnnnnnnnnnnnnnnnnnnnnnnnnnnnnnnnnnnnnnnnnnnnnnnnnnnnnnnnnnnnnnnnnnnnnnnnnnnnnnnnnnnnnnnnnagcaggtcccaggntccagttgnnggacccgcg

SEQ ID NO: 8338 - DNA, 1075 bp, Homo sapiens
  SIMILAR (130)..(549): 511254mologous to Mus musculus Gag polyprotein,accession number Y12713,Smith-Waterman Score=383.
gactctatctcaaggtgtgctacatttgaaaagaactgtttgagttctctaatttatataaacacccatctggagaagaggtatgggagcggatattaagggtataggataatggtggaaggaacataagagttgtatcaggctgaatttattgatttgggcccagtaagtagggactctgcttttaatgttgcagctcaaggagttaaaaaaggttctaataggttatttccttggttagctgaaatatggattacaagatggcccactgtgagcgagctggaaatgcctgatctcccttggtttaatgtagaggaagggatcaaaaggcttagagagattgggatggtggagtggattagtcactttagatgtactcatcccagctggaagggtccagaagatatacccttgaccaatgccttgcaaaatagattcgtgagggcagcacctgcatctctgaagagccttgtaattgctctttctctgtatgtcagatgcaacagcgggaactgcagtcactcaattacaaaatttaaatacaatgggaataattggatcccgaggtgtcagggaccaagtggtagcactcaaccatcaaaggcaggtgggtgtagcgaaccggcaaggcacgccacggcaaggggcaccaaaaagcggacacggtaacccggacaggctaaaagaccaggtccaaaggaacgaggaacccgcagccacgcgtacgcacacacatccgtcacaacacctaagaacaacagacacgacacgcgaccatcacaaagaacaccacaacaaaagagagacgcacaacaccaaacggagacaccaaacacaacaccaaacacgtcgcgcccgccgtcacatgtctcctttttccggagtaaaaaaagaagaagaagaccacaacacgaagaacgcaacaaaagaacaagaacagaagaagaagcaagagagaggaacagagcgaacaaagacgacacaaaacgacaaccaccaaagaaaaccagagagaacagacgacaactgtggagtgagtttttatcttgggagtgagctcctgatgaaagaatga

SEQ ID NO: 8339 - DNA, 398 bp, Homo sapiens
  SIMILAR (176)..(397): 951254mologous to Homo sapiens paraoxonase-3,accession number L48516,Smith-Waterman Score=377.
cctgatgctggatctttagaatatcggaagatagccagaggttccatttgtaagtaagtggctagatagaacttccacctcgtagcatttcctcaaccatcatgacccctgttcggcttttttgcaaatttaattttaattttttggttcagctttaaaattggaaactttctggctgcgtgtggtggccaaaggattttgtagtgccaatgggatcacagtctcagcagaccagaagtatgtttatgtagctgatgtagcagttaagaacattcacataatggaaaaacatgataactgggatttaactcaactgaaggtgatacagttgggcaccttagtggataacctgactgtcgatcctgccacaggagacattttggcaggatgccatccta

SEQ ID NO: 8340 - DNA, 475 bp, Homo sapiens
  SIMILAR (15)..(215): 671254mologous to Mus musculus paraoxonase-3,accession number L76193,Smith-Waterman Score=220.
  misc_feature (1)...(475): n = a,t,c or g
ggccccccgagaccatggggaagctcgtggcgctggtcctgctgggggtcggcctgtccttattcggggagatgttcctggcgtttagagaaagggtgaatgcctctcgagaagtggagccagtagaacctgaaaactgccaccttattgaggaacttgaaagtggctctgaagatattgatatacttcctagtgggctggcttttatctccagtnnnnnnnnnnnnnnnnnnnnnnnnnnnnnnnnnnnnnnnnnnnnnnnnnnnnnnnnnnnnnnnnnnnnnnnnggcaaatattgctgcctgatttttcttctggaagcttcatcccagaggggcatccgcctgtatgagggattaaaatatccaggcatgccaaactttgcgccagatgaaccaggaaaaatcttcttgatggatctgaatgaancaaaacccagggcacaagcactagaaatcagtggtggacttgacaa

SEQ ID NO: 8341 - DNA, 1273 bp, Homo sapiens
  SIMILAR (182)..(754): 641254mologous to Homo sapiens paraoxanase-3,accession number AF320003,Smith-Waterman Score=549.
gcaggaaccgcccgccgcgcccccgagagctctcggcgccgcgcagtcgccgctgggcaccccgagaccatggggaagctcgtggcgctggtcctgctgggggtcggcctgtccttagtcggggagatgttcctggcgtttagagaaagggtgaatgcctctcgagaagtggagccagtagcaacctgaaaactgccaccttattgaggaacttgaaagtggctctgaagatattgatatacttcctagtgggctggcttttatctccagtggattaaaatatccaggcatgccaaactttgcgccagatgaaccaggaaaaatcttcttgatggatctgaatgaacaaaacccaagggcacaagcactagaaatcagtggtggatttgacaaagaattatttaatccacatggggatcagtattttcatcgacaaagacaatactgtgtatctttatgttgtgaatcatccccacatggaagtccactgtgggaggatattttaaattttgagggaacaacaacgttcttctgggtattacctggaaaactattaaaacatggaacttcttcaaaagtgtgaatgacattgtggttcttggaccagaaacagttctatgccaccagagaccactattttaccaactccctcctgtcattttttgagatgatcttgggatcttcgctggacttatgttcttttctacaggcgcaagggaggttaaaagtggtggccaaaggattttgtagtgcccaatgggatccacagtcctcagccagacccagaagtatgtcctatgtaagctgatgtagcagcctaagaacattcacataatggaaaaacatgataactgggatttaactcaactgaaggtgatacagttgggcaccttagtggataacctgactgtcgatcctgcccacaggagacattgttggcaggatgccatcctaatcctatgaagctactgaactataaccctgaggaccctcccaggatcagaagtacttcgcatccagaaatgttttgtctgaaagcccaagggtgagcaccggttatgccaacaatggctcttgtgcttcagggcaccttgtgggcttctgtgtaccatgggaaaattctcataggcaccgtatttcacaaaactctgtactgtgagctctagactctagatagtaaaaaaaaaaaaaaaaaagtctacatattttgtaaaagtaaactgataattgtatgataagtggcactgtaagtaaatagcaaaccccaaaaaaa

SEQ ID NO: 8342 - DNA, 2352 bp, Homo sapiens
  SIMILAR (887)..(1549): 481254mologous to Homo sapiens selenophosphate synthetase 2,accession number U43286,Smith-Waterman Score=331.
  misc_feature (1)...(2352): n = a,t,c or g
cgtgggtctgacggcttgagtagcgctagggagaatccctgcaggtaatatttgactttgggttcatattaatctgaggggaaaataaaagggccctcttctcctctcgcttccctgccgggcaggcgccatggcggaaacatcaggcgacgggcgcctgcggagaggcgatggcagcggcggaaggctcctcgggcccggcgggcttgactctgggccggagcttctcgaactaccggcccttcgagccccaggcgtttggggcctcaagcccgagcttggccggcttgacggggctttctccggcaatgaaagggctgaaggctgcaaggtcccgcaagaagggcgcttgctcaaactcctggccgggactgacgcggccgggacgtgcggccccccgctgggcngggggcctggtgggtggccaggaagaggcgtcccaggaagccggcctgccggcaggagcgggccccagccccacctttccagccctgggcatcgggatggactcctgcgtcatccccctgaggcacgggggcctgtcactggtgcagaccacggacttcttttaccccttggtagaagatccctacatgatggggcgcatagcttgtgccaacgtgctgagtgacctctacgccatggggattactgagtgtgacaacatgttgatgttactcagcgtcagccagagtatgagtgaggaggaacgcgaaaaggtaacgccactcatggtcaaaggctttcgggatgcggctgaggaaggagggacggcagtgaccgttgggcaaacggtggtcaacccttgggatttattaatcggtggagttgccacttgtagtattgccaaccaatttgagttcataattgccggacagcgccgtcgttggggacgtgctgggtgttaaccaaaccgtttaggaacccaggtttgctgttcaatgcccaccaatggcttggataattccttgaaagatgggattaaagttaaagatggtggttttccagagaagaaggtggagctgggcctatcaggaagcccatgttcaatatggctaccctcaaccagaactgctgcagggtttaaatgcacacatttaatgcccatgcggccacagatatcacatggctttgggcattctaggacactcccagaaccttggcaaaacaacaaagaaatgaagtgtcctttgttattcataatctgccaataattgccaagatggctgccgtcagcaaaagggccagtgggacggtttggggcttctttcaaggaacctcagcctgaaacctctggggggattactggattttgtctgccaagaggaacagggcgggctcgctttttgttcttgaaattcaaatccttcccaagtacgggagagggtcacccaaagcgtgggatcgttggcattgtggaaaagggaaaccgaacggccccggatccattgacaagcccgcgagttattgaagttcctgcctcgtgggggccacagctgctgttcttgctccctgacagttcaaatgccctcctcttgagcctagctcgtgagattgaaagaacagaagttgtttggaccttagagccattgtccacaatcacggatggttctcaagagttgattgtaaagaaatttccaaagaaggctgcctgcatagtggttccggctgccctttctaggtgattggaatcagccccttttaaagcagtctttataatgcattcccgaggccagagtaacattttgaactttggggggatatttggtccatcacttgggtagaagaggagccaaaaatacctctggtttctcttgcccaaagtaagatgaagctattcccaggttggggggattttttctttgccacgggggttgattaatttctgccacaggggagtgagattattaaaggtaacacacacaccaaaggaaattgcaaaatgaaaaaaattaagaagcaaaatgagttttggacccaatattggttgataaatcctaaattgttaagagagatcttataatgccaacatcaaattcctttattcaaattttacctgaaagtactggcctctttccctgcctctggacaagaattgagcaacttgtcctgatgactgggaaaggaggacctgcaacccatcctgacttggtctctgttaatgacgtctctccctctaaaccccattaaggactgggagaggcagagcaagcctcagagcccaggcctcagtggtcattaagatgttaagtcttttgcggcagattcctggtgatttgatcgaataaagagtaatttcttgctaaataaataaaagaagccttgttgaaaaactaaaaaaaaaaacccaaa

SEQ ID NO: 8343 - DNA, 2600 bp, Homo sapiens
  SIMILAR (246)..(1199): 791254mologous to Homo sapiens dJ967N21.1 (chromogranin B (secretogranin 1, SCG1)),accession number AL035461,Smith-Waterman Score=1252.
  misc_feature (1)...(2600): n = a,t,c or g
ggggtgctgcttcgtgacgtcagggctgagctagggggcgcccgctcctggctgcccgctcctcccggccctgcggcccccgcctgccctttaaaagagcggggcctgcgccggccgcgccacaccgcggggaccaggaggcacgctggttttccggggccgctccatcgcgccttcctcctgcgcctcgcttctccggtccagccgccatcttcctttccgcacaggggccgccgagcggggccatgcagccaacgctgcttctcagcctcctgggagccgtggggctggcggctgtcaattccatgccagtggataacaggaaccacaatgaaggaatggtgactcgctgcatcattgaggtcctctcaaatgccttgtcgaagtccagcgctccacccatcacccctgagtgccgccaagtcctgaagacgagtagaaaagacgtcaaagacaaagagacaactgaaaatgaaaacacaaagtttgaagtaagattgttaagagacccagctgatgcctcggaagcccacgagtcctccagcaggggagaggcaggagccccaggggaggaggacatccaaggcccaacaaaggcagacacagagaaatgggcagagggaggcgggcacagccgagagcgagcggatgagccccagtggagcctctatccctccgacagccaagtctctgaagaagtgaagacacgccattctgagaagagccagagagaggatgaggaggaggaggagggagagaactatcaaaaaggggagcgaggggaagatagcagtgaagagaaacaccttgaagagccaggagagacacaaaacgcttttctcaatgaaagaaagcaggcttcagctataaaaaaagaggagttagtggccagatcggaaacacatgctgccgggcattctcaggagaagacacatagccgagagaagagtagccattttcagctgnttaggaggcagggagccaggagaatcggccccaggagtctaaaggccaaccccgaagccaggaaaaatctgaggaaggtgacgaagatgccacctctgaggtggacaaacgacgcacgaggcccagacaccaccacgggaggagcaggcccgacaggtcctcttcaaggagggagttttccctcttgaggaaaagggacacccccagggaggaatctgaggagtcaaacgtcagcatggccagtttaggggaaaagagggaccaccattcaacccactacagggcttcagaggaagaacctgattatggagaagaaataaagggttatccaggcgtccaggcccctgaggacctggagtgggagcgctataggggcagaggaagtgaagaatacagggctccaagacctcagagtgaggagagttgggatgaggaggacaagagaaactaccccagcttagagcttgataagatggcacatggatatggtgaagaaagtgaggaagagaggggccttgagccgggaaagggacgccatcacagaggcaggggaggggagccacgtgcctatttcatgtctgacaccagagaagagaaaaggttcttgggtgaaggacaccaccgtgtccaagaaaaccagatggacaaggcaaggaggcatccacaaggtgcgtggaaagagctggacagaaattatctcaactacggtgaggaaggagccccagggtaagtggcagcagcagggagtcctgcaggacactaaagtaaaacagggtggaagctaggtttcaagataaacaatatagctcccatcacacagctgaaaagaggaagagattaggggaactgttcaacccatactacgaccctctccagtggaagagcagccatttggaaagaagagacaacatgattgacaattttctcgagggtgaggaggaaaatgagctgaccttgaacgagaagaatttcttcccagaatacaactatgactggtgggagaaaaagcccttctctgaggatgtgaactgggggtatgagaagagaaacctcgccagggtccccaagctggacctgaaaaggcaatatgacagggtggcccaactggaccagctccttcactacaggaagaagtcagcttgagtttccagacttctatgattctgaggagccggtgagcacccaccaggaggcagaaaatgaaaaggacagggctgaccagacagtcctgacagaggacgagaaaaaagaactcgaaaacttggctgcaatggatttggaactacagaagatagctgagaaatttcagccaaaggggctgactgtcattggagcggtgggcactgttaagaagcagccatcacatgatctgtttttcaccacttcactgaaagacaccatttatctacccaagggcagaaagtagaacttactattcattaaatgtttgacacaattggaattgtctttaatttctgtcagaatgctattgaaaatgtgaattgcatgacttgtagcatattcttttctgcaaaatagacatattaacatgcttatgacaatgactgtgctactgtctttggaaaaatgtttgtctcagttggaaataataaaagattcacctgagaccaaaa

SEQ ID NO: 8344 - DNA, 2049 bp, Homo sapiens
  SIMILAR (19)..(900): 251254mologous to Homo sapiens dJ967N21.1 (chromogranin B (secretogranin 1, SCG1)),accession number AL035461,Smith-Waterman Score=183.
agcaccgcggacagcgccagcctcgctcttccccgccgctcccgcagccctagacttgtgtctagactctagattctcccagtccctattataccagccgccaagtcctgaagacgagtaagtgtcccacacggcaggcagatcttggtcactgcagtgatccttgttcctactccctccacatcaccttcccagctgatgcctcggaagcccacgagtcctccagcaggggagaggcaggagccccaggggaggaggacatccaaggcccaacaaaggcagacacagagaaatgggcagagggaggcgggcacagccgagagcgagcggatgagccccagtggagcctctatccctccgacagccaagtctctgaagaagtgaagacacgccattctgagaagagccagagagaggatgaggaggaggaggagggagagaactatcaaaaaggggagcgaggggaagatagcagtgaagagaaacaccttgaagagccaggagagacacaaaacgcttttctcaatgaaagaaagcaggcttcagctataaaaaaagaggagttagtggccagatcggaaacacatgctgccgggcattctcaggagaagacacatagccgagagaagagtagccaggagagtggagaggagacagggagccaggagaatcacccccaggagtctaaaggccaaccccgaagccaggaagaatctgaggaaggtgaggaagatgccacctctgaggtggacaaacgacgcacgaggcccagacaccaccaccccgaggagcaggcccgacaggtcctctcaaggagggagtcttccctctgaggaaaagggactcccccaggaggaatctgaggagtcaaacgtcagcatggccagttttaggggaaaagagggaccaccattcaacccactacagggcttcagaggaagaacctgaatatggagaaggaaataaaaggggttatccaggcgtccaggcccctgaggacctggagtgggagcgctataggggcagaggaagtgaagaatacagggctccaagacctcagagtgaggagagttgggatgaggaggacaagagaaactaccccagcttagagcttgataagatggcacatggatatggtgaagaaagtgaggaagagaggggccttgagccgggaaagggacgccatcacagaggcaggggaggggagccacgtgcctatttcatgtctggacaccagagaagagaaaaggttctttggtgaaggacaccaccgtgtccaaagaaaaccagatggacaaggcaaggaggcatccacaaggtgcgtgggaaagagcttgacagaaattttctcaactacggtgaggaaggagccccagggaagtggcagcagcagggagacctgcaggacacttaaagaaaacagggaggaagcttaggttttcaagataaaccattttagcttcccatcacacagctgaaaagaggaagagattaggggaactgttcaacccatactacgaccctctccagtggaagagcagccattttgaaagaagagacaacatgaatgacaattttctcgagggtgaggaggaaaatgagctgaccttgaacgagaagaatttcttcccagaatacaactatgactggtgggagaaaaagcccttctctgaggatgtgaactgggggtatgagaagagaaacctcgccaggggtccccaagatggacctgaaaaggcaatatgacagggtggcccaactggaccagctccttcactacaggaagaagtcagcttgagtttccagacttctatgattctgaggagccggtgagcacccaccaggaggcagaaaatgaaaaggacagggctgaccagacagtcctgacagaggacgaggtatggtctagggcttctgtttaaaagtacttactctggtcaatgttagcacattatgttcaagactatccgagctgactgtcattggagcggtgggcactgttaagaagcagccatcacatgatctgtttttcaccacttcactgaaaga

SEQ ID NO: 8345 - DNA, 381 bp, Homo sapiens
  SIMILAR (94)..(360): 961254mologous to Homo sapiens HTRM clone 921803 protein sequence,accession number Y73373,Smith-Waterman Score=465.
cagaagtttgcccgtgcccacggggtcagcgtccagccagaggcctcggacacccacatcctcctcctggaaggcttcctgctctacagctacaatacccgcaactacacagtccctgatccccccggcctcttcgatggccacgtgtggcccatgtaccagaagtataggcaggagatggaggccaacggtgtggaagtggtctacctggacggcatgaagtcccgagaggagctcttccgtgaagtcctggaagacattcagaactcgctgctgaaccgctcccaagaatcagcccccttccccgctcgcccagccaggacacatggacccggacgcggatgcggccacagaacggcattcctgcagcgtcccagcagg

SEQ ID NO: 8346 - DNA, 1087 bp, Homo sapiens
  SIMILAR (1)..(603): 931254mologous to Homo sapiens HTRM clone 921803 protein sequence,accession number Y73373,Smith-Waterman Score=997.
atgaagctcatcgtgggcatcggaggcatgaccaacggcggcaagaccacgctgaccaacagcctgctcagagccctgcccaactgctgcgtgatccatcaggatgacttcttcaaggtgcccgcccttgcccggggagtgctggagtctctggacatggaggccatgctggacaccgtgcaggcctggctgagcagcccgcagaagtttgcccgtgcccacggggtcagcgtccagccagaggcctcggacacccacatcctcctcctggaaggcttcctgctctacagctacaagcccctggtggacttgtacagccgccggtacttcctgaccgtcccgtatgaagagtgcaagtggaggagaagtacccgcaactacacagtccctgatccccccggcctcttcgatggccacgtgtggcccatgtaccagaagtataggcaggagatggaggccaacggtgtggaagtggtctacctggacggcatgaagtcccgagaggagctcttccgtgaagtcctggaagacattcagaactcgctgctgaaccgctcccaggaatcagccccctccccggctcgcccagccaggacacagggcacccggacgtggatgcggccacagaacggccaggactgcagcgtcccagcaggacagcatgtgagcgtttccctatgggggtgtctgtacgtaggagagtggaggccccactcccagttgggcgtcccggagctcagggactgagccccaagacgcctctgtaacctcgctgcagcttcagtagtaaactgggtcctgtttttttaaaaaaaaaaaaaaaaaaaaaaaaaaaaaaaaaaaaaaaaaaaaaaaaaaaaaaaagggggggggcccttaaaaaaaaaacccgggggggcccaaaaaaaaccggggaaaaaaaaaaaaaattttttttttaaaaggggggaaaaaaaaaacccccgggggatttttgaaaaaaaaacctttttttgggggggggaaatttggccccccccccccccaaaaaattaaccccctgaggaaaaaaaaaaatttttaagggggaaggggggcaaaacaaccc

SEQ ID NO: 8347 - DNA, 421 bp, Homo sapiens
  SIMILAR (174)..(296): 1001254mologous to Homo sapiens KIAA0934 protein,accession number AB023151,Smith-Waterman Score=209.
ttctgctaaaaatagaggcaggacttggctgtttcacaacagtggcagttgaggttcctggtgagatcttgactcaccaaaacctcagggagatgagtttgcagacatcaaaaagaaggaaacggcttgagcggcattatggggaagcttacgcaggctgtcattactccacagagcgccatgatgccctctacgtggtaggggcactggacgaagccatggagctgcggggcatgcggtaccacccaatcgacattgagacctcggtcatcagagcccataaaagcgttacggaatggcagcagcaaagaggcagcactggaacacagactccgctggccaggtggagtgatgctgtgctagaaatgggaactcgggaagatggtgaaacagtcgcagaagccaccgagagagaaggctg

SEQ ID NO: 8348 - DNA, 6200 bp, Homo sapiens
  SIMILAR (2787)..(3668): 561254mologous to Caenorhabditis elegans contains weak similarity to an AMP-binding motif,accession number AF003136,Smith- Waterman Score=893.
  misc_feature (1)...(6200): n = a,t,c or g
attctgcacctcctgacgtaaccacgtacacctcagagcactcgatacaggtggagagaccgcagggttccacggggtcccggacagcgcccaagtacggcaacgccgagctcatggagaccggggatggagtaccagtaagtagccgggtgtcagcaaaaatccagcagcttgtcaataccctcaaacgaccgaaacgaccacctttacgagaattctttgtcgatgactttgaagaattattagaagttcaacaaccggatccgaaccaaccaaagccggagggggcccagatgctggccatgcgcggagagcagctgggcgtggtcacgaactggccgccgtcgctggaggccgcactgcagaggtggggcaccatctcgcccaaggcgccctgcctgaccaccatggacaccaacgggaagcccctctacatcctcacttacggcaagctgtggacaagaagtatgaaggtcgcttacagcattctacacaaattaggcacaaagcaggaacccatggtccggcctggagatagggtggcactggtgttccccaacaatgatccggctgccttcatggcggctttctacggctgcctgctggccgaggtggtccccgtgcccatcgaggtgccactcaccaggaaggacgcagggagccagcagataggtttcttgcttggaagctgtggagttactgtagccttgactagtgacgcctgccataaaggacttccaaaaagcccaacgggagagatcccacagtttaaaggttggccaaagctgctgtggtttgtcacagagtctaaacatctctccaaaccgccccgagactggttttccacacattaaagatgccaataacgacactgcgtatattgagtacaagacgtgtaagggatggcagtgtgctgggtgtgacggtgacgaggactgcgctgctgacacactgccaggccctgacgcaggcgtgtggctacacggaagctgaaaccattgtgaatgtgctggatttcaagaaggacgtcgggctctggcatggcatcctgacaagcgtcatgaacatgatgcatgtgatcagcatcccgtactcgctgatgaaggtgaaccctctctcctggatccagaaggtctgccagtacaaagcaaaagtggcgtgtgtgaaatcgagggatatgcattgggcattagtagcacacagagatcagagagacatcaacctctcctctctgcgaatgctgatagtggcggacggcgcgaacccctggtctatttcttcttgcgatgcatttctcaatgtcttccaaagtaaaggccttcgacaggaggtcatctgtccttgtgccagctcgccagaggccctcactgtggccatccggaggcccacggatgacagtaaccagcccccgggccggggtgtcctctccatgcatggactgacctatggggtcattcgtgtggactcggaagagaagctgtccgtgctcaccgtgcaggatgtcggcctcgtgatgcctggagccatcatgtgttcagtgaagccagacggggttcctcagctgtgcagaacggatgagatcggggagctgtgtgtgtgtgcagttgcgacgggcacgtcctactatggcctctctggcatgaccaagaacacctttgaggtgtttcccatgacaagctccggggctccgatcagtgaatacccattcataaggacaggcttgctggggttcgtgggtcccggaggcctcgtcttcgtggtgggcaagatggatggcctcatggtggtcagcgggcgcaggcacaacgccgacgacatcgtggccactgcgctggccgtagaacccatgaagtttgtctaccggggaaggatagccgtgttctcggtgaccgtgctgcacgacgagaggatcgtgatcgtggctgagcagaggcctgactccacggaagaggacagtttccagtggatgagccgtgtgctgcaggcgattgacagtatacatcaagttggagtttattgcctggccttggtgccagcaaacaccctccccaaaaccccgcttggtgggatccatttatcagaaacaaaacagctttttctggagggctctctgcacccctgcaatgtcctaatgtgcccccacacctgcgtcacaaacttgcctaagcctcgacagaagcagccagaaatcggccctgcctctgtgatggtggggaacctggtctctgggaagagaatcgcccaggccagtggcagagacctgggtcagatcgaagataacgaccaggcacgcaagttcctgttcctctcagaggtcttgcagtggagagcacagaccaccccggaccacatcctctacacgctgctcaactgtcggggtgcgatagcgaactcgctgacctgcgtgcagctgcacaagagagctgagaagatcgccgtgatgctgatggagaggggccaccttcaggacggcgaccacgtggccttggtctaccccccaggaatagacctgatagcagcgttttatggttgcctgtacgcaggctgtgtgccaataaccgtccgtcccccgcacccacagaacatcgcgacgacgttgcctaccgtcaagatgattgtggaggtgagtcgctctgcctgtctgatgacgacacagctgatctgtaagttgctgcggtccagggaggcggcggcggctgtggacgtcaggacgtggcccctcatcctggacacagatgattagcccaagttaacggtttgcccagacactgaaaccttgcaacccagacactcttgcatatctcgacttcagcgagtccacaactgggatgctagctggcgtaaagatgactaacgcagccaccagtgccttctgccgttccattaagctgcagtgtgaactttacccctctagagaagtggccatctgcctggacccttactgtggactgggatttgtcctctggtgcctctgcagtgtgtattctgggcaccagtccatcctgatcccgccctctgagctggaaaccaaccccgccttgtggcttcttgccgtgagtcagtacaaagtccgagacacgttttgctcctactccgtgatggagctgtgcaccaaagggctgggctcgcaaacagagtccctcaaggcgcgagggctggacttgtcccgagtgaggacctgcgtggttgtggcggaagagaggcctcggatcgcactcacacagtcgttctcaaagctgtttaaggacctgggccttcacccgcgggccgtcagcacctcgttcggttgcagggtgaacctggcgatttgcttgcagggaacctcaggacctgacccaaccactgtctacgtggacatgagagccctgagacacgacagagtccgcttagtggaaagaggatcccctcatagtctgcccctgatggaatcgggaaagatacttccaggggttcggattataattgccaacccagaaacaaaaggaccgctgggggactcacaccttggagagatttgggttcacagtgcccacaatgccagcggttatttcactatttacggagacgaatccctccagtcagatcacttcaactcaagactaagttttggagacacccagaccatctgggcacgcacaggctacttggggttcctgcggagaactgagctcacaagatccaaatggagagcgccatgatgcccctcnacgtggtaggggcactggaagaagccatggagctgcggggcatgcggtaccacccaatcgacattgagacctcggtcatcagagcccataaaagcgttacggaatgtgctgagtttacctggacaaatttgttggtggatgtggttgagctggatgggtcggaacaagaagccttggacctggttcccttggtgaccaacgtggtcctggaggagcactacctgatcgtcggagtggaggtcgaggtggacatcggcgtcatccccatcaactcccgtggtgagaagcagcgcatgcacctgcgagacgggtttttggcagaccagctagaccccatctatgtggcctacaacatgtagtctcgtctcttggcttccatggacttttctagagattgtagacattgttctccgtgtccactgaagcgtgcagacacagggcaacactcaccagaatacagccatttggtggtgagagtggaggaggaagaggaggaggaagaggacttctcacagcagccacgattggcatgggggtgaaatgtgaatttaccactgaatttcgctcagaaggactttggattactgccttcagtttgttggaaaagcccatttcaaaaactttcttttcttttctttcttttttaattattggataataagtgctttcttcgtaaatgtggtattttgttaagccgcaaatagcaatttaaaaaaatatcctgccctccagatgggttcttttaaacaatttatgtagtgtgnccaaagaattgttttctctggttttaatgtgtcatggaaatcttaatgacatggatcctgttacctaaatttaagcccattgcttagatctccatcccttttagggaaagtttgagggtacgaggaaaaccttccaaataggcaccttccaattaggataatagccagctttctttgtcagaaatgtgctgaagaaacaaaggctggtatacggccttcgaagttagtatagaatgagaagaaattataaataaggtgtatttcggcaattatcttgcaaatatctttgtactaaactaaaaagataaaataagttaacttcctcaatatgtaattatgtacaaaacgtttaatttattttgatctctttagaactataaaagagaaaaacattcaagaatattaaagtcttgtaatgtttgctaatataaaaaagtgttgtattatcttgcgtggatagtatcacaacaaatatatatatatgaaatataaattcactaatgaacaaaggagattttaaagtttaagatgcagaacttgtcacttgcatggtgtgccccccgtactcacatacactctgctgttgccagcagtcgcagaccgcaggagccctgtctaaaagtttcttctagaaccagagaccagcaagtgaaattattgccatctcaaggatggcaaaagaattcaaagctcaatgtgcactatttttttctttgctgtgggacaacagtgaatgtgtttatgccagcgtgtgctgactgatactgaggggctttaggttggcaaatagcactgttttcttagctgcaagaattcattgcacaatgtttttcatcatttttgttaatgtcatctttttttggtccttgctacgaaaaggaatgcgattctgtggtcattcgcactgggttgcattgattcccccttctgatgcccaatgtggagtggacaaagtgtccggaactcacatcggtgatcgtcccctcgtcttaagacccagcccgctctgtgtgagccctctggggcttccctcgctcaagtgagcacaagtttccccgggggttcatgcccagagctccgggctgaaagcaagaagtcctcccagctgcgtcggtttgccgcctgtggacgagtgcgccccagtttctgccctggcagctcctggccacaccttctcagagctcacctgtgcacctcctaaattgaattggccccacggtgtcccaaccaagaaggagcatctgcactccgagaaagatgtsgttctgtaactgccccagatagtgaccccgsgagtggctctcggtgctagatatgcatgactaaggttsatgctgggcaaaatgtagatgatctttcattatgttgtgggcagcgtctttctctgcctttgctatatgcagtscakcwgtaagtccttttgctaaaatgagttttgtttgacttctgagatccaagkgctgattgttgttaaaaaaaaaaaaaaaaaaaagtgggcacattttaaaaaaatgtgtctggcatatgtgggtgcatccttccatctccacaaaccatttgattcttgaaatattgtttgacctcattgctgtgtgtgaatatttctccacatgcttcaggatgcacattcctaggtctctggcttcctaagggggggaaccaccacacattggggggggaaaaaggacattttcctacacccacccaccttgttggaaggggaggtagg

SEQ ID NO: 8349 - DNA, 607 bp, Homo sapiens
  SIMILAR (575)..(255): 991254mologous to Homo sapiens precursor polypeptide (AA -21 to 782),accession number X15187,Smith-Waterman Score=536.
ttgtgttgaaagcagtgtgctttattaacatttatatgttctttacctatgtcttttggttttgctccagcaattactgtcactgttgtcaaccactttgttctttgtagcaaaactggatcacaagtctttcggtcggagaactggaaggtctgggcagagtcgagcagaggagaccatgatgactgcctagacttgtgctcagtgctgtgttgggggagaactgctacaggtgcttttagttgtccagctcagctcatctttgctgtttcttcttcttcatctgttcccacatccatttcttcatcttcgtcttgctctgtgtcttctgttgtgtcttctgctgtctcttcaggttcttcttcaggctcttcttccacctttgcatcagggtcaatgttcaaactgaggcgaagcattctttctattctatctccatatgctttagtgtctggtaaaagataccctgaccgaagcgttgctgtttcaaacaaaaccacagcaagatccaaaactgttttatcatcttcatcttccttaattcgtcgaagcatgtctctgatcagcgggtgtcgggattaactcgtccgaatcccaggcgagcaat

SEQ ID NO: 8350 - DNA, 2299 bp, Homo sapiens
  SIMILAR (289)..(657): 951254mologous to Homo sapiens precursor polypeptide (AA -21 to 782),accession number X15187,Smith-Waterman Score=600.
  misc_feature (1)...(2299): n = a,t,c or g
atgaccatggcagcggcggcggtggtggcacgcggggccggggcgagggcagcgacagcggcggctttgcggggtggctgcgggaccgcggctcgggggcggccgtgtgcgggccccgcccggcccttgtgcactgcacccgggaccgccccggacatgaagcgctacctgtgggagcgctaccgggaggcgaagagaagcacagaaggcactaagaagtacacgacctcacttaatgcaagacactattatacccatttcacagaggaaaatgaagatgaaattaacagctcgagttcttatgcgagtcagaagaaaacatttgaaattaatcccagacacccgctgatcagagacatgcttcgacgaattaaggaagatgaagatgataaaacagttttggatcttgctgtggttttgtttgaaacagcaacgcttcggtcagggtatcttttaccagacactaaagcatatggagatagaatagaaagaatgcttcgcctcagtttgaacattgaccctgatgcaaaggtggaagaagagcctgaagaagaacctgaggagacagccgaggacacaacagaagacacagagccagacgaagatgaagaaatggatgtgggaacagatgaagaagaagaaacaggcaaggaaagtgatgaccccatggcttatattcactttactgctgaaggggaagttaccttcaaatcaattttatttgtacccacatctgctccacgtggtctgtttgacgaatatggatctaaaaagagcgattacattaagctctatgtgcgccgtgtattcatcacagacgacttccatgatatgatgcctaaatacctcaattttgtcaagggtgtggtgattaggaagaagcttgttcgtaaaacgctggacatgatcaagaagattgctgatgataaatacaatgatactttttggaaagaatttggtcccaccacaaagctttggtgtgattgaagaccactcgaatcgaacaacgtcttgctaaacttcttaggatccagtcttctcatcatccaactgacattactagcctagaccagtatgtggaaaagagtgaaggaaaaacaagacaaaatctacttcatggctgggtcaagcacgaaaagaggctgaatcttctccatttgttgagcgacttcttgaaaaagggctatgaagttatttacctcacagaacctgtggatcgaatactgtattcaggcccttccccgaatttgatcgggaagaggttccacgaatgttgtccaaggaaaggagtgcaagttccatgaaagttgagaaaacctaaggaagtagtagtgtaagtcagttgagcaaagaatttnagccctctgcctgaattgggatgaaagataaagcccttaaggacaagatttgaaaaggctgtgggtgtcttcagccgccttgacagaatctcccgtgttgcttttggtggcccagccagtacgggattggtcttggccaacattgggagagaatccatgaaagcacaagcgtaccaaaccgggcaaggacatctcttacaaatttactatgccgagtcagaaagaaaacattttgaaattaatccccagacaccccgcttgatcagagacattgcttcgacgaattaaggaagatgaagatgataaaacagtttttggatcttgcttgtggttttggtttgaaaccggcaacggctcgggtcagggtatctttttacccagacacttaaagcatatggagattggaattggaaagaatgcttcgcctcagtttgaacatttgacccctgatgccaaaggtggaagaagagccccgaaggaagaacctgaagagacagcagaagacacaaccagaagacacagagccaagacgaagatggaagaaatggatgtggggaacagatgaaaaaggaagaaccagcaaagggaatctccagcttgaaaaagaatgaattgtaaattatactcctcacccatttggatccctgtgtggagaggggaatgtgaaaatttacatccatttcttttttgggagagactttgttttggatgcccacacataatcccccttctcccctgcactggtaaaatgtgggattatggggtcacaggaaaaagggggttttttaaattggaattttttttaccatccctcatgaatgtaaatttgtactatttaactgactattcttgatgtaaaatcttgtcatgtgtataaaaataaaaaagatcctaaataaaaaaaaaaaaaaaaaaaaaaaagtcgtatcgatgtcgagcga

SEQ ID NO: 8351 - DNA, 462 bp, Homo sapiens
  SIMILAR (370)..(462): 411254mologous to Homo sapiens JM12 protein,accession number AF207550,Smith-Waterman Score=45.
gcagtgtggtggaaatccaccattgttgctggcttatgaagatatgatgaaagagaaggacgagctcaatgccaccctcaaggaggaaatgagaatgtttaggatgcgagcccaagaagtggtgaaagaaaatgaagaattgcaccaagagttaaataagagtagtgctgttaccagtgaggaatggcgtcagcttcagactcaagcaaaactggttttagaggaaaacaagttgttgctggagcagttggagattcagcaaaggaaagccaaggacagccaccaggagcgcctccaagaagagctgcgggcctgggaggcgacatcactgcagtttctaagctgactaaacaactaatgctcctggaggcaaaaacccacggccaggaaaaggagctggcggagaacagggaacagctggagattttacgtgccaaatgccaagaactcaaaacacacttg

SEQ ID NO: 8352 - DNA, 432 bp, Homo sapiens; identical to SEQ ID NO: 6209
  SIMILAR (10)..(159): 561254mologous to Drosophila melanogaster rhophilin,accession number AF132025,Smith-Waterman Score=137.

SEQ ID NO: 8353 - DNA, 396 bp, Homo sapiens
  SIMILAR (213)..(52): 881254mologous to Homo sapiens monocyte/neutrophil elastase inhibitor,accession number AF053630,Smith-Waterman Score=234.
ctagaagaagtccgtgactgtcagcttggagaactggggtaatataatgtcaacctcttgctcagttttagctctggtccccagaaaaaccatggccatagcagatgaaatgctgaagggagagatgaagatgtttccagccggattgttctcactcaacgccaggaacaggtccaaggcgaagcgggtgtttgctgagctcagctgctccatggtgaaaaccaccagcagcaccacggacgccacactcgcgcagccacaatagagggcccagacgccaacaacatgcacgacaccaagacgacccataatgtagcacacatgagagcgcaaacacacagacaactgaccgcccaggcgaagagctgagaccaacaccccgccaataacgcgcat

SEQ ID NO: 8354 - DNA, 789 bp, Homo sapiens
  SIMILAR (445)..(612): 571254mologous to Mus musculus rhophilin,accession number U43194,Smith-Waterman Score=141.
atggctaacaaccgacatatgtcagtcaagctcacagttgagggttacagcagaactagccagcttaccaatggtgctgtccgctatccagctagctatctcatgcgcgacattcgcacgctaatagtcagttcatctgatcgcgcgagcaagggcgtacacaaggcagtaaagggcccaaatagcagccgcccggtggtagcacggtggcaggctctaaaccgccggggctatcgccggcacaatttttataacaatcacaaggtttttatgggcagccgcgtgctcgcaggctgcaggttacaattatatagtaccttcctgcaaacatattactctattagtccgcaaaatcggcgctatacgatggcagtagttaaccaaggcgtttgcggcaaggccttagatcggccggtggcggtggcgggtttacaccaaatcctgtatgactccctcactggggttctggtcagccagcagaacctgctgctggagaaggccagtgtcctgttcaacactggggccctctacacccagattgggaagtggcgctattggcagatgcaggctgggctgcagagtgccatagatgcctttcagagagctgcagggtgggaagaaggtctaccaaacagcttgcacgcagccatgagccaggcgctggttgaaagagaacatccccttacttccttgggccagctggggcctgcgttgaaaggcccaccactacacgggcgcttggcccacttactttcactggccatcctcctcattgaccaccagggttaa

SEQ ID NO: 8355 - DNA, 933 bp, Homo sapiens
  SIMILAR (10)..(384): 601254mologous to Mus musculus rhophilin,accession number U43194,Smith-Waterman Score=379.
acagtcgtcctcaaggattttatcctggaacattatagtgaagatggctatttatatgaagatgaaattgcagatcttatggatctgagacaagctcgtcggacgcctagccgggatgaggccggggtggaactgctgatgacatacttcatccagctgggctttgtcgagagtcgattcttcccgcccacacggcagatgggactcctgttcacctggtatgactctctcactggggttccggtcagccagcagaacctgctgctggagaaggccagtgtcctgttcaacactggggccctctacacccagattgggacccggtgcgatcggcagacgcaggctgggctggagagtgccatagatgcctttcagagagccgcagagccccacgcgcggcgggcgagcatctacttacgaaatgactcctgcggcctctccgaaatcccaggagcatccttgcagcgcgaggagaatggaccggggcctggactcatcagcagatctatccacagccagggaccactccctaaagcccgccgcaggcccagccctcacgctttctcttcgcaatggactttgcagcaaccacgtcggccattggctcagctcggccctcgaccaatcagagctaaggttacttccacaccggtcgttcttggcaaccagtggcataataagagtgccacatactccgtgggaatgcagaaaacgtactccatgatctgcttagccattgatgatgacgacaaaactgataaaaccaagaaaatctccaagaagctttccttcctgagttggggcaccaacaagaacagacagaagtcagccagcaccttgtgcctcccatcggtcggggctgcacggcctcaggtcaagaagaagctgccctcccctttcagccttctcaactcagacagttcttggtactaa

SEQ ID NO: 8356 - DNA, 389 bp, Homo sapiens
  SIMILAR (124)..(387): 721254mologous to Escherichia coli ORF 1 (AA 1-121),accession number V00279,Smith-Waterman Score=288.
ggcctgtatctgaaaggttgtgcattgctggaggacactcaccacaggtatgactccctcactggggttctggtcagccagcagaacctgctgctggagaaagccagtgtcctgttcaacactggggccctctacacccagattgggacgtggcgctattggcagatgcaggctgggctgcagagtgccatagatgcctttcagagagctgcagagatcccccaggttgttcctgcctctgaacttgctgccgccatgaagcagattaaagaactccagcgcctgctcggcaagaaaacgatggaaaatgaactcctcaaagaagccgttgaatatggacgggcaaaaaagtggatagcgcacgcgcccttattgcccggggatgggga

SEQ ID NO: 8357 - DNA, 545 bp, Homo sapiens
  SIMILAR (4)..(234): 451254mologous to Mus musculus rhophilin,accession number U43194,Smith-Waterman Score=152.
ttcactgcagaagaaggggacttgtggtttaccttgagagggaacgcccccgttcagggtcacttcctggatccttactgctctgcctcggaggcaggagcccgggaaggagattatattggctccattcagcttgtggattgtaagtggctgacgctgagtgaggttatgaagctgctgaagagctttggcgaggacgagatcgagatgaaagtcgtgagcctcctggactccacatcatccatgcataataagagtgccacatactccgtgggaatgcagaaaacgtactccatgatctgcttagccattgatgatgacgacaaaactgataaaaccaagaaaatctccaagaagctttccttcctgagttggggcaccaacaagaacagacagaagtcagccagcaccttgtgcctcccatcggtcggggctgcacggcctcaggtcaagaagaagctgccctcccctttcagccttctcaactcagacagttcttggtactaatgtgaggaaacaaacatgttcaggcccccgaacatttc

SEQ ID NO: 8358 - DNA, 846 bp, Homo sapiens
  SIMILAR (53)..(775): 271254mologous to Streptococcus pyogenes ML2.1,accession number X61276,Smith-Waterman Score=179.
cttgtcttcatacatgttttgttcttagagcttaaatattgaaggcctcccatccaagggccctataccaccctggttgttggatataaagtacctgtcaccattgttgctggcttatgaagatatgatgaaagagaaggacgagctcaatgccaccctcaaggaggaaatgagaatgtttaggatgcgagtccaagaagtggtgaaagaaaatgaagaattgcaccaagagttaaataagagtagtgctgttaccagtgaggaatggcgtcagcttcagactcaagcaaaactggttttagaggaaaacaagttgttgctggagcagttggagattcagcaaaggaaagccaaggacagccaccaggagcgcctccaagaagtttctaagctgactaaacaactaatgctcctggaggcaaaaacccacggccaggaaaaggagctggcggagaacagggaacagctggagattttacgtgccaaatgccaagaactcaaaacacactcggatggcaaaatcgcagtggaagttcataaatcaattgtgaatgaattaaaaagccaattacagaaggaagaagagaaagaaagggctgagatggaggagttgatggagaagctgacagtcctgcaagcgcagaagaagagcctgctgttagagaataacagtttgacagagcactacaaagcactgtgagccgaacttgaacgagcacagaaaatcaatatgatatctcataagaaaattgaggtcctcataaagcaggtggaaaaagccatggggaacgaaatgtctgctcatcagtacctggcaaaccttgttggcctggcagaaaatataac

SEQ ID NO: 8359 - DNA, 1338 bp, Homo sapiens
  SIMILAR (682)..(572): 371254mologous to Lycopersicon esculentum extensin (class II),accession number X55687,Smith-Waterman Score=62.
ttttttaacagtctttattgcctttattacggggaagaaggaagggaaggaggcaagaaacagaatggtccttagaaacattgtgccttggacagagcttttcttacatcaaattataataaataagaacctctcaagattggaaatcaattcaacagtaaaggcttaaaaatctgaaaagctgattttcacaatcggaaacgttacctcttccttggacaaatgcctgaattttgtctgatatcgactgagttctacattcaaacgatggacagtcattttcaatccatcattttcatccaccagttcttgagcttgttttcgcagataaagtaattcaggtgcagcaacttccctgtgacgacgccttctcagcctctttgagctttctcttctctttttccattcccttaagttttaactgtagttctttcattgcttgtttcattgtgtttagttcaagggtaaggctttgattcatattgtttaggtccatattttcttcttttaatgcctcaaacttttctctggttatttctgtatatctttgacgtgctctaccagttatatctggggagggtggaggtttctcacataatggaggtttttcatcctttaaattcagaacagggtgtttaccatctttttgttgtgtccgctgtggtgcaggaggggagcctggaaacccatcttgatgagaaatattttcatcgtcttcactgttcacctcatgtaacaatggcacctgatttctgtgtggcacagcgtacaggtcatcactgtggcctcctctgtcctcccgggcactgacatcccccaattccttgccgctggatgacagctgagtttcaatgtcctcttcgtccccatagtccagtgtttcaaaggatggcaaagaagatcttcttcccatctcactctgccaatttggccgaggcctcagctgtgaggtggtggcatagggctcgatgaagctgtcctgttcaacactgctcacatcactctcagaccgggacctctggcgaggctgaggaatagcaaccgtccgcccagtcaatgttgtcgccagaatggctgctgccagagcagatcttggtctctctggagatgggttggggctgcggggaggaggtgtgcgtggcacagctgccttcggagcaacgctggctgcaggtaaaaggccatggatgatgtgtttgaaatgactcctgcggcctctccgaaatcccaggagcatccttgcagcgcgaggagaatggaccggggcctggactcatcagcagatctatccacagccagggaccactccctaaagcccgccgcaggcccagcacgaaa

SEQ ID NO: 8360 - DNA, 3335 bp, Homo sapiens
  SIMILAR (1290)..(1730): 381254mologous to Mus musculus rhophilin,accession number U43194,Smith-Waterman Score=227.
atggctgcgctatggaatacctgtggagcttggaaaaacatgcttatacctgagtgccactctcagcttctgagagtggccgcaaacccaaaggtgcgggagcaagtgcggctggagctgagcttcgtcaactcagacctgcagatgctcaaggaagagctggaggggctgaacatctcagtgggcgtctatcagaacacagatgaagatggctatttatatgaagatgaaatcacagatcttatggatctgagacaagcttgtcggacgcccagccgggatgaggccagggtggaactgctgatgacatacttcatccagctgggctttgttgagaatcgattattcccacccacatggcagatgggattcctgttcacctggtatgactccctcactggggttctggtcagccagcagaacctgctgctggagaaggccagtgtcctgttcaacactggggtcctctacacccagattgggacccggcgctatcggcacacgcaggctgggctgcagagtgccatagatgcctttcagagagctgcaggggttttaaactacctgaaagagacatttacccataatccaagttacgatatgatccctgccatgctcagcgtgcttgtcaaaatgatgcttgcacaaacccaagaaagcgtgtttgagaaaatcagccttcctgggatctggaatgaattcttcatgctggtgaaggtggctcaggaggctgccaaggtgggagaggtctaccaacagctacacgcaagccatgagccaggcgccggtgaaagagaacatcccctactcctgggccagcttagcctgcgtgaaggcccaccactacgcggccctggcccactacttcacttgccatcctcctcatcgaccaccaggtgaagccaggcacggatctggaccaccaggagaagtgcctgtcccagctctacgaccacatgccagaggggctgacacccttggccacactgaagaatgatcagcagcgccgacagctggggaagtcccacttgcgcagagccatggctcatcacgaggagtcggtgcgggaggccagcctctgcaagaagctgcggagcattgaggtgctacagaaggtgctgtgtgccgcacaggaacgctcccggctcacgtacgcccagcaccaggaggaggatgacctgctgaacctgatcgacgcccccagtgttgttgctaaaactgagcaagaggttgacattatattgccccagttctccaagctgacagtcacggacttcttccagaagctgggccccttatctgtgttttcggctaacaagcggtggacgcctcctcgaagcatccgcttcactgcagaagaaggggacttggggttcaccttgagagggaacgcccccgttcaggttcacttcctggatccttactgctctgcctcggtggcaggagcccgggaaggagattatattgtctccattcagcttgtggattgtaagtggctgacgctgagtgaggttatgaagctgctgaagagctttggcgaggacgagatcgagatgaaagtcgtgagcctcctggactccacatcatccatgcctcgccagaggtcccggtctgagagtgatgtgagcagtgttgaacaggacagcttcatcgagccctatgccaccacctcacagctgaggcctcggccaaattggcagagtgagatgggaagaagatcttctttgccatcctttgaaacactggactatggggacgaagaggacattgaaactcagctgtcatccagcggcaaggaattgggggatgtcagtgcccgggaggacagaggaggccacagtgatgacctgtacgctgtgccacacagaaatcaggatgaaaaacctccattatgtgagaaacctccaccctccccagatataactggtagagcacgtcaaagatatacagaaataaccagagaaaagtttgaggcattaaaagaagaaaatatggacctaaacaatatgaatcaaagccttacccttgaactaaacacaatgaaacaagcaatgaaagaactacagttaaaacttaagggaatggaaaaagagaagagaaagctcaaagaggctgagaaggcgtcgtcacaggaagttgctgcacctgaattactttatctgcgaaaacaagctcaagaactggtggatgaaaatgatggattgaaaatgactgtccatcgtttgaatgtagaactcagtcgatatcagacaaaattcaggcatttgtccaaggaagagttggatataaagtacctgtcaccattgttgctggcttatgaagatatgatgaaagagaaggacgagctcaatgccaccctcaaggaggaaatgagaatgtttaggatgcgagtccaagaagtggtgaaagaaaatgaagaattgcaccaagagttaaataagagtagtgctgttaccagagggtctctgggctctggagcatcacacttggtgggcagaccttgccgctctcggtacctgcacacctgcacggctgctaaacctgcatgcagcactcggcgtcagcttcagactcaagcaaaactggttttagaggaaaacaagttgttgctggagcagttggagattcagcaaaggaaagccaaggacagccaccaggagcgcctccaagaagtttctaagctgactaaacaactaatgctcctggaggcaaaaacccacggccaggaaaaggagctggcggagaacagggaacagctggagattttacgtgccaaatgccaagaactcaaaacacactcggatggcaaaatcgcagtggaagttcataaatcaattgtgaatgaattaaaaaggaagaggaactactggtacttggtgtgtactgtgtcagttgagggattttctgccctggtggttccctgtgcaggcatctccctggctgctgagcaggcctctgtgtatatagataaggtgcatgcaatgacattcccccggtgtgagcgctggttcagcagctgctttgctgataaatcaaaggaagaagagaaagaaagggctgagatggaggagttgatggagaagctgacagtcctgcaagcgcagaagaagagcctgctgttagagaagaacagtttgacagagcaaaacaaagcactggaagccgaacttgaacgagcacagaaaatcaataggaaatctcaaaagaaaattgaggtcctcaaaaagcaggtggaaaaagccatggggaacgaaatgtctgctcatcagtacctggcaaaccttgttggcctggcagaaaacataacccaggaacgtgacagtcttatgtgtttg

SEQ ID NO: 8361 - DNA, 1798 bp, Homo sapiens
  SIMILAR (1)..(660): 961254mologous to Escherichia coli similar to E. coli yeiG,accession number U73857,Smith-Waterman Score=1125.
atgtatcggcattattcccaatcactgaaatgtgaaatgaatgtcggcgtctatctcccaccaaaagccgcgaatgaaaaattgccggtgctgtactggctttcaggcctgacctgcaacgagcagaatttcattactaaatcggggatgcagcgttacgcggctgagcacaacattattgttgttgcgccggacaccagtccgcgaggcagtcatgtcgcagatgctgaccgttacgatctcgggcaaggtgccgggttttacctgaacgcgacgcaagcgccgtggaatgaacattacaaaatgtatgactatatccgcaacgagctgccggatttagtgatgcatcattttccggcaacggccaaaaagtctatctctggtcattctatgggcgggctgggcgcgctggtgctggcgttacgtaacccagatgaatatgtcagcgtctcggcgttttcgcccattgtctccccatcgcaagtgccgtggggacagcaagcctttgctgcatatcttgctgaaaataaagatgcctggttggattacgacccggtgagtcttatttcacaaggtcaacgcgttgcggaaatcatggttgatcaggggttgagtgatgatttttacgcagacagctgcgactccaaatctgaaaagattggcctcagtgagaacggtttgtccctggatgccgtgttgggtttggttcggtgcttctccactctgcagtggctcttccgcttggacatcagtacctggatcgacgttgatgtacggatccagtttcatgatggtcacattgaggccacgggcttcaagaatggctgcgagggaggctgcggcaatgcctttacccagagaggatacgaccccgccggtcacaaaaatatagttcgttgtcatgctgaacctgagaacctaccattcagccatctgggcccaggtggggccctgagcctggcccaggccctggatggatccccccatttggaagagatcagcttggcggaaaacaacctggctggaggggtcctgcgtttctgtatggagctcccgctgctcagacagatagactgtttccgtagattgcaccagatgcaagtctgggaggaggaccagatggggtccagtacttactgttttacagacatagaaaccgaggctccattctcagccatcttcttcccttatgccccagtttttaattctcatgacattccagagggagtgtccgttggaacaccaccagagacaccacacttgccactcatgaagtgctccctacttgcagaacgtctgctccctgttccccagttccagcctcccagccgccctacttctgtgttgacctgccagggtgtagagcccacgaggacagggatcacctgcagcaagcctccctcgccatgtggaactggtgttttgaagcctgtggaccttaatggtgtcatcaaactttttgaagagactgctaaagaaggcttagaagaaaagcaacttaaatctgtcaagaaactgggagcgggtcagggtcttccctgggacttcatgcacaggtctttcctgggacttcatgtaggaccagccatcccgtcagtgctcagtgaacatgagctgcttccctgtgggatgtctgggaggctgtcctggaatctcctcggggatgaggcagctgccgagctggcccaggtgctgccgcagatgggccggctgaagagagtggagtatgaggggccgggggaggaatgggacgggctaaagggggacctacatcccgggaacaccaagaggccactgg

SEQ ID NO: 8362 - DNA, 1407 bp, Homo sapiens
  SIMILAR (217)..(735): 611254mologous to Homo sapiens Human secreted protein sequence encoded by gene 33 SEQ ID NO:154,accession number Y91433,Smith-Waterman Score=500.
atgcccgggcggctcggagcgcgggcagcggcagccgtgcgggtgcaggagccgtgggcggacagagccagggttctctccctgttagaagtctgcgcccaggcctcaggcagtgtcactgaaatcagcatctccgagacccagcagcagctctgtgtccagctggaatttcctcgccaggaagagaatccagaagctgtggcactcagaatatccttggaccttttcagcttgtctcaggttaacctctgtgaggacgatgatgccagttccctgctgctgcagagcctcctgctgtccctctctgagctgaagacatttcggctgacctccagctgtgtgagcaccgagggcctcgcccacctggcatctggtctgggccactgccaccacttggaggagctggacttgtctaacaatcaatttgatgaggagggcaccaaggcgctgatgagggcccttgaggggaaatggatgctaaagaggctggacctgcagcacaaaactgtgatcttcatgtttgcccaggagccagaggagcagaaggggccccaggagagggctgcatttcttgacagcctcatgctccagatgccctctgagctgcctctgagctcccgaaggatgagcttctcaggcaatgctctgggggatgaaggtgcagcccggctggctcagctgctcccagggctgggagctctgcagtccttgaacctcagtgagaacggtttgtccctggatgccgtgttgggtttggttcggtgcttctccactctgcagtggctcttccgcttggacatcagatatgcaccttacaatgtcctttggcatcacaatgagccctgcaagtcagcaaagttattactgctcatttattcagatgaaaatgaaataatccttactgcagatgccaacttttgcccccaatataaaaccccaaaaaggcctccctcgccatgtggaactggtgttttgaagcctgtggaccttaatggtgtcatcaaactttttgaagagactgctaaagaaggcttagaagaaaagcaacttaaatctgtcaagaaactggcacaaccaccaaaggagcatattccaggttaccagcaagtgagttcatcatacaagattcaaatggctgaagttggaggattggcaaaaacaatggcccagttaatgaccttgcttgaaaatcaacttgttgagaaactttgggtacttaaaattctgcagcatctctcgacttctgaagttaattgtactgtaatgatgaaagcacaagcagccaaaggaatctgtgctcacctcaatgactcagatttctctggacagcttttatttccttcatcagaaacactttggaacttatcagaaaaaatcttcaaaataagaaattgttcaacagcttag

SEQ ID NO: 8363 - DNA, 439 bp, Homo sapiens
  SIMILAR (53)..(220): 421254mologous to Homo sapiens c316G12.2 (novel protein similar to predicted yeast, worm and archae-bacterial proteins),accession number AL031709,Smith-Waterman Score=63.
gcggccgccctcggcacctcctgttgcgctccctggaggccttcgccgaggaggtcggcgccgcgctgcaggcttccgtggagccaggggcggctgacggcgagggcggcccgggcccggcggcgctgccctgcacgctggccatgtgggagttgggccactgcgacccccggcgctgcacgggccgcaagctggcccgcctggggctggtgcgctgcctgcgcctgggccacagattcggcggtctggtgctgagccacttgcgcctgttgccctacctggtggccgccaaccccgtgaactatggccggccctacagactttcctgcgtggaagcgtttgctgccaccttctgcatcgtaggctttccagaccttgctgtcattttgctgcggaagtttaaatggggcaagggcttcttggacctgaaccgtcagct

SEQ ID NO: 8364 - DNA, 5569 bp, Homo sapiens
  SIMILAR (1)..(3591): 941254mologous to Homo sapiens BAI-associated protein 3,accession number AB017111,Smith-Waterman Score=5755.
  misc_feature (1)...(5569): n = a,t,c or g
atgagaccccggggagcagcgtttgcagcgggcccgccaggtgacctgcacctgggcaccgccatcggcttcgcaggggccatctggaggagtcggtcacccgccatgtcgaccttgctggacattaagagcagcgtgctcaggcaggtgcaggtgtgcccgtccttccgccgcaggactgagcaggacccagggagtgccagcgccgacccgcaggagcctgccacgggggcctggaaacccggggatggcgtggagttctttgcccacatgcgcctcatgctgaagaagggggaaggcagacagggcttgccgtgcctcgaggtccccctgcgcagtggctcgccagcacccccggagcctgtggatcccagcctcggcctgagagccctggccccagaggaggtggagatgctctacgaggaggccctgtacacggtgctttaccgcgcgggtaccatgggccctgaccaggtggacgacgaggaggccctgctcagctatctccagcaggtgtttggcaccagccttgaggagcacactgaggccatcgagcgagtgaggaaggccaaggcccccacgtatgccctgaaagtctctgtcatgcgtgccaagaaccttctggccaaggaccccaacggcttcagcgacccatactgcatgctgggcatcctgcctgcctcggacgccacgcgggagccccgtgcacagaaggagcagcgcttcggcttccgcaagggcagcaagcgcggtggacccctgcctgccaagtgcatccaggtcaccgaggtgaagagcagcaccctgaaccccgtctggaaggagcacttcctcttcgagattgaggatgtgagcacggaccagctgcacctggacatctgggatcatgacgacgatgtatccctggtagaagcgtgcaggaagctgaatgaagtcatcggcctgaagggcatgggcaggtacttcaaacagatcgtcaagtcagcccgcgcaaacgggacagcaggacccaccgaggaccacaccgatgacttcctggggtgcctcaacatacctgtccgggaggtgcctgtggctggcgtcgaccgctggttcaagctggagccacgctccagtgcctcgcgtgtgcagggacactgccacctggttctcaagctgatcactacgcagagggatacggccatgagccagcgcgggcgatccggcttcctgtcccacctgctgctgctcagccatctgctgcggttggagcactcagcagaggagcccaactccagcagctggcgaggagagctcagcacaccagccgccaccatcctctgcctgcacggagcccagagcaacctgtcacccttgcagctggccgtgctgcactggcaggtcagcagccgccaccatcaaacctgcacgctggactacagctacctgctggggctgctggaggacatgcaggcacactgggaagaggctccttcactgccccaggagcaggaggagagcctggctgatagcctttccgccttctctgagttcgggctgcagctgctgcgccagctccgagactacttccctgccaccaacagcaccgctgtccaccgcctggagctgctgctgaagtgggtgcagcgccgcgtgtcagcgtgtctgggcaagctgcagctcttccaaccctcctttgagatctgccccttcgagtcggagctgaacatggacattgctgcggccctgaagagaggcaaccgtgagtggtacgacaggatcctgaatgccaagagtccccgagagcagccaggaccacagcgcctgcctgggctggttgtgctggctgacgccgtctatgatgaccttcagttctgctacagtgtgtacgccagcctcttccacagcatcctcaatgtggacgtcttcaccctgaccttccggcagctggagcgtctggtggctgaggaggcgtgggtgctgacggaggagctgagccccaagatgaccctggaggtggcctcggggctctttgagctctacctgaccctggctgacctccagcgcttctgggatagcatccctggccgggacagccgctctctggccctggctggcatccacgcccccttcctgcctgctgtgaagctctggttccaagtgctgagggaccaggccaagtggaggcttcagggagccgtggacatggacacgctggagcccgtggacgcctcctccaggcacagcagctccgcagccactgctggtctctgcctcagccacatccaggagttgtgggtgcgcctggcgtggcctgaccctgcccaggctcaggggctgggcacccagcttggccaggacgtgtgtgaggccaccctcttctatacggagctgcttcggaagaaggtggacactcagccaggggcggccggtgaagcagtgagcgaggcgctctgcgtggtcctcaacaatgtggagctcgtgcgcaaggctgctgggcaggccttgaagggcctggcatggccagagggggccacggggcccgagggggtgctcccccgccctctgctcagctgcacacaggccctggacgatgatctgcaacgggaggcccacacggtgacagcgcacctgacctctaagatggtgggcgacatccgcaagtatgtacagcacatcagtctctcgcctgactccatccagaacgatgaggccgtggccccgctcatgaagtacctggatgagaagctggccctgctgaacgcctcgctggtgaaggggaacctgagcagggtgctggaggccctgtggaggctactcctccaggccattctgcaggcgctgggtgcaaaccgtgacgtctctgctgatttctacagccgcttccatttcacgctggaggccctggtcagttttttccacgcagagggtcagggtttgcccctggagagcctgagggatggaagctacaagaggctgaaggaggagctgcggctgcacaaatgttccacccgcgagtgcatcgagcagttctacctgggacaagctcaaacagaggaccctgggagcagaaccggttttgaacgcctgagcgtccgttgccattacgaggcggctgagcagcggctggccgtggaggtgctgcacgccgcggacctgctccccctggacgccaacggcttaagtgacccctttgtgatcgtggagctgggcccaccgcatctctttccactggtccgcagccagaggacccaggtgaagacccggacgctgcaccctgtatacgacgaactcttctacttttccgtgcctgccgaggcgtgccgccgccgcgcggcctgtgtgttgttcaccgtcatggaccacgactggctgtccaccaacgacttcgctggggaggcggccctcggcctagggtggcgtcactggtgtcgcccggccccaggtgggcgggggtgcaagggctgggcagcctgtcaccctgcacctgtgccggcccagagcccaggtaagatctgcgctgaggaggctaggaaggccgcaccagcaaggaggcgcaggagttcgtgaagaaactcaaggagcttggagaagtgcatggaggcggacccctgagtccatcagctgccagccccggccctggcccccaccccaagttccctgaagcatcctccagctcactgtggccagctttgtgcaaccagggcccacggcgccccttcctgttgctgtgacgtgtgtgttcgtggctgggccccgcggcgccttaccgccctgggccgtgtattgtctggtgtgtgctgtgaacccctgcacccaaccccacatctgggtggccaacttggcaggacttggccagcagctggcccaggacacagtgcaggccagagcggggcttgaccacctggtgggcctccctgcccgcttccttgggctccccggccctgggtgggcggtgggcagctggtctccagggactcagtgagtggctgtgctctctgcacaacgggcaatgtgcagacgcatttttggtaatcacagctggggagtgaaaagggtgccactggcaccactgggtggatggtccagagcctccacccacagaggggatgcaaagggcaggtgagtcaagaaccgcataggtctccagtccccacggggctcccaggccggggaaaggttcccccttgaggtcaacttctgagggccagggacgtcaacccaaaggcttggtggtcaagtgtgaaagggctccgtgcccaaactggtcaagctgtcctttcacgcacatatccgtggcccaccctgaaacctgctcccacgaacccttcccaggcagagtccgagagttcgccccaacccttccccaggcccagtgtgaaaaacagactcacaaggggcttacttggcctgcagcttcatttgcgagagtcgccgaggcaggacacatgagcacagctgtgctgtgaagtgtggggagaacccggacagctcagtcctgccagcagccgcaaagagccgaggctgccaaggcccatttatgtccctcatgtctctagatttttctcgtcacccagcctcaaaaatatatgtgtctgcaaccctcagtctctctgccgtttcttgatttcttttccaaacctcagccgggggccctggcttcagccccccgtccctgcgtctgcttcctcttcacagcagctgctgctgggcttcctccgcgctcggngcaagggccctgggtccttcagacgcatgcactgtcattcagtgttccgagggcagccggggtgctgggccacaggcctgttggggtttccaaactctctccctgaatccacatcgaaggaatcgatctcctcctccctgggggctctccttggccattggccaagaacttccttgctccgcctgcagcacctcctcccggggctgccgcagagacgcgtactttgtccagggagcctgcgggttcaggtccaagaagcccttgcccccatttaaaacttccgcagcagaaatgacagcaaggtctggaaagcctacgatggcagaaggtggcaagcaaaacgctttccacgcaaggaaagtctgtagggcccggccaattagttcacggggtttggcggccacccaggttagggcaaacaggcgcaaagtggctcccctcgcatctttcccaaaacggtgtctcgtccagccttggcccaggagcagtcgatgacggcgacccccagactgcggccaccagctgtctgtctgcgggggacgcgtactgccttgcccacagggctcagcaccagcccccccgaatctgtggcccaggcgcaggcagcgcaccagccccaggcgggccagcttgcggcccgtgcagcgccgggggtcgcagtggcccaactcccacatggccagcgtgcagggcagcgccgccgggcccgggccgccctcgccgtcagccgcccctggctccacggaagcctgcagcgcggcgccgacctcctcggcgaagaacctccagggagcgcgtcgggaggtgccgagggcggccgccttccgcccccggcccgcgcgctgccctcctgcggcccat

SEQ ID NO: 8365 - DNA, 3447 bp, Homo sapiens
  SIMILAR (41)..(232): 501254mologous to Homo sapiens Human secreted protein cw976_1,accession number W69430,Smith-Waterman Score=110.
atgcccagcattcagacctttgcctggccatggctgtccaaccccagtcccaacggcagccggagggtctggggacaggagcctggaggggcactgggggccctaatggctgccctggatgactaccgtggccagtttctgagctgcagggcctggagcaggagcagagacaaggtcgactcgcagccgggcctccagtctcagcatcactgtggagcatgccttgagagcttcagcttcctcaatgaagacgaagatgaagacaatgatgttccggggacagaaactgggcacatttggcccctgcgctgccaggaggcatgggccctggagcggctgctgcgggaacccgagtactggaggcagtatgcgagttcagcaggcggtgggagatcccgccagctctgcccaggaagtgcacgagagactcagctgcttcctctgcccggtggagcgggtgcttctcacctctgcaaccagtatggtgcccgcctctccctgcgccagccaggcttggctaggctggtgagtgggctgcttcctccttccacccttgctcagattcccatgacaggaagctcggggaagccagtgtgtgtgaagttcctggaggatgccctggggcaaagctgcccagaaggccccagccagggcctggagagcagctcacagtctccagttctggagttttgtggaaaccttggacagccccaccatggaggccacgtgactgagaccgctgaggagggccctcctgtgttcctggaccagctggaggatgaggacgctcccgagggcattgagcccttggtgtacctctgccaaactgacacagaagctgtgagggaagctgccggcaaagcctacagcagtgtggtacccccagcttgccgcaggaagggaatgggctcagtgcccgcgtggacgagggcgtggggaattcttctccaaaaggctgatccagcaggatcgcctgagccgacctcctacacaagagatagcaaggcctactcgatgatactgctgcctgccgagaggaggcaacgctgggtgccagacccgacaagacccttcctgcagacctggcccagggagccaggggctgagtctgccacctggaagacactggggcagcagttgaatgcggagctcggagccgtggttggggccaacaggatggtccaggccctccctcccctggcaaagcccaagtccctgcagaaccagcccctccccagacagcctgggcccccagaggacccttgcttgggccccagaaatgaagtacctgacggcggcgagcgcgtcaatcccaccaccccgggcctccgcctcggtctccgggccctgaagggggctcacctcaagcagctgcccggctcgtggactggagggtgtctcgaccccagaatcagctcccgaatccagggccgtaggaccagcctccccgacctgccatccccacggctacacccagcggatgcaacgggcccgggtttccgcgggcgcccaggccccgcctttcctcggaagaggaagctccttcgcgggcggggccggaggaggaggccccgcccacgtacaccccgcgcctgcgacgagggcgtcctgctcgggggcctgtgtgcagactcccgctggtccacccgctgtttgacccgagttccgacgcttcgcgctgcctcgcgcttcggtgagcggcttccagagttctcgcggttgctgcgggcggtgcaccagatcccgggcctggacggctacttggctatacggatgctcatggcgacctgctgcccctcaccaacacgacagcctgcaccgggccctggccagcgggcccccgccactgcgcctctggtgcagaagcgggcagaagctgactccagcgcctggcttttgcctccaactctctgcagcggcgcaagaaagggctcttgtgcggccagtggcacccctgcgcacccggccacccttgctaatcagcctccccaagatttccgccaggtttcctcagtcatagacgtggacctactgctgagacccaccgacgggtgcggctgcacaagcatggttcagaccgcccctgggcttctacatccgagatggcatgagcgtgcgtgtggctccccagggctggagcgggttccaggaatcttcatctcccgcctgcctgtggcgatcctcagcatggagctccttgccactgtcccccaaaggggccagtcgtccatcttcacgaagactttgggccgagaaaagatcttgatggctcctctacctgcaccagcttccggtccagctcagcacggtggctctggctctcagtccctgcgctccaacaagctgtggtacacaggctcagagttgatgacccgagggcagagaactcagatcagggtacagttgcctgttggccaacaaatggataatacttctggctccctgaagcaggtacctggagctgggccttacccgggactccaccttgtcgtacttggaaagagctccctgacctctccaactaccttagaccctacacacacttccctcatcaccgtgttcccttcctcatgtagttgggacaaacattcctatggttaccaggtgatgatgggcattcgttctgctcctcggggactggccagccctatgtcccacattcaccacaggagacgtgatcggctgctgtgtcaacctcatcatggcacctgcttctacaccaagaatggccacagccttggtatagcctcacagacctcccggccaacctctaccccccgtaggcctgcagacacctggggagattgtggacgccaactttgggcacagcccttcctgtttgacattgaggactacatgcgggagtggcgtgccagagatccagaagctggtgctggagggcctgtgggcgaggccatcgagaccacccagcgcttctacccagggctgctgagcacaaccccaacctcctcttcatgctcaagagcagacagtcccactgtagcaatggcgtcgcgtccaccaagagcaaacagaaccacagtaaaaccctgcacccagctcctcatcctcgtcctcctcctcctcctcgtcctctccccatcctccgtcaattactccgagtccaactcaacagactccaccagtcccagcaccacagcagtaccagtaaccaggagaccagcaacccatggctacagcttgaaaggaggcccaccaggctgctccaaccacaccccctgggccaactcccacctcaacccctcccacagcgacagtgagatggagatggaggcagagcactaccccaacggagtcccagaacctgccaaagcagccccctctgatgctcgcctgggccaggcatctgagtgtctccggctcatggcccgagcaggcctggttcttgctcctttgccagagttgatgactacttgcactagctga

SEQ ID NO: 8366 - DNA, 763 bp, Homo sapiens
  SIMILAR (444)..(596): 411254mologous to Mus musculus proline-rich protein,accession number M12099,Smith-Waterman Score=74.
tcacagtttcttcctaaaacgtagctggtaccgccatttgttcatttgcaccaggacgcaggcaaacaccctgccacacacgagaaccacaggacggcagaccgagagcgcgcctgacagcttggacccgagcacagagggacgtgcagggtggctcatactcatactggaaggcagaaccatcacgatgcctctttgggggttctcaaggcatcatagagctttttctgaacatctaagtcttggttgcgcgccgccctcagcgacctggacatgaacccgcagtcctgcagcagcagcagccggccctctgtcccgcggaagccgaatccttctcctccctcgcgctctcctgccggactccgacctccaggccgcgcggggcctctcaccagtccgaggtgtccaggccttcccgcgttcacagggcatcggacactgtgggtcccgtcagacccaaagcagcggggccccgacgtcgtacgtatcaggggcgtgggatgggcccgcgaccgcggcctcggcgtcctgtagtacctgtcggcggcgagcggagtcattcccacccctccgggcctccgcttcggtctccgggccctgaatgggggctcacctcaagcagctgcccggctcgtggactggagggtgtctctgcccccagaatcagctcccgaatccagggccgtaggaccagcctccccgaacctgccatccccacggctacacccaacggatacatcgggtccgggtttcccgcgggcgc

SEQ ID NO: 8367 - DNA, 940 bp, Homo sapiens
  SIMILAR (29)..(538): 301254mologous to Homo sapiens NKp44RG2,accession number AJ010100,Smith-Waterman Score=152.
accttattcaataagtattgtctccacaggcccctctgctgacagtgtatacacaaaagtgaggctccttgaaggggagactctgtctgtgcagtgctcctataagggctacaaaaaccgcgtggagggcaaggtttggtgcaaaatcaggaagaagaagtgtgagcctggctttgcccgagtctgggtgaaagggccccgctacttgctgcaggacgatgcccaggccaaggtggtcaacatcaccatggtggccctcaagctccaggactcaggccgatactggtgcatgcgcaacacctctgggatcctgtaccccttgatgggcttccagctggatgtgtctccagctccccaaactgagaggaacattcctttcacacatctggacaacatcctcaagagtggaactgtcacaactggccaagcccctacctcaggccctgatgccccttttaccactggtgtgatggtgttcaccccaggactcatcaccttgcctaggctcttagcctccaccagacctgcctccaagacaggctacagcttcactgctaccagcaccaccagccagggacccaggaggaccatggggtcccagacagtgaccgcgtctcccagcaatgccagggactcctctgctggcccagaatccatctccactaagtctggggacctcagcaccagatcgcccaccacagggctctgcctcaccagcagatctctcctcaacagactaccctccatgccctccatcaggcaccaggatgtttactccactgtgcttggggtggtgctgaccctcctggtgctgatgctgatcatggtctatgggttttggaagaagagacacatggcaagctacagcatgtgcagcgatccttctacacgtgacccacctggaagaccagagccctatgtggaagtctacttgatctga

SEQ ID NO: 8368 - DNA, 396 bp, Homo sapiens
  SIMILAR (206)..(355): 941254mologous to Homo sapiens leucyl tRNA synthetase,accession number D84223,Smith-Waterman Score=242.
ttcggcacgaggatgaagaaagtcatgccatttgttgccatgattaaggaaaatctggagaagatggggcctcgtattctggatttgcaattagaatttgatgaaaaggctgtgcttatggagaatatagtctatctgactaattcgcttgagctagaacacatagaagtcaagtttgcctccgaagcagaagataaaatcagggaagactgctgtcctgggaaaggagtacaccgagaagacccccatttctgagcatgctgttttcaatgtggacctcatgagcaagaaaattcatctgactgagaatgggataagggtggatattggcgatacaataatctatctggttcattaaactcatgcacattggagatttaaaaaaaaaaaaaaaaa

SEQ ID NO: 8369 - DNA, 2625 bp, Homo sapiens
  SIMILAR (9)..(233): 921254mologous to Homo sapiens leucyl tRNA synthetase,accession number D84223,Smith-Waterman Score=343.
atgccttgcactgcgcaattcggcacgaggacaaatggcctacagctgtgagagcaaatggacatctcctcctgaactctgagaagatgtcaaaatccacaggcaacttcctcactttgacccaagctattgacaaattttcagcagatggaatgcgtttggctctggctgatgctggtgacactgtagaagatgccaactttgtggaagccatggcagatgcaggtattcttccgtctgtacacctgggtagagtgggtgaaagaaatggttgccaactgggacagcctaagaagtggtcctgccagcactttcaatgatagagtttttgccagtgaattgaatgcaggaattataaaaacagatcaaaactatgaaaagatgatgtttaaagaagctttgaaaacagggttttttgagtttcaggccgcaaaagataagtaccgtgaattggctgtgggaagggatgcacagagaacttgtgttccggtttattgaagttcagacacttctcctcgctccattctgtccacatttgtgtgaggcacatctgggacactcctggggaaagcctggacttcaattatggaattgctttccatgggcctgtggcagggtccctgtttaatggaagtttttaatacactcctcacagtatcttatggaagtaacacatgaccttagactacgactcaagaactatatgatgccagctaaagggaagaagactgacaaacaacccctgcagaagccctcacattgcaccatctatgtgggcaaaggaactatccaccttgggcaacattaccaccctgtctgtttcttacggtaaaacactttgagggccaattaacgggaaaaactggcctggacaacaaagtccattgctagtgaactaggcagtatgccagaactgaagaaatacatgaagaaagtcatgccatttgttgccatgattaaggaaaatctggagaagatggggcctcgtattctggatttgcaattagaatttgatgaaaaggctgtgcttatggagaatatagtctatctgactaattcgcttgagctagaacacatagaagtcaagtttgcctccgaagcagaagataaaatcagggaagactgctgtcctgggaaaccacttaatgtttttagaatagaacctggtgtgtcccgtttcctcctggtgaatccccccagcccatcccaatggcccacttcctcaacccaaaattggaaatcaggcaaggagataactgtgattcccataatcaggcgtttaatgaaaatgaatcgaggaatttaaagaccctttcccaaagtgaaacctggatggaggatttgatgatcccactgttggggccctcgacggagttcctgtccctgggaaaaggagtacacccgagaagaccccccatttcctgaagcatgcctgttttcaatgtggacctcatgagcaagaaaattcatctgactgagaatgggataagggtggatattggcgatacaataaatctatctggttcattaaactcatgcacattggagatttatcctggtttcttaggaatactactactctgattgtgtctactgattggctatcagaaccttaggctggacctaaatagattgatttcatttctaaccatccaattctgcatgtattcataattctatcaagtcatctttgattcctgggacctaataaattttttttccctttctttgggtgtccaagagaaatggtttttgccaaactctttttaaaaaacaaattgttgctatttcctagaagtttctggtttttaagatgaacataaaagtgtcagtatgcttcttttatgaggtgtactttatactttgatgaaggctaaggtgtacctaacagctttttatagtatattcatttatggagttagctgtattttttttaaaaaaagaaaagtagtaaattagcagcttttttttttaaatgaagagaacttcatgatgatttaaaaggactaatgagaagtagtttgacttgacttcaattactaagccgatttgtataaggaacaaatacctcctgcattttatacgactttttaaagctttaattattcaactaagaaccaataatggcttcttcaaggctaatatcaatagtttataagcagtatatttcacctacactaaatatggggcattttaaaagaagattccccccttcccccccggaaatctgcatttactaaatttgtcttaagtccagttgtgtttaaaggtcatgcttggtcggggtgtggtgcttcacacctatttaatcccagcactttgggaggccattgttgggcagtcacctgaggtcaggagtttgagaccagcctgaccaacatggtgaaaccccgtctctactaaaaatacaaaaattagcttggcatggtggcgggtacctgtaatcccagctgcttgggagtgtgaggcaggagaatcgcttgaacctgggagaccgaggttgcagtgagctgaaaccgtgccattgcactccagcttaggcaacaagagtgaaactctgtctcaatcaatccatcaatcaatcaataaaatagaggtcatgctgactattaaaaaaaaaaaaaa

SEQ ID NO: 8370 - DNA, 2180 bp, Homo sapiens
  SIMILAR (201)..(578): 571254mologous to Homo sapiens DNA-directed RNA polymerase I, largest subunit,accession number U33460,Smith-Waterman Score=301.
  misc_feature (1)...(2180): n = a,t,c or g
atgatcaagaatattgggccacagtatttgacaccgtcgttcttgggagagcaggagggtgatgaggaagaggaggggcacattgtggatgctgaagctgaggagggggacgccgatgcctctgatgccaaacgcaaggagaagcaggaggaggaggttgattatgagagtgaggaagaggaggagagggagggcgaggagaacgacgatgaagacatgcaggaggaacgaaatccccacaggagaggtgctcgaaagacccaagagcaagatgaagaggtgggcttaggcactgaggaggacccgtcccttcccgccctcctgacgcagccccggaaacccacccacagccaggagccccaggggcccgaggcagtggagcgccgggtccaggctgtgcgtgagatccacccgttcatagatgactaccagtacgaccaccgaggagagccttgtggggccaggtgacagtgaagctccctctgatgaagatcaactttgacatgagctccctggtagtatctttggcccatggtgccgtcatctatgcgaccaagggcatcactcggtgcctcctggaatgaaacaaccaacaattaagaacgagaaggagcttgtgctaaacacagaaggaatcaacctcccagagctattcaagtatgcagaggttctggatctgcgccgcctctactccaacgacatccacgccatagccaacacgtatggcattgaggccgcgctgcgggtgatcgagaaggagatcaaggatgtgtttgccgtgtatggcatcgcggtcgaccctcgccatctctccctggttgctgattatatgtgcttcgagggtgtttacaagccactgaatcgctttgggatccaggtcaaactcttccccgctacagcagatgacatttgaaaccagcttccagtttctgaagcaagccaccatgctgggatcccacgatgagctgaggtctccttctgcctgccttgtggtcgggaaggtcgtcaggggcgggacaggcctgttcagagctcaagcagcctctgagatagcagctaccccggcaccatctgcccagctccaaggacccttggtgagggcgtggcccagcctgccttctgcatgagaggaccaggagactggaatccagggcagttccaagtgacagtacagagcacagcagcgaccttgggcctgaaagcagtgggcctctgagctgggccagcttcacctggaaagtgacagagttgctcatccttgcccctccctgtctctggatttttatcaaggtttaccaagtcttctgagtccccctgagatggctggggcttcacctgtgctgcaggaggcctctgtggcataacccctaaggagaagtcctgattcacgattcactgagaagaccaaaggggaagccatgctttgctgctggggaccccaggcacctccagagtagggaagcggggttcttttgctgtgagtggccagggacaacagacaagattcctgggggctcccgatgagcaggaacgtggagcctgctgcccaaggcctgctccttccggctgctccagcccctgggggcagagtccacaaagaagtccccatcaagacttcttccctgagtcaaagtacagcgtagcatagtcctccacccacccaacctctctgcctggccagggtccctggccccttccactgtgtggccgaggtgtccttctagaccacatcagcccccaaggctgggagcagtcgctcccagggccgcagcagttcactcccccacacatagaacccaggtcaactgctggggccganttgaaacagggttgccctggcttttctctgcttgtcagtttggtgtggaggcctatgttctgccccaatacaccccaacaggcccttgcttatgggaaggaacaccaggcctccagcccagaggactgtgccgccctgttcttggccgtccacgtttcctctccctctagcaccagcaatacatttccctgggcatgggacagaaaaagacagagaggacttgtacaaaggcttttgtaaaaaccagaggttagcttcttatcttttgtcttattgttatttcaagctcagggcgggtaataaacatcattggaactagctattaggaaagaaaaaaaaacttggttttttttacaacaaa

SEQ ID NO: 8371 - DNA, 498 bp, Homo sapiens; identical to SEQ ID NO: 8337
  SIMILAR (102)..(179): 731254mologous to Mus musculus Gag polyprotein,accession number Y12713,Smith-Waterman Score=90.
  misc_feature (1)...(498): n = a,t,c or g

SEQ ID NO: 8372 - DNA, 1587 bp, Homo sapiens
  SIMILAR (1291)..(1584): 901254mologous to Homo sapiens p40,accession number U93570,Smith-Waterman Score=441.
atgcagggatgggaaagatgtcgtttccttagtccgggcaactgtctgggctttgagcaagaggaagctgcagcccacccgggcaccctcaccccgacaccttcagcagtaaacaagataaaacaattccttaaagataagcctgagcttgtagatgtaaaagttggtgtccgaaccaggggctgtaatggcctttcttatactgtagaatatacgaaaacaaaaggaaattctgatgaagttatacaagatgaagccagagtattcatcgaaaagaaagcacagctaacacctttaggaacagaaatggactatgttgaagacaaattatccagtgagttatgttcaataacccaacatgaacttgtggctgtggagctccaggaaagctggtggaaaccttggggctcactgaagaaatcatgtgactgtcacatgcttaacttgcggctgccttgtaaagaaaataaagtgatgcattttgaaaatgaagccatttactctagagaatgccaagttcgtcatccagaactcaattactcttactttgtgtttcctagccaacagcagattaacaggaatagagactgctgtaataagataaattgtcaacaggacgtggatgaagctggaagccattatcctcagcaaactaacacaggaacagaaaaccaaacctcgcaggttctcacttataagtgggagctgaacaatgaaaacacatggacacggggaagggaacacttactggggcctgctggggaagggcggggatggcctattgtgggaccttgtgatcataacagatttgtgagggttgcacctgcatctttgaagagtcctgtaattgctgttctctgtatgtcaggtctaatagtggagaccacagtcactcaactacagaatttaaatacaatgggaataattggatcccgaggagacctagggccttttaccaggataactgtgcactgggaagaggggaatgatcagacactttggggactactggacactggctttgagctgacgttgattccaggggacccaaaacatcattgttgtcctccagttaaagtaggagcttatgtaggagcttatggaggtcaccaacatcaaagaccaaaggtaggtaaaaccacaaagatgaagagaaaccagagcagaaatgctgaaaattccaaaaaccagagtgcctcttctcctccaaaggatcgcagctcctcgccagcaaagaaacaaaactggatggagaatgaccttgatgagttgacagaagtaggcttcagaagtgacggggagaatggaacaaagttagaaaacactcttcaggatattatccaggagaatttccccaacctagcaaggcaggccaacattcaaattcaggaaatacagagaacaccaaaaagatactcctcgagaagagcaaccccaagacacataattgtcagattcaccaaggttgaaatgaagaaaaaaatgtttagggtagccagagagaaagatcgggttacccacaaagggaagcccatcagactaagagcagatctctcagcagaaactctacaagccagaagagagtag

SEQ ID NO: 8373 - DNA, 525 bp, Homo sapiens
  SIMILAR (271)..(459): 651254mologous to Mus musculus Pro-Pol-dUTPase polyprotein,accession number Y12713,Smith-Waterman Score=223.
  misc_feature (1)...(525): n = a,t,c or g
atgacctccaggctctcagataccaagattgtacaagacctaacccagagaattactcaagacactttctacgtaagaagaattgtggtgctagctctcctcatagaaaaatgttttctgtctcttgttgaaattgacagcaaacacaacaacacagaactatttgggagaacagaggacagtgatacactagggaanatttgtgaggacagcacctgcatctttgaagagccctgtaaaggctcttctctgtatgtcagatctaatgtcatcttagctccagagggaagaacgctgctaccaggagacacaataacgattccattaaactggaagttaagatggccacttggacgctttggggtcctcctacctttaagtcaacaagctaagaatggagttacagtgttggcggcagtgattgacccagactatcaagatgaagtaggactacaaatggtccagatcctctccgggtcacgacctgctgaggtgcttgctgaaggcaaagggaatacagaataa

SEQ ID NO: 8374 - DNA, 1120 bp, Homo sapiens
  SIMILAR (12)..(164): 501254mologous to Mus musculus Gag polyprotein,accession number Y12713,Smith-Waterman Score=118.
gactctatctcaaggtgtgctacatttgaaaagaactgtttgagttctctaatttatataaacagccatctggagaagaggtatgggaacggatattaagggtataggataatggtggaaggaacataagagttgtatcaggctgaatttattgatttgggcccagtaagtagggactctgcttttaatgttgcagctcaaggagttaaaaaaggttctaataggttatttccttggttagctgaaatatggattaaaaaatggcccactgtgagagaggtggaaatacctgatctccctttgtttaatgtagaggaagggatccaaaagcttagggagattgggatggggtagtggattagtcactttagacctactcatctcagctgggagggtccagaagatatacccttgaccaggccctcgcaaaatatatttgtgagggcagcacctgcatctttgaagagccctgtaattgctcttctctatatgtcagatctaatggtgagaactgcagtcactcaactacaaaatttaaatacaatgggaataattggatcccaagggggcagggaccgagtggcaccactcaaccatcaaaggcaaagtgggcatggctaccataatggacagcagagggaaagtggcaatcagaatagtctgactggtgtagagctctggcactggctaattaatcatgttgtttctagaagtgaagttgataggaagcctactaccttcctacttaatttatacaagcagaaaacttctaggtcgaatggacgaaagactagtttgaattataaaaacagagaatcacggcccctcaatcaattcccagacttgagccagtttacagacccagaaccccttcaatgaaggggaggctgggcccccttgaggaagtactactttattgacaatttatgcagtgaatctttacctcatccttccccaaggagacctagggccttttaccaggataactgtgcactgggaagaggggaatgatcagacactttggggactactggacactggctttgagctgacgttgattccaggggacccaaaacatcattgttgtcctccagttaaagtaggagcttatgtacgagct

SEQ ID NO: 8375 - DNA, 1347 bp, Homo sapiens
  SIMILAR (3)..(131): 791254mologous to Human herpesvirus 4 BYRF1, encodes EBNA-2 (Dambaugh et al, 1984; Dillner et al, 1984),accession number V01555,Smith-Waterman Score=223.
tcagtacacacaggccaccaccactaccaccaccgccaccaccaccaccaccaccaccagcaccagcaccaccagcaccagcaccagcaccaccaccaccaccaccaccaccaccaccaccaccaccaccttattttcaataagccacttgggaaatgcttgcaatgggaaccagctgccaccaaaggtccttggtcctggaatccccctctttttgcgtccgttggaataaccaaaatttcccccttttcggggcctggccaaggaggccttccctcctcctaggaggtggcccagaggatgggaccaataaccctggaaaaataaggtccgctcggccacctttggccggaaaaccccccaatttgccctcaagggccaaggggggtttccccacccggtacctatttttccaaggctccgggggtggcctccaggattccttttcctttttccttcactctggtaagtcctcaaggacagcaatgttaagaagaatgttgtctgaaagactgcaaatagagccatcagttctggttttctgtcaggatactcactcgatggcacagattcactttcactattatgtctagagctggttgactccgagttcaaacttagagtgcttgggatagatgaaagttcattacagagttgttccacatcatctggaaccactggccacagatgtttgcgactatgcctcacagcatcccagttgtgacattttagaatatcacagccttgtttggttttagctatgagcccaagtacatatacacaggtccctctgatggaaagaacttcacactgttttgcaagttttagtatatctggaatcacgttttcttcctgtagcaaattgagaccccaatttgatgagccgatatttccccccaccacacagccctcacccttgaggcaagctaggaaagcctggcccaatcttggattttcacttgatctttggttactccgacgaacatagttatcaccatcaacaggcttccggtaagtagtaagtgcttcattgagttgttcctcaatcaagtcaacatatttggagttgtattcctttgctccagttcccaacaagttcctcatctccatctgagcctggacttccacctcagcctggacttcattgttcatatcactatcagcattttggtcatatccattcaacaagcctctaggaagttccaaactttccaacatcttcctgtcttctgagccctccaagtctctaagaagttccaaactttcccacatcttcctctcttcttctgagccctccaaactgttccagcctctgcctgatacccagttccaaagtcgcttccacat

SEQ ID NO: 8376 - DNA, 666 bp, Homo sapiens
  SIMILAR (16)..(129): 701254mologous to Plasmodium lophurae histidine-rich protein,accession number X01469,Smith-Waterman Score=202.
tcagtacacacaggccaccaccactaccaccaccgccaccaccaccaccaccaccaccagcaccagctccaccagcaccagcaccagggggggggccaccaccaccaccaccaccaccaccaccaccaccttattttcaataagccacttgggaaatgctgctgtgggtaggtcacagtcatctctgaagacagccttagaaacaacatgaacacagggatgatgtctcacaggcaggatcagtgtgtccctgtgcttccaggggattccacataagataacatctttggggattttgccagattcccttgtctgtatgcattggggccaccgtgacaaaaatctttcgcttggccaaactttagtcagagtcctgacccctctcgtaggctcaatatgtgtatttcctcgtaaaatcccttcagatggaggtggccttctgtgccccaagcagccaaaatgccaatgcctatgatgcactgactgataggaaccatggtctctggcacctaaaatggcccaacgggccctgcccacaaccagataagcatcttgggtcactatgtttgtccgaaaacctcccaatgtcatcagtttaatttttccctgcttatgtctatgtgtgtcctttggatcttgagtcacgttctctgtgaaggcctgcat

SEQ ID NO: 8377 - DNA, 449 bp, Homo sapiens
  SIMILAR (23)..(259): 301254mologous to Colorado tick fever virus VP12 protein,accession number AF007175,Smith-Waterman Score=78.
tctcgggcttctcatcagcttattggcccatttagccagggcaaaggtgcatgacaactctgagcaagtcaaaacaaccgtcagcagcgggaaacctcgatgaacaaacaccgggagagtgcattcccaggggagttccaggagcccatggcccctcctgtacagccctccaccgcccagagccttccagcgccgtgtcttccccttggagcatctggaggccccagacagcacccgcctgacgttcagcagagggggagaccgaggcctgcagcagagtgttttgtcagatgctgctcctgaccgggagtgagagggaacccacctagagtttctgcagatcctgctttgtgacttcgagtgaagtgtggaagcgctggaagcacttagaccctgcctgtgagttgtcatgtatcatgtctgcaaacattaaaaatctcaccagaaaa

SEQ ID NO: 8378 - DNA, 262 bp, Homo sapiens
  SIMILAR (53)..(115): 611254mologous to Sorghum bicolor UDP-glucose glucosyltransferase,accession number AF199453,Smith-Waterman Score= 69.
tggggcaatcgccgctgttggtttcatctcccagcactgcccattggccgcagcacctcctgcccccacggtgcactcccttctgcggtcatttccttcccagggacattttgctgaaacagcttgtaaaggatggcgcctggctggtgcctctgcctgctatggggtgcgggaggcaatgtgggaagctccgtactctctgatcgatgtatcggtaaaatgaaaactgctctaaaaagtagtcttttaatcaaggtcacag

SEQ ID NO: 8379 - DNA, 2348 bp, Homo sapiens
  SIMILAR (811)..(1155): 251254mologous to Mus musculus cell proliferation related protein CAP,accession number AF273217,Smith-Waterman Score=95.
atgttcagcatcccgactggacagctccgtgcggcggcatcgggggcgcggcggcatcgggggcgcggcagcatcgggggcccttttcatgccattcaaggccccgtggaaacagacaccacagctcagcatgagactgtggccccacctgacctggctcatccatccccagcctctcgtggtccccggccctatgccgacatttggcactcgatgagccatttctccacatttcaggagccttgttttaagacagcctggctgtctgagagccaccggagtcgagactggatgcccggcctggtgcccgcaacagcaactccagatgtcccatcacagctgcccaccggacacagatatggggacaccaagtgcgcagggggcaaagtcatctgcgttgtgctcagctgccgccgccacacaacagcaccagaagagctcccgccggggacatgccaccgagcatgccgggtgccaccgagctgctggcatgttcggtgcctgctggctgaacctcggagttgcgtggcggtggctttgcttcatcactgtctggttcaccgtgctctaagttcgggagccctgcgagcagtgatgcgtggccacgtctacagcctcgctggcctgtcacgttcccagaggcacagcccttggaggtgcctggtggaactgagcatggctgctctccgtgggaaccgctcagcaactcagctgcacagactcctttcttcccacctctccatcccactgctccctcctgtcccctcgggcttcctgggtcacctccaggccccacctccagcactggggactacatccccacatgagaccagagcgggacatccaagctatattgccctcttcaacagggaggagcagaggctgcacactgtgtgctgctcagagcagccagagaccaacagcaaacgaaaaggagaaacaccaacaccaaacgaaaagaaggagaaacaccaacaccaaacgaaaagaaggagaaacaccaacagcaaacaaaaaggagaaacaccaacaccaaacgaaaagaaggagaaacaccaacaccaaacgaaaagaaggagaaacaccaacaccaaacgaaaagaaggagaaacaccaacaccaaacgaaaagaaggagaaacagagccagcacaaggcgggaccaaccctgggcgtgttcaacagagccctgcagctctataatgttttagttattaaagtgaatgtggccaggcatgcccttctgatgagtcagctggtgccagattcacggcaggatctgcccccgacaaaggacttcacctggaccgagctcctgggccccaagcagctgacatttgattctcgcaacaactgtgcacctcctggtgacacggccttgctagccgccatcctgtaccgggcccagtggtcacctggttgtcggtggcccgcgtccatcagcccatcatcattccgacttgctgttttgatcgtcggccggaaagccagacagctggccttgctggaccatgtctgcaatgggaattttgaggccgagagggagggcttcaggggcccctgggagtgcaacaccattcccaggggagttccaggaggcccatggcccctcctgtacagccctccaccgcccagagccttccagcgccgtgtcttccccttggagcatctggaggccccagacagcacccgcctgacgttcagcagagggggagaccgaggcctgcagcagagtgttttgtcagatgctgctccctgaccgggagtgagagggaacccacctagaggtgccagatggggtgccagggcagcgtggcctgcaggcccctcagctcctcacagcccctgcccccagccttcctgggcccagagatccccttgtttaccctagtccagggacagaggctcagatgtcatgcttgaccccacagtttctgcagatcctgctttgtgacttcgagtgaagtgtggaagcgctggaagcacttataccctgcctgtgccgcagacccctgggaggcaccaacaccccggatcgagaagcccgatgggaaagaatgtctgggaaggacgtcatgcccgaggcttgcgtgacagtttccactcacagtgcgctcactctgaacctctgtgcacacgatgggcctgcatctcttcccactatctgctaggaaacacgaggggaaggaaatgaccgcagaagggagtgcaccgtgggggcaggaggtgctgcggccaatgggcagtgctgggagatgaaaccaacagcggcgattgccccagaaagaacttggcgctgctaaggcaatggcggcccgaaagaggcccctgacgcatgaggagcggccg

SEQ ID NO: 8380 - DNA, 960 bp, Homo sapiens
  SIMILAR (537)..(827): 1001254mologous to Homo sapiens PRO2221,accession number AF116695,Smith-Waterman Score=499.
ggagcccaccacagctcacagaggcctgcctgcctctgtaggctccacctctgggggcagggcacagacaaacaaaaagacagcggtaacctctgcagacttcaatgtccctgtctgacagctttgaaaagagcagtggttctcccagcacgcagctggagatctgagaatgggcagactgcctcctcaagtgggtccctgacccctgacccccgagcagcctaactgggagtcacccgccagtaggggcagactgacacctcacacagtcgggtactcctctgagacaaaacttccagaggaacaatcagacagcagcattcgcgggttcacgaaaatctgctgttctgcagccactgctggttggtacccaggcaagcagggtctggagtggacctctagcaaactttaacagaccttgcagctgagggtcctgactgttagaaggaaaactaacaaacagaaaggacatccacaccaaaaccccatctgtatgtcaccatcatcgaggaccaaaggtagataaaaccacaaagatggggaaaaaacagagcagaaaagctgaaaattataaaaatcagagcgcttctccccctccaaaggaccgcagctcctcaccagcaacggaacaaagctggacacagaatgactttgatgagttgagagaagaaggcttcagagaatcagacttctccgagctaaaggaggaagttcgaacccatcgcaaagaagctaaaaaccttgagaaaagattagacaaatggctaactagagtaaccagtgtagagaagtccttaaatgacctgatggagctgaaaaccatggcatgagaactacgtgacgaatgcacaagctttagtagctgattcaatcaactggaagaaagggtatcagtgattgaagatcaaatgaatgaaatgaagcgagaagagaagtttagagaaaaaaaaaaaaaagcgg

SEQ ID NO: 8381 - DNA, 4758 bp, Homo sapiens
  SIMILAR (4257)..(4424): 711254mologous to Homo sapiens Human secreted protein HLYES38, SEQ ID NO:220,accession number Y86305,Smith-Waterman Score =183.
atggatggaaggctctactctgtgaccattcagccttcatcagttctcaacctacaacttctgttatctgggcccaagtcagctgtcctggttgtcaccattctcatgtgttcagaaactaacttgtcttttaatgaattttcagaaagctttaaaacaacttcccctgagaaaatgagcataagaaagccacaggagaaatctgcagatggaaaacaatttttgcaaaatgataggaaaaatccaaagttaggtaatactcaaactcttttgagaaatgatgtttctggacttttgagcagaactaaacgaaatattgtgcctccagggtggtattctgtatatgtaacaaataattatgtttttaaaaaatcccctaaagccaaaaaagtatccgaatccacaacaaaaaacgatccagtgaaaaatattcacattgaaagctcacacaatatagacctaaacaaaattgcaatgaattctaatttacaagtggttgtgaagcgtttggaagatacaataagtatagccaaaaaatcctggaataatcagccattatcagaaggatataaagcatccaagaaattgatagaaattgatggtaaagaccaacatgctgacagaaatatgactcttactctaaatagaatgacatgcaaagaacagagcttatcaaaatctgtggtagcatccggcaatattatcaatagtcactgcatgcctacagtggatttgaataacaaaagacttgaaaatctgaaaaagtcatctattttagatatgggtcgcttgatttccagtgttgaaaatgtaccagcaaaatatgaaggtactgaaagttcatctgtttccaactattctagtcctatcaaactcatgtttttatctgaggttaaaagtagtgaaggggtcaaatatactttaacttcagttggcacttcccattcaaatgttgttctcccttctgaaaaacctacaacccatcacgtaactgaagaaaaaacagaaacaaatgaggatatctcaaatgcgaactctgaaaattatcactccagtcattatgatactgatacttttcaaagagaactaaacaaattcagtcatgcaaaagaaactgcaggatcctctacaatgtttataggtgatataaatagtgataagccacaagaagaacctaaggacaattcaagcagtgctactgatccatcttttaaaagaaaaccaggtagaccaaaaaaaataggtccccaagttgtgaaacagattaagcgaccaattggaagaccaccaaagcctaaaattgatcaaacaaacatcactgtttgccagaatgagccctttagtgctggaaggaaaagcccagaatgtctcatatcagaagtaaaagaaggtatttataaaaagagtattacagtaactgttatttacggaaggtcaagaagaactaaaaggcatgtttctgaaggaagggtaaacataagcaaccttatgtctttaaacaataatgctggtgattttccaactgaatataatagtcccagaaatattagtgaagacaaaattgacttgggtgaaagaataagtgctgtagcaagcttgactactgaaagtgagatcttggggtctggctttgaatatgtgagacccatcaagaacaaatctgtgatacctcagccttccaagaacattattcgaccaaatcagaagcctttggcaataagtaggaagcctggtagaccggcaaaagtgaaaatctctggcatatctgtgactattaatagaacttcacctcaggaaagagaagtaagtattagcagctgcttgcctcctttagaacaggataatacgtcaggaaaaaatctgcctgaagaaaagtatgaccaacagtgcactcaaatggataaaataaggcacactgaagctgatatatttaaaaatggatcaaaacgtatgattgctactgtacctttgagacattctattagggatagaaaaccatctctgcatttcttacattcattagcatcttctagctcacttatttatagaaacgctctgctccataaatcatataaactgcatttgcagaaaaataaaagtcagaaggaaaaacataggcactcaaagatgaaaatagcttacaaagataccccaagaaacagactttcgcggaatgcaaaaaagtgtttggaagataataaattagtacctatttctgaagtatccttggatcctataatttcatcaaaccctttgctcaggtggtgggctacttctgcttcaaatgattccttattagaggaattaaacaatagatttgagcaaataacaaatgcttgggtgcaagtaagtggagatgaagctgaaaattgtattcataaaaaaagagaacacattgaaaatgatcatttcaaagtagcaagccctttggaaacttgtcttttagaacttgaagtttcacctgtaaaaatgctttttcagaaaaagtatgatttgaatgaactctgtacttggtttatgcaaacaacagaaacacagtctctttcactagttagaaaagcaaatgcccgaaaccctttggaagtaataaataccaggggaatcaaattagggaccaaatattctgactttaatgccagccccttcagaaagcactttaaaaaatttgcactctcttctccttcaaaatcagcagagaaattgcatatactgcataaagtggctaactctccactcttaaatgtgaaaagtaatttagcaatagctagattaaaaaggactgagtttaagaggttgcatcatgaaaggtggaaaagagagggaaagctgcacaaccatggaacagttgactggaactctaaaaggagaaacttaagatttttctgccagaaccaatttttaaataagactgagggagaaacaaatgctgacatcccactccaaggaaaaagcatagtagataatcagtgtgttttgccacctgagatcaggggtgacttgcagcagagggtagtaatgcctgacttcaaaatacatgctagttttgagaataaatttaagtcagaagcaaaagagaatggaacaaattgcagccaaaaagactttcaaaagggaccaagactagaaaatgtatgtcctaatagttggaggtcaaaaaccttaaaagactgtagaatatttttgaggaagctcaactgtcttgaacacagaaatacttttaagctaaatacaatcatttactctcctgaatctactgacagtggaaatactcatcagactcatatggaagaatcaaagcgctttactttaagatctcattctgctaggcaaaattcttttaaaaagcaatctaaagaaatagaaaatgctaacacaaataatccttcagctgatgaatttgctgaccatcttggcaatagtaaattaagcaaatgtgttaactttgacaagaatcctgatagttttgaagttcttagcaatttgaacaaaagaaaaagaccaccatggaagatcacagaaatgtcaacaaaaagacataaacgacagtcttgcaacagtggacaaatggcaaactatttttccaaatccctagatttatggaactttgaacttgagaaagatgatttagggtatatggcggaagaaatttctaagcagcaaagcattcaagaggaaacttgggtgctgttaaaggcatttagttttataaaggaagcagagcataaaagttcggaaaatttgcagcctgacaatttgatagaaaagaaagacccattttctgaggagaaattcaagctggctacagaaatttgcataactaatgaggagccacacgttaatctccaagccaacagggaaaatgtctcaaaggcatggctgttgattcagagggtggaagccccagtgccttggcggcttccacatgctgttgagcctgtgggtgcacagaagtcaagaattgaggattgggaacctctgcctagatttcagaagatgtgtggaaacgcctggatgcccaggcaaaagattgctgcaggggcagggccctcatggagaacctctgctagggcagtgcagaagggaaatgtggagtcacagcccccacacagagtccctactggggcactgcctagcggaactgtgagaagagggccatcgtcctccagaccccagaatggtagatccaccaaaagcttgcaccatacacctggaaaagcctcagacactcaaagccatcccatgaaagcagccaggacaggaccctcagctgcaggtctgttggagtttgctagaggtccactccagaccctgtttgcctgggtaacagcagcggtggctgcagaacagcagattttcgtgaaccgcgaatgctgctgtctgattgttcctctggaagttttgtctcagaggagtacccggccgtgtgagaaaaaacaaccagagtatcctgtggatgccgcatgctcctctgatgagctggccataagtttaattcctgatgtttttccagcctcatcagagagcttagtagacaagcataaggaaaagagaaagggctgtattccagttccaggcagcatgctacaagtgaaaactgatgagaaactgaatgtgtctgatgagaatacagcaagttgccctttgagccccattaagatgtgccttaatcgtcccattgaatggaatctgaatttgacaacagcatctctaacgagctgtacagttcataaccaaaatctcaaaagcgaagagaaatag

SEQ ID NO: 8382 - DNA, 540 bp, Homo sapiens
  SIMILAR (13)..(264): 421254mologous to Homo sapiens 17G2 peptide sequence,accession number W99023,Smith-Waterman Score=148.
cccacgcgtccgggcttcaagtgcttcaccaagaagatggacaacagggcactcagctcaacctcacagccaatgagtggcgacaggctttgagaaagagaatcagaagcctgacagttcttcttcagcctcagccaggccttgaagctggaccaggccatccacatcagtatggatgccttccactctgtcagtgagctctttgccagtcagtccaggcggggcctggacccagccatggacctgttggtgctgtctcagggacaccagaccaacatcctggacatcgtccacatacacaaggaagctcttaccaaagtcacggagaacaggcaacatgtggcagaagggaagacagaggtgcagaggctgatgacgtcagaatcacaggaacaggaattctttcaccacttcactggaaattcaccacttccatccaatttgaataagagacatgaaatcacagatgcagcatttcttgcaacaagagatactattttttcaaaaatcatccaggaattgataatgttgaatgactag

SEQ ID NO: 8383 - DNA, 461 bp, Homo sapiens
  SIMILAR (4)..(459): 471254mologous to Homo sapiens bA145E8.1 (KIAA1074),accession number AL162272,Smith-Waterman Score=366.
tttgatgatcttacagcagagaaggaagctgtatcttcaaaatgtgtcgatttggctaaagacaatcaagttcttcaacaggagttattatctatgaaaaaagtacaacagcaatgtgaaaaacttgagaaggataaaaagatgttggaagaagaaatattaaatcttaagacacatatggaagacaatatggtagaacttagtaaactacaagaatataaatcggagctagatgaaagggcaatgacggcagtagaaaaattagaagaaatccatttacagttaaacaagggtaatacggcttcactaaataagaaggaactcacacttaaagatgtggaatgtaaattctccaaaatgaaaactacttatgaagaggttacaaccaaattagaagaatacaaggaagcctttgcagtagcattgaaagctaacaattccatgtcaaaaaaattaacgaa

SEQ ID NO: 8384 - DNA, 319 bp, Homo sapiens
  SIMILAR (303)..(82): 391254mologous to Hylobates moloch dopamine receptor D4,accession number AB032918,Smith-Waterman Score=95.
ggagcggcttccgggagccgggcagcaaccgccgtgcaggcgcgcgcccaacggcttttcaagtctcactcggtctgagaggtcggaggctgcgagtgtcgctgctgaaggctgtggtggaccgggctggatcgcggattgtggagggccagacggcccagggctctatagaacatgtctacacgggttccggataccgaatccgggactccgaactgcagaagatccacagggcagctgtcaagggcgacgccgcgggggtggagcgctgcctggcgcgcaggagcggagacctggacgccctggacaagcagcacag

SEQ ID NO: 8385 - DNA, 480 bp, Homo sapiens
  SIMILAR (305)..(418): 411254mologous to Homo sapiens Human secreted protein encoded by gene No. 62,accession number Y27628,Smith-Waterman Score=65.
ggattgttttatattttatgagaaacaattaaaatgtggaaagagcccagtgataaagttttataatcttttaaatcatcatacaatttttccttaagactttatggttaaatattctcttcattaaatgtggcttacccgtggattccagagaagaaagtagatgggagcaagtgtccaatacagcaacagctggaaagaaaaataaagaattttgttctttacctaaaacacttcagttaactaagtgtgagtttaaaaactaaagacttgagaactttatcagagttaataagaacgagaaatatgtatgtacatttaccatacaaaattactatttaataatttacacatggcattaattctaattgtgtttaaatatcagagctttttcagtcttcattcatgtaatcaacagccacatgctaaggtactcgaaccagcactggaattacaagatgaagatggcatggtccacct

SEQ ID NO: 8386 - DNA, 531 bp, Homo sapiens
  SIMILAR (136)..(423): 501254mologous to Homo sapiens bA145E8.1 (KIAA1074),accession number AL162272,Smith-Waterman Score=269.
atgggcagcaacttccagctgtttccatggcaaggggtggggacttcccgtgctgccatgtcattggcaagctgtgatggcactgctgtgtttccagtgtcctctgggtgtttccaagagcgacaggaaacaaataaatctctgtttgatgatcttatggcagagaaggaagctgtatcttcaaaatgtgtcaatttggctaaagagaatcaagtttttcaacaggagttattatctatgaaaaaagcacaacaggaatgtgaaaaatttgaggaggataaaaagatgttggaagaagaaatattaaatcttaagacacatatggaaaacagtatggtagaacttagtaaactacaagaatataaatcagagctagatgaaagggcaatgcaggcagtagaaaaattagaagaaatacatttacagaagcttattcgacatggtttatttgatgtgttttatggaccaccttgcatgagtggatcaaggagctctaattcaaggccaaatgaggggataggagaaatgtag

SEQ ID NO: 8387 - DNA, 812 bp, Homo sapiens
  SIMILAR (75)..(542): 441254mologous to Homo sapiens bA145E8.1 (KIAA1074),accession number AL162272,Smith-Waterman Score=318.
cggaattcatacaaggctcaattccgaactgttgaaggaagaagaaagcaacaaaagactggaagctgaaattgaatcatcagtctagactgactgctgctataagtaagcacagtgaaagtgtgaaaacagaaagaaacgtaaaacttgcattagagtgaacacaagatgtttccgtacaagtaaaaatgagttctgatatttccgaagtagaagataagaatgagtttcttactgaacaactttctaaaaagcaaattaaattcaataccttaaaagataagttccgtaagaaaagagatactctcagaaaaaagtcattggctttagaaactgtacataacaacctaagccaaacacagcagcaaataaaggaaatgaaagagatgtatgaaaatgcagaagctaaagagaataattccactggaaagtggagctgtgtagaagagagaatatgtcaactccaacatgaaaatccgtgcattgaacagcaactagatgatgttcatcagaaagaatgtttaccatcgaggaaggagaagtttaagtctgaaccaccagctttcctcagtggaaatcaagtgaagtcatcatcttgcagtttacagaccctctttcctcctgatgatttgatcttatatttggaaaatcctaaggactccaccaaaaaactattagaactgatcaacaaattcagagtcacaggatacaaaatcaaactacaaaagtcagtagcatttctaaatgacaaaaatgaacaatctaaagaagaaaatcaagaatgtaatcccatttacaataactacaaataa

SEQ ID NO: 8388 - DNA, 1581 bp, Homo sapiens
  SIMILAR (403)..(864): 461254mologous to Homo sapiens bA145E8.1 (KIAA1074),accession number AL162272,Smith-Waterman Score=321.
atgaaggaactcacacttaaagatgtggaatgtaaattctccaaaatgaaaactacttatgaagaggttacaaccaaattagaagaatataaagaagcctttgcagcagcattgaacgctaacaattccatgtcaaaaaaattaacgaaggcttcaaatcaacacactacttcctggggcacaaacctgccaagagggggaattcaacatgtggaagaggtggtcctacgctgtccactggaaaaggagggactcagggaaaagaaactcctacatgaggaaagatcattatggaggcgtcagcccatagtcactggggacgctctcaccagcacctgtgaattttggagacatttgaggatgtcctgtgcaaattgggatgttggaagttctgatgaatctgcagtcagaaaaaagtcattggctttagaaactgtacaaaacgacctaagccaaacacagcagcaaataaaggaaatgaaagagatgtatcaaagtgcagaagctaaagtcagtaaatccactggaaagtggaactgtgtggaagagaggatatgtcaactccaacgtgaaaatccgtggcttgaacagcaactagttgatgttcatcagaaagaggatcataaagagatagtaattaatatccaaagaggctttattgagagtagaaagaaagacctcatgctagaagagaaaaataagaagctaatgaatgaatatgatcatttaaaagaaagtctctttcaatatgagagacagaaagcagaaacagtaatagcacagcccctcaatctgagtgctcagcagagtgcttgtgaaggcagcaccacagcaacagttgctcagagggaacagattcaggagccttggtttagcaatagagtccagggttttcagctcagtgtctttagcctgtctctgctggtcatgtcagttatgtactattccatccaggaggcatctgactctgcatctccccgaggtttggagccccccatgcttcagagagctgctcaaagaatggcccggagtgcggaggccaggatgggaaggcgagcttggaagcagacggtgatgcgcctggggcagaacatctgtgttctctgttgtgagtggttaagacaagaagacagggcctggatgtcccagacagtcccccagggacttggtgggggcagcccctaccccagatcccagttagagagaacagcccagctcttggggctctgggcctggctgagccacctgggatctgggtaccctggtggtcggggaggggcacagactttaagtccagcagaagttgtttccggacagtctatgaaaagctctgctggccacggaggaagtaggcagctgacaaaaagttctgcaattgcctgtgccaaactgtgtaaagcaagtacttacatcaattgggaagataacgctgtcattttcctacttgttcagtccatggtggttgatcttaaggcagaagagcctcatcccattgctaccatcaccacaggcccatggggaataccgccaggctaccaccaatgttcccttaagattcaaggctctttagttcacttgtag

SEQ ID NO: 8389 - DNA, 3127 bp, Homo sapiens
  SIMILAR (641)..(2806): 321254mologous to Homo sapiens bA145E8.1 (KIAA1074),accession number AL162272,Smith-Waterman Score=717.
tttcgtgagtgttgctgctgaaggctgtggtggactgggctggatcgaggattgtggagtaaatcatagatttgaaatagcggatttggggttgtatcggggctttggggttggataggggatttggggctgggtcggccggggtcggggaggcgggtggtgaaaaggtgacaggcagctgccctcgctcaagagccggtggttgggggtctgagaagaagtcaccactatgaagttattcggcttcgggagccgcaggggccagacggcccagggctccatagaccacgtctacacgggttccggataccgaatccgcgactccgaactgcagaagatccacagggcagctgtcaaaggcgacgccgcggaggtggagcgctgcctggcgcacaggagcggagacctgcacgccctggacaagcagcacagcagtgtgtccccaagaaagtgtcagagcctttacgtggaccttcccatggaaaaggaaacagaatagtcaatggaaaaggagaaggacctcctgcaaaacatccttccttgaagcctagcactgaaatggaagatcctgctgtgaaaggagcagtacaaaggaaagaatcgtacatgacattgagagcagaacaagccttaccagtggcttcagaggaagaacagcaaaaggcgtgaaagaagtgaaaagaagcaaccacaggtcaaagaaggaaataatacaaacaaaagtgaaaaaatacaactttcagaaaatatatgtgatagtacatcttctgctgctgctggcagattaacccaacaaagaaagattgggaaaacgtatcctcagcaatttcccaagaagctgaaggaagagcatgatagatgcaccttaaaacaagaaaatgaagaaaaaacaaatgttaatatgctgtacaaaaaaaatagagaagaattagaaaggaaagagaaacaatataagaaagaagttgaagcaaaacaacttgaaccaactcttcagtcactagagatgaaatcaaagactgcaagaaatactccaaatcgggattttcataatcatgaagaaatgaaaggtctgatggatgaaaattgcattttgaaggcagatattgctatactcagacaggaaatatgtacaatgaaaaatgacaacttggaaaaagaaaataaatatcttaaggacattaaaattgttaaagaaacaaatgctgcccttgaaaagtatataaaactcaatgaggaaatgataacagaaacagcattccggtatcaacaagagcttaatgatctcaaggctgagaatacaaggctcaatgccgaactgttgaaggaaaaagaaagcaagaaaagactggaagctgacattgaatcttatcagtctagactggctgctgctataagcaaacacagtgaaagtgtgaaaacagaaagaaacctaaaacttgctttagagagaacacgagatgtttctgtacaagtagaaatgagttctgctatttccaaagtaaaagctgagaatgagtttcttactgaacaactttctgaaacacaaattaaattcaataccttaaaagataagttccgtaagacaagagatagtctcagaaaaaagtcattggctttagaaactgtacaaaacgacctaacccaaacacagcagcaaacacaggaaatgaaagagatgtatcaaaatgcagaagctaaagtgaataattccactggaaagtggaactgtgtagaagagaggatatgtcacctcccaacgtgaaaatccgtggcttgtacagcaacctagatgacgttcatcagaaagaggatcataaagagatagtaactaatatcccaaagaggctttattgagagtggaaagaaagacctcgtgctagaagagaaaagtaagaagctaacgaatgaatgtgatcatttaaaagaaagtctctttcagtatgagagagagaaaacagaaggagtacctaaaaaagaaaatgaagaattaagaaaactttttgagttaatatcatcactgaaatataatgtgaatcgaataagaaagaaaaatgatgaattagaagaagaggcaactggatataagaaactcctggaaatgacaataaatatgttaaatgtatttggaaatgaagactttgattgccatggagacttaaaaacagatcaactgaaaatggatattctgattaagaagctaaaacagaagtttgatgatcttaccgcagagaaggaagctttatcttcaaaatgtgtcaatttggctaaagacaatcaagttcttcaacaggagtttttatctatgaaaaaagtacaacagcaatgtgaaaaacttgaggaggataaaaagatgttgaaagaagaaatattaaatcttaagacacatatggaaaacaatagggtagaacttagtaaactacaagaatataaattggagctagatgaaaaggcaatgcaggcagtagaaaaattagaagaaatccatttacaggaacaagcacaatatgaaaaacaattagagcagttaaacaaggatataatacagcttcactaaataagaaggaactcacacttaaagatgtggaatgtaaattctacaaaatgaaaactgcttatgaagaggttacaactgagttagaagaatataaggaagcctttgcagcagcattgaaagctaacagttccatgtcaaaaaaaattaacgaaatctaataagaaaatagcaatgatcagcaccaagctccttatggagaaagagtgggtgaaatattttctcagcactcttcctacaaggcgaggtcaagagtcaccttgtgttgaaaatcttactagtatagtactcaacagtaaatatattcccaaaatgaccggaagaattcctacttcaaacccttaaaccttaaataactggcagaactacttgactgagctgttgctgtattggacacttgctcccatctactttcttctctagaatccacgggtaagccacatctaatgaagagaatatttaaccataaagtcttaaggaaaaattctatgatgatttaaaagattataaaactttattactgggctatttacacattttaattgtttctcataaaatatataacattccaataaa

SEQ ID NO: 8390 - DNA, 3119 bp, Homo sapiens
  SIMILAR (2660)..(2710): 881254mologous to Homo sapiens cleavage and polyadenylation specificity factor,accession number U37012,Smith-Waterman Score=75.
gctgtgtacctaagtcgtggatgtgtctgctgcatccgctgcatcagttcacttctgaaggaaccccatgaggaaggtgtaatgtgctcctttcgctctgtggctactcagaagaatgacatcaggcccgatttccagctgggaaagatggattctaaaatcaaggaactggagccccagctgacaattctatatcagaacccaaagacgctgaagttccaaggtaagaaatctgtaaaatttgctctcagcccatcaatggccctgagaaagtagccattcaaaatgttctccatttaaagtatttttatcgccctgcagttcctgcacggctactacaagcccatcctgttcgagcccaaccagacctggcccgggcacgtggctgtgtggcaggacacgtgctccatcgtggccatcttgctaacatcacgcagaaggtgcaccccgtcatctgatagcattcccccgtacggtgtggctctcagcagcctcaccacaggcaccgcagctttcccgctgtgcacccagctgggtgtgtgaatccccctggactgcgcccaggccaccttcatctcccatgacaagatggtcatctccctcaaggggtacctgttcctgagttcttgcctgggcaactctctcctcctcaagtacaccgagaagcttcaggagcccccggccagtgctatctgtgaggctgctgacaaggaagagcctccctcacagaagaagcgagtggacacatggccagctggtcagccagggacaaatccgtgtcacaggacgacatggacgagattgaagtgtacggcagcgacgcccagtcgggcacacagctggccacctacctttgaggtgtgtgacagcatccttaacattggaccctgcaccaatgctgccatgggtgagcctgccttcctgtctgaagagtttcagaacaaccctgagccggacctggagattgtggtttgctccagccacaggaagaatggggctctgtcggtgctgcagaagagcatccagccccaggtggtgacaacctttgagcttcccggctgctacgacatgtggacagtcatcgccctggtgcctaaggaggagaaagagaatcccaagggggagggcacggagcaggaacccagcacccccgaagcggacatcggggacaaccactacattgtccaagtgtcgctgctgggcatccacctgctggaaggaatgaatcagttgtacttcatccctgtgggcctggtcacccgcaacatgcagtgcactgtaggcaacccctgcgtggtcatcatgagtgccgacggccgcgtcaccatgttcctgctgaaaagcacactcctatagtggctgccacgaccacctggtgctgcacaagcccccgctgcaccatcagcccaacgtgatcacgctgtgccgtaccgagacctcagtggcatgttcaccactgagagctgcctgagcggggctcacgatgagctagggggccacagtggcttggaggccgagagcctgggctcggagactagccccacagtcggtgatgaggaaatgctgtgtggggatttgggatccctcttcagtcccagcaaggaggtggcccgaagaagcagccagcccctgccgactgggactctgtacccttccagacagagcccatccactggtcggctggtgttcttggtgaagaacttccctgtggggcagcgggtcctcatggacagctcctttggagagcccaccacacagggcgaggcccgcagggaggaggccatgtgccaggaggagctgcctctctcgtcaaggaggtgctgctggttgtgctgggcagccgccagagcacaccttacctgctggtgcatgtggaccaaaagctgcttctctcggctcagccagggcaatctcaaagtccactttaagaaggtccttcacaacatcagcttccgtgagaagaagccgaagccatccaagaagaaagcaggtggccgcacagaggagagggtcgggcccggggccgcgtggcgtgtttccactacttcgaggacatttatggcagcaccaacacactgtgcacctgcatcccacatgactggcgaggagaaggcatttgagaccattgagagagatgagcagtgcatccacccccaggaggcggccttatctatccagttcatctccctagtctgctgggaggctattcccaatgccaggattgagctgcagaagtgggagcttgtgaccagcacgaagacagtgtcgctgcagcaaggagaccaggtcaggcttcaaaggctacgcgtggccgccgggacctgcctcatgcaggaggaggaggaggtcatgtcctgagggcggatcttgatcatggatgtgactgaggtggtgcccgagcccagccagcccttgacctgcagcctcatggtgtacatgtacctgcctgaagccaaggagagttttgggggcatgtgcctgctgcgctgggcagacttccatgtgggtgcccacatgaacgcattctataggaccctgtgccagggagccactgaggggctcagcaaaaagtcactgccacaccacacaggcctcaacctccgcaccttccggatgctgcgtgtggacctccgcaccctccagaatgctgtgctgcaagctgcacggggagctgctcaaccgctacctgtacctgagcaccatggagcagcaagctggccaagaagatcagcaccatatccgacatcatcctggatgacttgctggagacagatggcgtcactgcccacttctagctccatggatgtcgctgccaccaccacaccgcactacctcccaccaccttttttgaacaaaacacaaggaatatatactttctggaagaccatctgatactatgtatcaagaatctcaaaaatattcatatactataatgcaataaggccatttctaaaaatttaccctgagaagataatccagacctgtgctacaatttccattacagagacatctgttgtaatattgtttacggaagggggaaacagaaaacagcctccatgtccacagaggaatgattaaatatgtggtacacctacaggctggagtgtaaaatggacaca

SEQ ID NO: 8391 - DNA, 427 bp, Homo sapiens
  SIMILAR (412)..(263): 371254mologous to Persea americana metallothionein-like protein type 2,accession number AJ133145,Smith-Waterman Score=69.
ttttgccaaggatattcagagcggctttatttataattcatatacgtatatgtgtatttagctttagtaaatattgccaagtaattttgcaaagtgctcgtaacactgctttaggttttgtcacggaagaggaagttggaggccccagtaggagacaggaataatcagtagcaggggtgataatgggccattgcaatccaaaggcatgttgtctatgaccaggaatggcaaattgctgatccttgcaatatgtaatgagtggaaaatgctgagactttgccacctggcccattcttaaacatctccttagagagctctgcccggagaagagctacttcacgcgacgacaaccgccgtttccgacctcacaggtccaggcgttcccgacgctctcgctccgacaacgccctccacctggccagcgaac

SEQ ID NO: 8392 - DNA, 903 bp, Homo sapiens
  SIMILAR (212)..(685): 291254mologous to Sus scrofa apomucin,accession number M21174,Smith-Waterman Score=79.
atggcccagaagttcatggctccaaacagggcccggaccctacgggacatctgcactgacagagaggcctatccggtccaggaaagcatgggcagcgggacaagaggccaaaggaaagaggacatgggtggggcagccttgtccacgggggaaggtggggcaagggatgtgaaggcccctctccctgaggccacactctgttctcagatggggcccacaggaaggccttccgggagtctgtgcgacctggctgggagtacattggccggaagatggatgcatcagagctttgattttgatggagggatggaggccagcaagctgccagggcaggagggcgtgaggatccagcccatgagtgaacgcacccggagaagagctacttcacgcgacgacaaccgccgtttccgacctcacaggtccaggcgttcccgacgctctcgctccgacttctccctccacctggccagcgaacgcgaggccatctcccggttaaaagataggccccctctgagagccagggaggactatgaccaatttatgcgccagcggagcttccaggagagcatggggcatgggtcccggagggacctgtacggccagtgccctaggactgtgtcggacctggctttgcagaatgcctttggggaccgctggggaccctacttcgccgagtatgattggtgttccacctgctcctcctcttcagagtctgacaacgagggctatttcctaggagaacccatcccccagccagcgcgcctgcgatacgtcacaagcgatgagctgctgcacaaatacagctcctacggcctccccaaatcttccacattaggtggcagaggacagttgcacagcaggaaaagaccagagagcaaaaacctgtatcatttctttatatga

SEQ ID NO: 8393 - DNA, 387 bp, Homo sapiens
  SIMILAR (133)..(324): 701254mologous to Homo sapiens triple LIM domain protein,accession number U93305,Smith-Waterman Score=296.
atgggcagctctcaaggggtctacgcagagcttaaggagttagataggaatgttcaaaaagctgtaggacttagagaagtaccaagaatgacgatcagcactggaaagcctgtggcagctgagaggtggggcaagatcatctttgcagatgaatgcacagaagctgaggggcgacactggcacatgaaacacttttgctgcttcgagtgtgagacagtgctgggcggccagcgctacatcatgaaggagggaagaccctactgttgccactgcttcgagtccttgtatgcagaatattgtgacacctgtgcccaacatataggtgaggcaatatttggcagtcagcttggtccttctgtgatgcggtcacctttgttttgggtgtag

SEQ ID NO: 8394 - DNA, 2463 bp, Homo sapiens
  SIMILAR (1668)..(1769): 381254mologous to Ciona intestinalis prickle 2,accession number AB036841,Smith-Waterman Score=50.
atggaagagaaaagcaaacgaagaggtgttttgtggagtcttctgatccttgccttgaagtttggagatgagccccctctagggtcaccgaacagctgtaaatacaagctgaccaccctcaaggagctgggatggagggaggttttctccagtctccagttctgcctttgcacctctgtggcctctcaaatgctcagccagtattttgagtacacccaacctcacccaggagatatatgtcacccagaaacatgtgctctccagaaagtcttcctgacatcatcggggcagtcctcctccacctcctcctcttcccagcaattcgttctgcaaattaatgccatccaaacaatcctagaaaagacccccacccacatctccactcccacccccacacctacacttgccaaccccactgcagtcggattggaggaagacagagagcaagacgttggaacaagcagcaggggtggagcctgggacacaaggatcaagagggaacttgagaaaatgagtgagaagtgcggaggccagatcaatggtggagacatcgctgtgtttgcgtcacgcgctggccacggcgtttgctggcacccgccgtgcttcgtatgcactgtctgcaatgagctcctggtggatctgatctacttttaccaagatgggaagatatactgtggcaggcaccatgctgagtgcctgaagccgcgctgtgctgcctgcgatgagatcatctttgcagatgaatgcacagaagctgaggggcgacactggcacatgaaacacttttgctgcttcgagtgtgagacagtgctgggcggccagcgctacatcatgaaggagggaagaccctactgttgccactgcttcgagtccttgtatgcagaatattgtgacacctgtgcccaacatataggtgaggcaatatttggcagtcagcttggtccttctgtgatgcggtcacctttgttttggggagtggggatagccgcagctgctctggatgctgtgctgattagagctcaccaaaggacccagggatgccatcatgagctctctgcactcttggcatttgagaaagggagtgagaagaaggaggaggaagaaggaggacaagtctccagaagttcttccttgaaagtccaggctcaggaactctcagccactgaagataaaggccacattagtccctttttctgggaagccgtgtatcattacgcatcaggagaatgcaggggtcctggtccaccctacagtcatagcttgaggctatattcccagcaggctctccccacgggaaggggccccagcagctcccagtttccattctgccagttttactgctgctataaaaagagcctgctgtgtgactgccttagcaaaagtcctgccttagaaaaagcaatgagaggtatcgaccaaggtcaaatgacctatgatggccaacactggcatgccactgagacctgtttctgctgtgctcactgcaagaaatccctcctggggcggccattcctcccgaagcagggccagatattctgctcacgggcctgcagtgctggggaagaccccaatggttctgactcctctgattccgccttccagaacgccagggccaaggagtcccggcgcagtgccaaaattggcaagaacaagggcaagacggaggagcccatgctgaaccagcacagccagctgcaagtgagttctaaccggctgtcagccgacgtagaccccctgtcactgcagatggacatgctcagcctgtccagccagacacccagcctcaaccgggaccccatctggaggagccgggaagagccctaccattatgggaacaagatggagcagaaccagacccagagccctctgcagctcctcagccagtgcaacatcagaacttcctacagtccaggagggcaaggggctggggcccagcccgaaatgtggggcaagcacttcagcaaccccaaaaggagctcgtcactggccatgacaggacatgctggcagcttcatcaaggaatgccgagaagactattacccggggaggctgagatctcaggagagctacagtgatatgtctagtcagagtttcagtgagacccgaggcagcatccaagtccccaaatatgaggaggaagaggaagaggaagggggcttgtccactcagcagtgtcggacccgtcatcccatcagttccctgaaatacacagaggacatgacgcccacagagcagacccctcggggctccatggaatccctggccctgtctaatgcaacaggcactaagacctgcagcgtgacattccaagcaaaagagacatgcagataccaggatgctcaatttgggaaagtaaaagccagagtcaaagaaagacaatcactgtggagtaaattccagggctcctgtggaatctgcctttattcccataaatacatacttaaatcaagcagttcctcttag

SEQ ID NO: 8395 - DNA, 1288 bp, Homo sapiens
  SIMILAR (647)..(979): 481254mologous to Ciona intestinalis prickle 2,accession number AB036841,Smith-Waterman Score=281.
aaataaaaaccccaaaaatcattatcctgaatcttatgtttcactgaaaaatgattttaccaagttgacttccaggaggcatcgtggtgtggaacaggcactagtgcagctctgccatgtatttgtgtgtgaacatgggcatgttattgttactctgagttctggatttatcgtctatagaaccagagctaactactcctcctctgcacagggagtggggatagccgcagctgctctggatgctgtgctgattagagctcaccaaaggacccagggatgccatcatgagctctctgcactcttggcatttgagaaagggagtgagaagaaggaggaggaagaaggaggacaagtctccagaagttcttccttgaaagtccaggctcaggaactctcagccactgaagataaaggccacattagtccctttttctgggaagccgtgtatcattacgcatcaggagaatgcaggggtcctggtccaccctacagtcatagcttgaggctatattcccagcaggctctccccacgggaaggggccccagcagctcccagtttccattctgccagttttactgctgctataaaaagagcctgctgtgtgactgccttagcaaaagtcctgccttagaaaaagcaatgagaggtatcgaccaaggtcaaatgacctatgatggccaacactggcatgccactgagacctgtttctgctgtgctcactgcaagaaatccctcctggggcggccattcctcccgaagcagggccagatattctgctcacgggcctgcagtgctggggaagaccccaatggttctgactcctctgattccgccttccagaacgccagggccaaggagtcccggcgcagtgccaaaattggcaagaacaagggcaagacggaggagcccatgctgaaccagcacagccagctgcaagtgagttctaaccggctgtcagccgacgtagaccccctgtcactgcagatggacatgctcagcctgtccagccagacacccagcctcaaccgggaccccatctggaggagccgggaagagccctaccattatgggaacaagatggagcagaaccagacccagagccctctgcagctcctcagccagggaactgggccagctccatgcacagagaaccacagaaattcagccatctctggtgtggacgtgagccagctggcagcggaatccctcaggggcttggcttgtggcgattctggcagtggtcacacccttcaaaacttgacaggggccctttactatctgtgctga

SEQ ID NO: 8396 - DNA, 2391 bp, Homo sapiens; identical to SEQ ID NO: 7016
  SIMILAR (1)..(900): 681254mologous to Homo sapiens triple LIM domain protein,accession number AJ011654,Smith-Waterman Score=1229.

SEQ ID NO: 8397 - DNA, 627 bp, Homo sapiens
  SIMILAR (313)..(32): 1001254mologous to Homo sapiens Protein sequence encoded by clone p199-7 (PL mutet.rsT4),accession number P93369,Smith-Waterman Score=542.
tcaacaagatggtgaattgactagtgggtagatccacaggacgggtgtggtcgccatgatcgcgtagtcgatagtggctccaagtagcgaagcgagcaggactgggcggcggccaaagcggtcggacagtgctccgagaacgggtgcgcatagaaattgcatcaacgcatatagcgctagcagcacgccatagtgactggcgatgctgtcggaatggacgatatcccgcaagaggcccggcagtaccggcataaccaagcctatgcctacagcatccagggtgacggtgccgaggatgacgatgagcgcattgttagatttcatacacggtgcctgagggcctgcagtgctggggaagaccccaatggttctgactcctctgattccgccttccagaacgccagggccaaggagtcccggcgcagtgccaaaattggcaagaacattgtcaggacggaggagcccatgcattatgggaacaagatggagcagaaccagacccagagccctctgcagctcctcagccagtgcaacatcagaacttccgacaggtgccacggactcgcgcaccgactccacacgctccacccacatacaaactacaacacacgagaacccgacgcgcat

SEQ ID NO: 8398 - DNA, 1239 bp, Homo sapiens; identical to SEQ ID NO: 7015
  SIMILAR (250)..(858): 681254mologous to Homo sapiens triple LIM domain protein,accession number AJ011654,Smith-Waterman Score=816.
  misc_feature (1)...(1239): n = a,t,c or g

SEQ ID NO: 8399 - DNA, 2879 bp, Homo sapiens
  SIMILAR (124)..(315): 711254mologous to Homo sapiens triple LIM domain protein,accession number U93305,Smith-Waterman Score=300.
atgctcaacatccagtcagtaccaggaattgggcaagggcattatagccgctatcttcacagcaatcccatgcattcaggggactttatttccaatattcatatgaggaagccaaagttcagagagatcatctttgcagatgaatgcacagaagctgaggggcgacactggcacatgaaacacttttgctgcttcgagtgtgagacagtgctgggcggccagcgctacatcatgaaggagggaagaccctactgttgccactgcttcgagtccttgtatgcagaatattgtgacacctgtgcccaacatataggtgaggcaatatttggcagtcagcttggtccttctgtgatgcggtcacctttgttttggggagtggggatagccgcagctgctctggatgctgtgctgattagagctcaccaaaggacccagggatgccatcatgagctctctgcactcttggcatttgagaaagggagtgagaagaaggaggaggaagaaggaggacaagtctccagaagttcttccttgaaagtccaggctcaggaactctcagccactgaagataaaggccacattagtccctttttctgggaagccgtgtatcattacgcatcaggagaatgcaggggtcctggtccaccctacagtcatagcttgaggctatattcccagcaggctctccccacgggaaggggccccagcagctcccagtttccattctgccagttttactgctgctataaaaagagcctgctgtgtgactgccttagcaaaagtcctgccttagaaaaagcaatgagaggtatcgaccaaggtcaaatgacctatgatggccaacactggcatgccactgagacctgtttctgctgtgctcactgcaagaaatccctcctggggcggccattcctcccgaagcagggccagatattctgctcacgggcctgcagtgctggggaagaccccaatggttctgactcctctgattccgccttccagaacgccagggccaaggagtcccggcgcagtgccaaaattggcaagaacaagggcaagacggaggagcccatgctgaaccagcacagccagctgcaagtgagttctaaccggctgtcagccgacgtagaccccctgtcactgcagatggacatgctcagcctgtccagccagacacccagcctcaaccgggaccccatctggaggagccgggaagagccctaccattatgggaacaagatggagcagaaccagacccagagccctctgcagctcctcagccagtgcaacatcagaacttcctacagtccaggagggcaaggggctggggcccagcccgaaatgtggggcaagcacttcagcaaccccaaaaggagctcgtcactggccatgacaggacatgctggcagcttcatcaaggaatgccgagaagactattacccggggaggctgagatctcaggagagctacagtgatatgtctagtcagagtttcagtgagacccgaggcagcatccaagtccccaaatatgaggaggaagaggaagaggaagggggcttgtccactcagcagtgtcggacccgtcatcccatcagttccctgaaatacacagaggacatgacgcccacagagcagacccctcggggctccatggaatccctggccctgtctaatgcaacagagaatcaagatgactgcagttttgtgaatagactgaaggggagcaataatagaccaggtaggaggcaagagttgatggtgacttggaacttcatccaggagagaaatggcagtggcatggaccagtgtgatgatggtggaggaaagatattagatcctgtgtatattttgacagtagagctaacgggatttgccaagggctggaaaatgttcagtgtcaaggaccagagtgtaaatgtattaggctttgcaggctgcctctctgctgatggtggtgccaagcgccaggagcacctatcccgattttccatgcctgacctcagcaaagactctggaatgaatgtgtctgagaagctgagcaacatgggcactcttaactcgtccatgcagttccggagcgcagagtcagttcgcagcctgctctctgcccagcagtaccaggagatggagggaaacctccaccagctcagcaaccccattggctacagagacctgcagtcccacggaaggatgcatcagagctttgattttgatggagggatggcgggcagcaagctgccagggcaggagggcgtgaggatccagcccatgagtgaacgcacccggagaagagctacttcacgcgacgacaaccgccgtttccgacctcacaggtccaggcgttcccgacgctctcgctccgacaacgccctccacctggccagcgaacgcgaggccatctcccggttaaaagataggccccctctgagagccagggaggactatgaccaatttatgcgccagcggagcttccaggagagcatggggcatgtggtcccggagggacctgtacggccagtgccctaggactgtgtcggacctggctttgcagaatgcctttggggaccgctggggaccctacttcgccgagtatgattggtgttccacctgctcctcctcttcagagtctgacaacgagggctatttcctaggagaacccatcccccagccagcgcgcctgcgatacgtcacaagcgatgagctgctgcacaaatacagctcctacggcctccccaaatcttccacattaggtggcagaggacagttgcacagcaggaaaagacagaagagcaaaaactgtatcatttcttaatatgattgggatcagggaatgggagaagatgggagctaagaatgtaaagtcagaaacttaaaaaaaa

SEQ ID NO: 8400 - DNA, 454 bp, Homo sapiens
  SIMILAR (16)..(216): 441254mologous to Homo sapiens cell matrix adhesion regulator variant,accession number AF034795,Smith-Waterman Score=102.
  misc_feature (1)...(454): n = a,t,c or g
aaaanacccctgccttcctctcccgaacaacccgcgggtcgaaaaggaactgcgcctgccctgtgcccttactgaaatttattttcgtgtaacccatttaccttttatgtggaaatcgaaaagccttttgataatagtagcaaagcaggaaggactgagtgggaacccacaagcccagttgaaagaaaatacatgacgtacttgagtgctcaggacccacgagctgattcaagttgtacagaatggacacttacagatgtgtggaaaatctgagacaggaaatgaagcctcaccagtaagctgaacaggggagatttaatgcaaacatttgtccctggctgggcactgtggctcatgcctgtaatcccagcactttgggggctgaggcgggagggttgcttgaggccaggagtttgagaccagcctgggcaatacagcaagaccccatctcaag

SEQ ID NO: 8401 - DNA, 276 bp, Homo sapiens
  SIMILAR (1)..(102): 1001254mologous to Homo sapiens cell matrix adhesion regulator variant,accession number AF034795,Smith-Waterman Score= 179.
atgacgtacttgagtgctcaggaccacgagctgattcaagttgtacagaatggacacttacagatgtgtggaaaatctgagacaggaaatgaagcctcaccagctgaggacgcggggtcaacccctggccacccatgcgcggagtcggatgagggctctgactcggtcaagtgcatcgtgctgcaggtgctccggggcctccagtatctgcacaggaacttcattatccacaggtgggtgacagctaggcagagttggaagcacaaattcggctga

SEQ ID NO: 8402 - DNA, 454 bp, Homo sapiens
  SIMILAR (110)..(454): 951254mologous to Homo sapiens PISSLRE,accession number X78342,Smith-Waterman Score=548.
  misc_feature (1)...(454): n = a,t,c or g
ccaagcttggcacgaggagagaggcggngccagcgctcggcatggcggagccagatctggagtgcgagcagatccgtctgaagtgtattcgtaaggagggcttcttcacggtgcctccggaacacaggatcgggcccgggacacccagacagatgagattgtcgcactgaagaaggtgcggatggacaaggagaaggatggcatccccatcagcagcttgcgggagatcacgctgctgctccgcctgcgtcatccgaacatcgtggagctgaaggaggtggttgtggggaaccacctggagagcatcttcctggtgatgggttactgtgagcaggacctggccagcctcctggagaatatgccaacacccttctcggaggctcaggtcaagtgcatcgtgctgcaggtgctccggggcctccagtatctgcacaggaacttcattatccacagg

SEQ ID NO: 8403 - DNA, 1350 bp, Homo sapiens
  SIMILAR (51)..(407): 601254mologous to Plasmodium lophurae histidine-rich protein,accession number X01469,Smith-Waterman Score=579.
  misc_feature (1)...(1350): n = a,t,c or g
tcataccaccaccttcgtcatcatcaccatcaccttcctcatcactgttttaccataataatcattaccatcactatcatcactattatcaccatcatcaccattgccatcattaccattaccaccatcttcaccatcatcaccatcaccatcatcatcatgatcactgttattaccataataataataataattgtcatcaccatcatcaccattatcaccatcaccatcattagtatcaccattatcaccctcatcaccatcaccatcatcactatcaccatcatcattatcaccatcaccatcatcaccatcatcaccgtcaccattattatcatcatcatcatcatcagcatcatcattaccaccatcttcaccatcatcactatcaccattattaccataataatcanccatcgccatcaccgttattcctgtaataataatcaccattatcatcaccatcacccccatcactatcatcatcatcactgttagcatcaccactatttgtaccaccatcatcatcatcataatcaccatcaccattatcaccatcatcatcactattatcattatcattaccatcacatcatcaccatcaatcaccatcactatcaccattattgccatgatcacaattatcattaccatcaccatcatcactatcatcccattttcatcatcactatcatcattaccattaccattatcaccatcaccatcgtcatcaccaccatcttcaccatcattattgccatcgtcctcatcattaccattatctctcatgttgtgaaacgtctcacacactttttcctcaaaatgcaatttcctctttcgactgtaaatatctcgatggccaagatgatgaagactttgtcgtgtataaactatgcactttgtactattattaagttcattttgtgaggtgatgttttctggatggtcttgatgcctgtggatgttcatcagtgtctgatttttggttcttatgaaggtggtttttgtgtagatcattgttaaatttggaattcctgcacgctgacgggtgcacagctgctggcacacagctggctggcacagaggccgcttctctgggcgcagaccccaggagctgctgctctgaaagaaggcaggagctgatagccagcacggcccaatggcctccacagaagtcgaattgttggttgggaaagagtgggacccagtcatggggttggcgacatttggtagcactggtgtaagtccagtttcacagaacaccaggacatcacggagcctcccacgcctggtgatgctgatgccggcacctgatatgtgattgacggagatcctgccttgtgccaccat

SEQ ID NO: 8404 - DNA, 427 bp, Homo sapiens
  SIMILAR (18)..(395): 371254mologous to Caenorhabditis elegans contains similarity to Pfam domain: PF01391 (Collagen triple helix repeat (20 copies)), Score=56.4, E-value=2e-13, N=2; PF01484 (Nematode cuticle collagen N-termi,accession number Z70756,Smith-Waterman Score=109.
  misc_feature (1)...(427): n = a,t,c or g
ncctggcagccttgtgtccatccgtcccttgtaaatgtggccatccaggcccaagatgtccacctcatcatgcttcatggcaatctggatctcttcagtaggatacaggccccggggaaggtgctgcgggcggctgcggtggtaggggtaggtgagggtgtggctgcccccgcagcgccggggcacagttgagtaggtgtaatcagccatatctgtcacccgtttgtagcagggggagcccaggcactgggcgtgcagcagctcgcggattatctggctgctggccttggtggagcccccgaagtggatctgcaccttctcaatgttcatcagcatcttggagtgcatggagcgcaggcgccccacgctttgctccatctgcgccaggtcaccccgagggaaggcgctgcccagcttgaggttgcgg

SEQ ID NO: 8405 - DNA, 517 bp, Homo sapiens
  SIMILAR (284)..(30): 511254mologous to Homo sapiens Human secreted protein, SEQ ID NO: 6135,accession number G02054,Smith-Waterman Score=174.
  misc_feature (1)...(517): n = a,t,c or g
ataccattctggaactcttccgtggcctggtaatagatggtgatggctacccgagcatctgtgtcaaaggtgaactcaacattgtagtggactttagctttactggccttcttctcccagggctcttcacttcctcagcacatttgacgagcctcagtgtgtcctttcggatattgacacaggcttctcagagtcttcacgggttcttggggaaggtggggcggcgttaaggaaacgacaaacttggtctgttcccccagaaagttcagatcgctntttttncccttctccaaacaggtaaccttcaggatgagttgagtcaaacttctctcctcccaataatgaagtggctggcaaaatagcttccggacttgggcgggtagcggtacacggaattagacgggatgtccacctcgctccacgcccgcgtgctgccggctcgtcaggcccccaatggccactgcggctgcaagccccggcccggccccggtgcaccgcgccgcagctgcgcgcttca

SEQ ID NO: 8406 - DNA, 2241 bp, Homo sapiens
  SIMILAR (33)..(185): 351254mologous to Leishmania major L8453.1,accession number AC008054,Smith-Waterman Score=68.
ttaagcttcctcctgaatgtttatttacacctccgctcactgagcggtgctggaccgcggcccccgcgtgggctcctcgagcccctccccaggaggcatgtccacgtgcctctccagccccctgtttgccaccgcggcggagctgggcgggtgggctgtgttcggctgggagagacggccctcggaggaaggtctatctttctgttgacgagaagaaactgaggtgttgccagccgaaatctgggcgctctgtggccgagagggcagctggccattgctgctgagggatggcggcctgtgcacgtggggcctgggctgctgggacttgcgctttgaggtccctgagcctggggtttccagggcaggaagggaggcatctagaaaggcgcatacacagctaaatgcatgatgggaagtgacaaagcgcaggcttcgggcattgccacgggaggcgggcattcgggggctgaagcggtggggctcagcagagggcactgtgctgagttttgaaggaggaggaggcctgtcttttcggaggatgcctggcagccttgtgtccatccgtcccttgtaaatgtggccatccaggcccaagatgtccacctcatcatgctgtagaagtgaacagataccgtcgccactgtagcagccacagccctcccctggccccttcacacgggacttcatggcaatctggatctcttcagtaggatacaggccccggggaaggtgctgcgggcggctgcggtggtaggggtaggtgagggtgctgagctccccgcagcgccggggcacagttgagtaggtgtaatcagccatatctgtcacccgtttgtagcagggggaagcccaggcactgggcgtgcagcagctcgcggattatctggctgctggccttggtggagcccccgaagtggatctgcaccttctcaatgttcatcagcatcttggagtgcatggagcgcaggcgccccacgctctgctccatctgcgccaggtcaccccgagggaaggcgctgcccagcttgaggctggaacccacagggctccaagagcagcctgaagtcctctgaactatggactcccatcccatatgtcccatatgctgtcccatagcatacttgcggctatgctgccggacctgctccagttcaaacaccgtgtaggggcggatggaatggtgcccaggtaggcctggacccgcgggggtcacggggatggcactccgcatggcagccgcctcgtctgcctggtagagtggggggcgctccctgagctgctgtcgcagcgatttccaccgatcctccagcaactgcttcactgggtccagctccaggcggtccagcttgttgtccatctctgtgagcagcctgtccagcatcttctgccagtcctgctcctgcccgctcatcttggccaccagctcctgcatcatgtggttcagctgctccgtggtggcatcaaactggacacggctcactttggtggccagagcactcttgtcggctttcacatcgatctccatctccaggtgctccctgttggccttttccttttcgagcttctccagaccgtggtacagcatagcaatgtccttctgtttctgccgatggtcctcgatgaggttgctggtggtgatgttgagcttctcgcagtcaccctgcacctgcaggatggcactctgcacacggcccagcagctcctcgtcctgtctctggagcttggccttcttggagggtcgggagacggccaggctgttgcccatgtcttggagttgctcatagcgccgcaccagcgtgctgtcttgatgaaaaaacaaacaaggctgcaggctggacaggtggcctcagggtcgatctggccaggagccaaggtgtgggccttgtgcggggccatgctcatggacaggagcgtggaggaggaggtcagcatgctctcaatgatcatcctgagcttgtccaactggtcctgcaggtaaagggaggcttcagagacagaattttccatggcagccttgcccctgtcttggctctccctcaactcggccagttccttttctatgtcagccgcggtgtctgtgagtacacccagttgcaatctcagatgtccagcgttcagttccttccctccttaatgattcccttctccttgcaggttcatatacagccgttcctcttggggtttctcccggcacacttctgtggccctcgtgccaaactatgcgtgtcgattcctcgctcc

SEQ ID NO: 8407 - DNA, 948 bp, Homo sapiens
  SIMILAR (473)..(535): 851254mologous to Homo sapiens ribonucleoprotein SS-B/La (AA 1-408),accession number X13697,Smith-Waterman Score=87.
atgaaatctctagaagaaaagattggatgcttgctgaaatttttgggtgatttagatgatcagacctgtaaagaagatttacacatcctcttctcaaatcatggtgaaataaaatggatagacttcatcagaggagcaaaagaggggataattctatttaaagaaaaagccaaggaaacattgggtaaagccaaagatgcaaataatggtaacctacaattaaggagcaaagaagtgacttgggaagtactagaaggagagctggaaaaagaagcacttaaaaaaataacagaagaccaacaagaatccctaaacaaatggaagtcaaaaggttgcagatttaaaggaaaaagaaagggtagtaaagctgcccagcctgggtctggtaaaggaaaagtacaatttcaggacaagaaaacaaagtttgctagtgatgatgcacatgatgaaaatggttcaactggacctatgaaaaagaggaagagaagaaacagacaaagaataacctgcatccaaacaaccgaaaacagaaaatgcttaaaagtgaagcaagttaggcctgtggaggctcagtttgaactccagcactgccttactaaatcatctcctccagaagaacagagaagttctctcttcaaggggtctctcaccaacagttttgagagcgaaattttcttcctagaagtgaatgggaattatctctctgtgaaaaaataccaatatgcttgtaaagagagaaaacaaggaaaagagatggagtcaggaggtgcttcttttgtgtctggaaggttggctgtgttttgtggagacttggaacaaggtgaggttggcagccctctccagagacgagcctttatccccagtcatccctcgctggtttctccagaggcccatgtggacaaggaggggccagagaaggaagtggggaggggaggattgcagagataa

SEQ ID NO: 8408 - DNA, 1645 bp, Homo sapiens
  SIMILAR (981)..(1322): 411254mologous to Rattus norvegicus La/SS-B protein,accession number X67859,Smith-Waterman Score=186.
ccggcggcgctgggaggtggagtcgttgctgttgctgtttgtgagcctgtggcgcggcttctgtgggccggaaccttaaagatagccgtaatggctgaaaatggtgataatgaaaagatggctgccctggaggccaaaatctgtcatcaaattgagtattattttggcgacttcaatttgccacgggacaagtttctaaaggaacagataaaactggatgaaggctgggtacctttggagataatgataaaattcaacaggttgaaccgtctaacaacagactttaatgtaattgtggaagcattgagcaaatccaaggcagaactcatggaaatcagtgaagataaaactaaaatcagaaggtctccaagcaaacccctacctgaagtgactgatgagtataaaaatgatgtaaaaaacagatctgtttatattaaaggcttcccaactgatgcaactcttgatgacataaaagaatggttagaagataaaggtcaagtactaaatattcagatgagaagaacattgcataaagcatttaagggatcaatttttgttgtgtttgatagcattgaatctgctaagaaatttgtagagacccctggccagaagtacaaagaaacagacctgctaatacttttcaaggacgattactttgccaaaaaaaatgaagaaagaaaacaaaataaagtggaagctaaattaagagctaaacaggagcaagaagcaaaacaaaagttagaagaagatgctgaaatgaaatctctagaagaaaagattggatgcttgctgaaattttcgggtgatttagatgatcagacctgtagagaagatttacacatacttttctcaaatcatggtgaaataaaatggatacgacttcgtcagaggagcaaaagaggggataattctatttaaagaaaaagccaaggaagcattgggtaaagccaaagatgcaaataatggtaacctacaattaaaggaacaaagaagttgacttggggaagtactagaaggagaggtggaaaaagaagcactgaagaaaataatagaagaccaacaagaatcccctaaacaaatggaagtcaaaaggtcgtagatttaaaggaaaaggaaagggtaataaaagctgccccagccctgggtctggtaaaggaaaagtacagtttcagggcaagaaaacgaaatttgctagtgatgatgaacatgatgaacatgatgaaaatggtgcaactggacctgtgaaaagagcaagagaagaaacagacaaagaagaacctgcatccaaacaacagaaaacagaaaatggtgctggagaccagtagtttagtaaaccaattttttattcattttaaataggttttaaacgacttttgtttgcggggcttttaaaaggaaaaccgaattaggtccacttcaatgtccacctgtgagaaaggaaaaatttttttgttgtttaacttgtctttttgttatgcaaatgagatttctttgaatgtattgttctgtttgtgttatttcagatgattcaaatatcaaaaggaagattcttccattaaattgcctttgtaatatgagaatgtattagtacaaactaactaataaaatatatactatatgaaaagagcaaaaaaaaaaaaaaaaa

SEQ ID NO: 8409 - DNA, 597 bp, Homo sapiens
  SIMILAR (2)..(109): 771254mologous to Homo sapiens Human secreted protein, SEQ ID NO: 7176,accession number G03095,Smith-Waterman Score=142.
atgctcgacatcactaatgatcagggaaatgcaagtcaaaaccacaatgcgataccaccttactcctgcaagaatggccataatcaaaaaatcaaggccgggggtctgtggaccacagttcacagcctcctattgttccagttggaacagaggactcagcagggctatggcccaatcactcaccccaagacccctctccaccctccagcactgcttgcagtggatcgtggaagtcggtcctcggtgccagccacagactccctgcccagtgctcatgacagacagcagcagttccacacttgggtctgcagcaggctcctggcaacagtgagagcagacccagctgatgggcagcagccgcaggcgagggcggacgtgtgtgggtgtaggggaacgggttttattaacctcgtaatgatccacttaatgggctttgaagtcgggcgcatccagcagctagagcaggtggccccgaggccacagggtgtgagctgggaagtggactcctctgaccacctgcagggcagccccagagtggagcctccagggacctgggaccttcgagtgctctgctcgcagggccagtcggaaggctga

SEQ ID NO: 8410 - DNA, 939 bp, Homo sapiens
  SIMILAR (1)..(63): 661254mologous to Homo sapiens Human secreted protein, SEQ ID NO: 7193,accession number G03112,Smith-Waterman Score=78.
atgaatagccatttcttaaaagaagatatccaaatggccaataaacatatggaaaaatgctcacacattactaatgatcagggaaatgcaaatcaaacccacagtgcgataccaccttacttctgcaagaatgcccataataaaaaaatcaaaaaaatagtagatgttggcatggatgtggtgaacacggaacacttctacactgctgattatcctggttcctatattgttcgtcccagttctagtatcagacatttcttcaaagagcctgattcctttcagaatggtaggaaaacttacatctggctgctgaatgagcacattgtatcttctccctcattggcaatgctaggaagtatatcgcatggtctagctgtccgccagcctcgggtcctccttgcagccctcgccctggttttgtccgccttccctgcctcctcttctgggggagttagattgagttgtaacaagaacatgccactgtctcactggctgcagcgtgtggtccccttaccagaggtaaggaagagatggatctccactcatgttgtagacagaatgtttatgtcctctccaaattcttatgttgaaaccctaacccctaatgtgatggtatgtggagatgggcctttggtagtgaggatgcgaagagaaggtggctgtctgcaaccagaagagagccctcaccagaaaccggcagagctaagacttaggggactggcagactattgcaaaaagggcacggggcagagggactatgttgtgagcctgcgaaagaagtttgtgtggggactgtgggcagtgaacgcgttgggaacaatatggaaaactgggagccgccttggaatctacagggccggacagcagcaaaactctttgtgtatctgcgttcctttcaacaagtgtgacttcctcaatggcatcattcgtgagcgttaa

SEQ ID NO: 8411 - DNA, 645 bp, Homo sapiens; identical to SEQ ID NO: 1232
  SIMILAR (84)..(143): 701254mologous to Homo sapiens reverse transcriptase,accession number L27428,Smith-Waterman Score=87.

SEQ ID NO: 8412 - DNA, 1326 bp, Homo sapiens
  SIMILAR (295)..(1176): 251254mologous to Babesia bigemina 200 kDa antigen p200,accession number AF142406,Smith-Waterman Score=246.
atgctcaacatcactaatgatcagggaaatgcaaatcaaaaccacagtgcgataccgccttacttctgcaagaatggccataataaaaaaatcaaaaaaatagtagatgttggcatggatgtggtgaacacagaacacttctacactgctgtaacctatggaaagaaagaaatgtctcatatgtttctgcctaaattggtctttaatactttagcgattctcttgagtttggattataaaatagtttttggtctttttgtattttctgctgtaagcctgtatgattatgtaatgaagaattccgcgaggcggaggccgcacgagaaaaaaaaactcagaaaacccaacgacaggatcggagcacgaaagaacgagaagaagagcgagcaggggagagcgcgcggagtcagagaagagcaaaagcgaagacaaaagagaaaagagaaccagcccgaagaagaaaacggggcgggaacgcgaaagaaccgaggacgaaggtcgaggagggcctgcacaactacaaggcggcagagcgagggaaggcggacaaaagcacacagagcgccggcgccgccggcccatagaaacggaacggcggcgaggcgcaggaaaaacaagaggctaggggaggaccgagggcagaccgggcaagggacgcgagcgtgggggaaggctgaccaaggatgcaaacaaaggaaggagggggcaagaaggcagagaggaacgaaaagcggccagaaggacaggacaggtgcgaacaacagggacgaaaggcggggggagcgggagacgcagaaatcgagagcagtgagagataggaaaagaaacaaacggagccggcgagcgcagcgcgggtcaggagcagagcgaggctgcagcgggagcgaaccgggggccacgagacacaggacagaggaacaaacaccgaagcgggaagaccgacgacggacagagagcgaggaaacgaggagggaatcgggagacgggaagggcgggacggaaacgcgaacggcaaggaggcagatacggaaggaggagccgccggaggggagacaagaagccagagaagaaagagaagaaaagaaaacgggagagaggaagggagaggagaggagagaaaagaagaggacaagaagaagagaaagaagaacgaaaaaagagaaagaagaaacagagggcaaaggcacccataaccatgcataccacacgacaggcccccctcaccttgcctcctcccctctcactcttatgccagcccctgccattccccaccccctgtgtagactgcaagactcaacaagtgacttgctgagcaaaccctgctga

SEQ ID NO: 8413 - DNA, 496 bp, Homo sapiens
  SIMILAR (265)..(393): 881254mologous to Homo sapiens bA395L14.2 (novel protein),accession number AL078621,Smith-Waterman Score=190.
aactaaataagcttgtggtcaatgtttcatctttatcatgttacaacgttccgtaaaagcttgttaggacttttgttcttcttcagttttagaaaagtggttaatcccaaggacccaatgtgacctttgatgtactgaccctggaaagttaaatatggaatcactcaattactattctttttgtaaatttctaaacaccataaagcatttaatgaactggaattgataggtgaactgtgtcattttaataagcataatgtaatcacgtcatattttgttttgtttgcaggcagaaatttagataaggatatccttaaacagctgtttatagctactgtgacagaaacagaaaagcagtggacaacacatttcaaagaagatcaagtttgtacataacactagtggcatttcttatcaaaaggattggataataaaaataagtttctactgggaaaaaaaaaaaaaaaaaaaggcgcctcgggccgaaaaaaaaaaa

SEQ ID NO: 8414 - DNA, 1385 bp, Homo sapiens
  SIMILAR (495)..(560): 721254mologous to Homo sapiens ORFII,accession number X52235,Smith-Waterman Score=105.
  misc_feature (1)...(1385): n = a,t,c or g
tttatccccctgggaatttttatagtttcaggtcttaggtttangtccttaatccatcttgagctgattttttgtatagggctggacgttcgcttaggcaaggatttcatgaccaacaacctgaaaggaaatgcaataaaaacaaagataaatttctgggacttaattaaactaaagaatttttgcaaggcaaaaaggaatagtcagcagagcaaacagataacaaacagagtgggagaaaaccttcataatctgtacatctgacaaaggactaacatccagaatctacaacaaactcaaacaaatcagcaagaaaaaaacaaacaatcccatcataaagtgggctaaggatatgaatagacagttctcaaaagaagatatacaaatggccaacaaacatatgaaaaaatgctcaacatcactaatgatcagggaaatgcaaatcaaaaccacagtgcgataccaccttacttctgcaagaatggccataataaaaaaatcaaaaaaatagtagatgttggcatggatgtggtgaacacggaacacttctacactgctggaaaagaagtcattatacgaaaaagatacgtgcacacgcatgtttatagcagcacaattggcaattgcaaaaacgtggaaccaacccaaaggcccatcaatcaatgcgtggataaaggattggtgtcaatcaaagacaaatcacaacaagtgattgtcccgggtgtcccatgagcctctatgatctggaggagactccagtcgagctggaaggatgacactgagagaacaaatcgattggtcctccttgggcagaaatttaggataaggggatatcccttaaacagctgtttatagctactgtgacaggaaacaggaaaagcagtgggacaacacgtttcccaagaagatccaagtttgtacataaccactagaggcatttccttatccaaaaggattggataataaaaataagtttctactgggtaatattccaagcatttatttattactttagttaccgaattcccaatatactttaaaaatggtatttgttttacagcatacctaaaatggtagcaaatccggtactgtaaaacatttaacattcatacagttatatataatatccttttttttaaagaatggtatttcacaaaaatgtcttttgaaattggctttggagtttaccatatactgaacatgaaagtttataataatgatgatacaactttcaacattgtcattttttcttagaactttcagctgattgcaagagatataatgattacattgttattaaatttttttaacacaagtaaagtgacaccattttatgacatgaaataaaaggttatgactgtttattgatgttgatgttgacggcc

SEQ ID NO: 8415 - DNA, 1672 bp, Homo sapiens
  SIMILAR (1266)..(871): 511254mologous to Homo sapiens similar to 3- hydroxyisobutyrate dehydrogenase ; similar to P29266 (PID:g416873),accession number AC007130,Smith-Waterman Score=237.
tttttttttttttttttaccagtatagaaatttatttgaattcaaaataatatggctatatttataataatataataattatctaaagcaaatatcatcattggctctgaaatgcgtctaaagatgtcattcttaagtcaaaaaatacgttgggaagattgtccaagaaagaaaaaaatataaaaacaagtctgctgagtgtcgggaggtgggaggggatatccaccctttgtgggaggcggagcccaaataggaaacaatccaccaacaattctcctgctttatttccagctccctggaaaattaaaccaagtaacccctggtagttgcagtaaccattttggttgaacagggacaaacttcctgattggacacagattagtaattcacctggcatttccccttccgctaacttctctcttcacaccaattccttttctttccctttaaggatgggtttcatcctgttgacaaaagatttggttttatttggtaaagtaaagcagataatatcctgattgaagtattcaatgatttaggttgaggatgcttgggggatcaaactttgtaaaaaaggtccaattaacctagttagccagagactatccagtggcttgccagaaaaaaaattcggataatatgtttgttaaaaagacaaaaagaataagcggtgaaaaatccttagggattactgtgaccctagacaatccaaaagcaggataggtgacctttgattaaatcccatttacattgtggagtgagctaaaaggaggctcccaagacagagtttggttcccaacagtgtcccgtggccaaagggcacactcaaaagtgtctcctcctctcgtaggaactggaacacggaatgaagaagtctttctttgagtagccctttgcaacacatcatcctgtagatctgatgggccagactgcccaagaaggattgggctctttgtgctggtagcagagtcttgtgccaatcccagatccttaagccaatgaagtgttgttccaaaatccaccctgaatagttaattagccgagggaacgccatccatcactcccaggtacaggattataagtgtcacttgaccaacaccgtcctgagctcatattttaggattttagcccagtagttttgggtcaaagcccttaacctggattcccaagattcatagcttcagcagttccaatcatactaatagctaacagcatgttgttgcaagatctttgccgctggcaagatattgcctgactccagagacaaagccattgatggaaacaatccagaaacagggttctcatcgtccaggccttcttgctgcccagtcccaacagctccacagtacaccacgttggagcccatgcaccccagcaactcttgggcagcagcaaattcatcttcaactcctcccaccataaacgtgaggttcccagatcgtgcagctcctacacctgaatcatttgggggtaaagggatagaagcaaaagaatatattttttgttccttcttagtaatggctgtctgaatatctctggtcgttggaagtttactcatgtgtttacctcttcttgaatcaattttggtaacatttttttctagaaaatcacctatttcttctggactttccatttttctgcccacaaacttataattccttatttcatccat

SEQ ID NO: 8416 - DNA, 399 bp, Homo sapiens
tttttttttttttttttttgagacggagtctcgctctgttgcccaggctggagtgcagtggcgcgatctcagctcactgcaagctccgcctcctgggttcacgccattctcttgcctcagcctcctgagtagctgggactacaggcgtctgccaccacgcccggctaattttttgtatttttagtagagacggggtttcaccatgttagccaggatggtctcaatctcctgacctcgtgatccgctggcctcggcctcccaaagtgctgggattcagaaaaactcttttttttttttggagacaagagtttccgcttttgttgcccaggctggagtacaatggtgtgatctcggctcaccgcaacctccgcctcccgggttcaagtgattctcctgtct

SEQ ID NO: 8417 - DNA, 491 bp, Homo sapiens
cggccgccgctttttttgttttttttgagacggagtttcgctctgtcgcccaggctggagtgcagtggcgcgatctcgactcactgcaagctccgcctcctgggttcacgccattctcctgcctcagcctcccgtgtagctgggactacaggcgcgtgccaccatgcccggctaatttttgtatttttagtagagacggggtttcaccgtgttagccaggatggtctcgatctcctgacctcgtgatccacccgtctcggcctcccaaagtgctgggattacaggcaatgagttgatttttaactactgggtttaggccaggcaggcccaggcctggttttgggcctggcgctgggctgcctgtctttggttttacttccttgttgttttttcttaaaacaggtactgagtatcaaacaatataaaacaatataagaaggtctctctcttccctcaattctagctgcaagttttgagcactagacagcaga

SEQ ID NO: 8418 - DNA, 2248 bp, Homo sapiens
  SIMILAR (28)..(417): 1001254mologous to Homo sapiens histone H2A,accession number Z83739,Smith-Waterman Score=650.
agttcctccatttatcgtttcttcgtcatgtcgggacgcggcaagcagggaggcaaagctcgcgccaaagccaagacccgctcttctcgtgccggtctccagttccccgtgggccgagtgcaccgactgctccgcaagggcaactatgctgagcgggtcggggccggcgcgccggtgtacctggcggcggtgctggagtacctgactgccgagatcctggagctggcgggcaacgccgcccgcgacaacaagaagacccgcattatcccgcgccacttgcagctggccatccgcaacgacgaggagctcaacaagctgctgggcaaagtcaccatcgcacagggcggtgtcctgcccaacattcaggccgtgctactgcccaaaaagactgagagccaccacaaggcgaagggcaagtaactatctgtactagtttgtggcagctcaagtaaaatcgagtccaaaccaacggctcttttcagggccacccacgtcttctctaaaagaacttaacatttattccatgtgaaagaaagtgagacatggacaagactctagtcataaattacccatctttttgaaaacagtgtagcgaacaccgcagatttaaaagaaaaactagagggaaggtggtccagattttaccacgcttaaaagttaagatgtgaacaaatctcttaggccattacttaattttaaacttaatcagtgtgtgtccacagagcaccagtggcttcgtgagttcttgaagcactttggcccaaaagagttatcgcccgggctagaatttagcagacagctgttccacgcgggccagggcggcatgaagaagtcccgccgctactggcccggcacagtggccctgcgcgacgttcggcgctaccagaactccgagctgctgatcagcaagctgccgctcctgcgagagctcggcggtgacgccgctgcacgagagcgaggctgaagaactttgtgacacaatagtccacctccctgcaaggctctgtcagagactcacatctttcctgatggatagctgtgaagcattctcttacccaccctactgcatgttgcaaagtattcctttaaaatgaagtgagtaaaatactgggatgacgttatctggagccaagaagatggctcatttggaaaggcctaatatcccaagttgcttacctagaagaacttgacaggatagttaataataaaccttaaaacccatgaagaaatctgaggtaaagtgttagcacacagactgttaaaatgtctgcctcacagataggagggaaaatatatagaggattataatatggttcaacaaatgttgatgagtattagaaatgtacattagaaatattagaaatgtttatgactattagaaaagtacagggtattgggcgttcctgacacaaactgaggcctcctagcaagactggcagttttctgtaaaggagggttatttactacggtagtgcaaataacttttggtgttgtagctaaataaggaatactcatgccaagatcatcgaattgtgcctcctccctctgttcactgaactctgatgtaattttttttttttttttttgagacggagtctcgctctgtcgcccaggctggagtgcagtgggcgctatctcggctcactgcaagctccgcctcccgggttcacgccattctcctgcctcagcctcctgagtagctggggctacaggcgtctgccaccatgcccagctacttttttgtatttttagtagatacggggtttcaccgtgttagccaggatggtcttgatgtcctgacctcgtgatccaccggcctcggcctcccaaagtgctgggattaccggcgtaagccaccacgcccggcccactctgaagtaatcttaagaagacgttaactcatttttcttgtgtattgtagacacttttggctgtctggtaacatggaaaatctcagaatgatgttttaagtatataaaatgcccaaacaaagttaaattacagttatcaaagtatttttaaaacttcatagtgataaatgagactatatagttatattgttaatatagttaacacattacatgatttggtgagcctaattgctgttactaattagaggagtaaaaatgtttcacgataactcagcaattgtaatgagaaatgaaacatctaatgtcttttgggttacaaagtaacaggtactgagatttgtggcctaaattcataataaagtgaaatgttcaagttc

SEQ ID NO: 8419 - DNA, 3309 bp, Homo sapiens
  SIMILAR (39)..(1382): 1001254mologous to Homo sapiens tapasin,accession number AF029750,Smith-Waterman Score=2369.
ggaagaggaggcttcatggctgaggaggtcgcagcgccatgaagtccctgtctctgctcctcgctgtggctttgggcctggcgaccgccgtctcagcaggacccgcggtgatcgagtgttggttcgtggaggatgcgagcggaaagggcctggccaagagacccggtgcactgctgttgcgccagggaccgggggaaccgccgccccggccggacctcgaccctgagctctatctcagtgtacacgaccccgcgggcgccctccaggctgccttcaggcggtatccccggggcgcccccgcaccacactgcgagatgagccgcttcgtgcctctccccgcctctgcgaaatgggccagcggcctgacccccgcgcagaactgcccgcgggccctggatggggcttggctgatggtcagcatatccagcccagtcctcagcctctccagcctcttgcgaccacagccagagcctcagcaggagcctgttctcatcaccatggcaacagtggtactgactgtcctcacccacacccctgcccctcgagtgagactgggacaagatgctctgctggacttgagctttgcctacatgccccccacctccgaggccgcctcatctctggctccgggtccccctccctttgggctagagtggcgacgccagcacctgggtaagggacatctgctcctggctgcaactcctgggctgaatggccagatgccagcagcccaagaaggggccgtggcatttgctgcttgggatgatgatgagccatggggcccatggaccggaaatgggaccttctggctgcctagagttcaaccctttcaggagggcacctatctggccaccatacacctgccatacctgcaaggacaggtcaccctggagcttgctgtgtacaaaccccccaaagtgtccctgatgccagcaacccttgcacgggccgccccaggggaggcacccccggaattgctctgccttgtgtcccacttctacccttctgggggcctggaggtggagtgggaactccggggtggcccagggggccgctctcagaaggccgaggggcagaggtggctctcggccctgcgccaccattccgatggctctgtcagcctctctgggcacttgcagccgcccccagtcaccactgagcagcatggggcacgctatgcctgtcgaattcaccatcccagcctgcctgcctcggggcgcagcgctgaggtcaccctggaggtagcaggtctttcagggccctcccttgaggacagcgtaggccttttcctgtctgcctttcttctgcttgggctcttcaaggcactgggctgggctgctgtctacctgtccacctgcaaggattcaaagaagaaagcagagtgagggcactcactgccatcctgtggaagccaccatcatctctggcccaagcttctgtagtagctccctaaaataataccctatcatctgctcctaatccctccaatctctctccactgagtgctggaatgccttttttttttttctttcacttatataagggataattttttcctttttttttttttttgagacggagctcacctcttccgcccaggctgcagtgcagtggcatgatcttggcttactgcaacctccgcctcctgggttcaagcaattctgtggcttcagcctccggagtagctgggattacaggcacatgccaccacacccagtgaatttttgtatttttagtagagacggggtttcaccatgttggccaggctggtcttgaattcctgacctcaggtgatctgcccacctcagcctcccaaagtgctgggattacaggcgtgacgaccacaccaggcccgagaaatgcttttttaaaaaacacacatcttatggcattcaccttcttggagctctaggaacgtggttctcaatttttctctcaggactcttaaaaatcatcaaggtaccccaaaaagcttttgggtatgtgggttatagctatcaatatttatggtactagaacttaaaagtgagaaaaatttaaaacacgagaatacataggcacacattctattcatcgtgggaaccatggtgtcaatacatatcatgtagcttctgaaaaactccactgtacacttatagaatgaagaaggcaaaaaactttttttttttttttttgagacgggagctcgcctcctgtggcccaggctggagtgcagtggcgggatctcggcttcactgcaaagtccgcctcccgggttcacgccattctcctgcctcagcctctctgagaagctgggactacagggcgtcctgccaccatgcctggctaatttttttttgtatttttttagtagagacggggtttcaccgtttttagccgggatggtctcgatctcctgacctcgtgatcaggcccgcctcggcctcccaaaagtgctgggattacaggcgtgagccaccgcgcccggcctgaaaataatctttctttttttctttttttctgagacagagtctcgctctgttgcccaggctggagtgcagtggcacgatctcggctcacggcaccgtccgcctcccgggttcacgccattctcctgcctcagcttcccgagtagctgggactacaggggcccgccaccacgcccggctaactttttgtgtttttagtagagacggggtttcaccgtgttagccaggatggtctcgatctcctgaccttgtgatctgcccgcctcggcctcccaaagtgctgggattacaggcgtgagccatcgtctgcgcttctatttcgatcaccaagatgtggctccggaatgcggggcttacttcttccatgaattggccaaggagaagcgcaagggtgttgagcgtctcctgaagatgcaaaaccagcgtggtggccctgctgtcttccaggacatcctgaagccaggtcaagatgagtggggtaaaaccctggaagccatggaagccgccatggccccggggaaaaatctcaaccagagtcttttggatcttcatgcactgggttccgcccctacagacccccatctctgtgacttcctggagagtcacttccgagatgaggaagttacctttatgcctcggaagagtgcagacctccatgcagcgggtgaggctgccagcctaggtggggtgtcattgaatgtcatgaagggagccagccttcatgcactctgcctgcgtctcctgaacagctttggaccaggagttgctaccttgtgcggagaacgtgtggtgcataagaacaaccgagcctctgctcttcgaaaatgtatattctggccag

SEQ ID NO: 8420 - DNA, 2271 bp, Homo sapiens
  SIMILAR (340)..(2268): 1001254mologous to Homo sapiens zinc finger protein 7 (ZFP7),accession number M29580,Smith-Waterman Score=3546.
atggccgggcctccgagcggcccagggcggccggaagtttgcggggcggggcggacgcgggtggccaaggcccgtttccggcggcgtcgcgcgtttgcgagcctcgggtggtcctcagggagggaggtggtaacatttggcgatgtggctgtgcacttctctcgggaggagtggcagtgtctggaccctggccagagggccctctacagggaagtgatgctggagaaccacagcagtgtggctggactagttgggggaaccctgaaggaagcttctaaacagaggccttggctggcccatggatcaactgctcatctctgtactgaccggcacaaagaggcaggattcctggttttcaagcctgagctgatctctcggctggagcagggagaagagccatgggtcctcgacctgcagggagcagaggggacagaggcaccaaggacctccaagacagattctacgattaggactgaaaatgagcaggcctgtgaggacatggacatcctaaaatcagaatcctatgggacagtggtcagaatctccccacaggactttcctcagaatcctggctttggagacgtttctgattctgaggtctggttagacagtcatctgggcagtcccgggctgaaagtgacaggctttaccttccaaaataactgtttgaatgaggagactgtggttcccaagaccttcaccaaggacgcaccccagggatgtaaggagctgggaagcagcggcctggattgtcagcctcttgaaagtcagggagagagtgcggaagggatgtcccagagatgcgaggagtgtggcaaaggcatcagagccacttcagatatcgctctgcattgggaaattaatacacagaaaattagcagatgtcaagaatgccaaaaaaagttatctgactgcttgcaggggaaacatacaaataactgccatggagagaagccgtacgaatgtgcagagtgtgggaaagtcttcaggctctgctcgcagcttaatcagcatcagagaatccacacgggagagaaaccctttaaatgcactgagtgtggaaaagccttccgcctgagctcaaaacttattcagcatcaaagaatccacactggggagaagccctacagatgtgaggaatgtggaaaagcttttggtcagagctcaagcctcatccaccatcagagaatccacacaggagagaggccctatggttgtcgtgagtgtgggaaagccttcagccagcagtcgcagctggttagacaccagagaactcacactggggagaggccctacccttgcaaggagtgtgggaaggccttcagccagagctccaccctagcccagcatcaaaggatgcatactggggagaaagctcaaattctaaaagcctcagacagtccaagccttgttgcacatcagagaattcacgctgtagagaaaccatttaagtgtgatgagtgtgggaaagcttttaggtggatctctcgcctgagtcagcatcagctgattcacactggagagaagccttataaatgcaacaagtgtacaaaagcctttggttgtagttcacggcttattcgccatcagagaactcacactggagaaaaaccatttaaatgtgatgagtgtggcaaaggctttgttcagggctcacaccttattcagcatcagcgaatccacactggagagaaaccctatgtgtgtaatgactgtggaaaagccttcagtcagagttccagccttatttaccatcagagaatccataaaggagagaagccctacgaatgcctccaatgcggaaaagccttcagtatgagcacacagcttacaatacatcaaagggttcacactggagagaggccctataaatgtaatgaatgtgggaaagccttcagtcaaaactcaacccttttccaacaccagataattcatgcaggggtgaagccctatgagtgcagtgagtgtggaaaagccttcagccggagctcatatcttattgaacaccagagaatacacactagggcccagtggttttacgaatatgggaatgccctggaagggtccacctttgtgagccgtaaaaaggttaatactataaagaaactgcatcagtgtgaagactgtgagaagatatttaggtggcgttcacacctaattatacaccagagaattcacaccggggagaagccttataaatgcaatgactgtggcaaagcttttaatcgtagctcaaggcttacccagcatcaaaaaattcacatgggatag

SEQ ID NO: 8421 - DNA, 2660 bp, Homo sapiens
  SIMILAR (385)..(1596): 581254mologous to Homo sapiens zinc finger protein,accession number AF244088,Smith-Waterman Score=1079.
atggccgggcctccgagcggcccagggcggccggaagtttgcggggcggggcggacgcgggtggccaaggcccgtttccggcggcgtcgcgcgtttgcgagcctcgggtggtcctcagggagggaggtggtaacatttggcgatgtggctgtgcacttctctcgggaggagtggcagtgtttggaccctggccagagggccctctacagggaagtgatgctggagaaccacagcagtgtggctggaataggtgaggatgcaccttggggccccttcccctgcatcatcagtcagcacccacccagccaggcctccatcagagggccctgtgtgtacacagttgctgatgtaccagtaactggaattgcagtcattcccccagcagcagtttgcttctccaggctcaaagattgtgacaccaggactgaagacaaggagtttcttcacaaggaagacattcatgaagatttggaatcacaggcagaaatatcagaaaactatgctggtgatgtttcccaggtacccgagcttggagatctgtgtgatgatgtatcagaaagagactggggagtccccgaaggcaggaggctgccacagtccctctcccaggagggggacttcacaccagctgccatggggctccttaggggccccttaggggagaaagatctggactgtaatggttttgacagtcgcttcagtctgagcccaaacctgatggcatgtcaggaaatccctacagaagagaggccacatccatatgacatgggtggccagagtttccagcacagtgtggacctaactggtcatgagggggttcccacagctgaaagtccactcatatgtaatgagtgtgggaaaaccttccaaggaaatcctgaccttattcagcgtcaaacagtcccacactggggaggctttcttttatgtgtgatgattgtgggaaaaccttcagccagaactcagttcttaaaaaccgtcatcgatctcatatgagtgagaaagcttaccagtgcagcgaatgtgggaaagccttccgagggcactcagacttttctaggcatcagagtcaccacagcagtgagaggccttatatgtgtaatgaatgtggaaaagccttcagccagaactcgagccttaaaaagcaccaaaaagtctcacatgagtgagaagccctatgaatgcaatgaatgtgggaaggcttttagggcggagctcaaacctcatccaacatcaaagaatccattctggggagaaaaccgtatgtgtgcagtgagtgtgggaaggccttcaggcgaagctcaaacctcatcaaacaccacaggactcacacaggagagaagccttttgagtgtggctagtgtgggaaagccttcagccagagtgcacacctgaggaagcaccagagggtccacactggagagaagccttatgagtgtaatgattgtggcaagcccttcagtcgggtctccaacctcattaagcaccacagggttcacactggagagaagccctataaagtccagtgcctgtggaaaagcatttagtcagagctccagccttattcagcatcggagaattcacactgggagaaaagcctcacgtgtgtaatgtatgtgggaaaagcctttagttattagcttcagtgctccgaaagcaccagattcatccacacggggagaggaaggccgtacagatgcagtgtctgtgggaaggccttcagccacagctcagccctcattcagcaccagggcgtgcacacaggcgacaagccctacgcctgccacgagtgtgggaagacctttggtcgcagctccaacctcatccttcaccagcgagtccacactggagagaagccctatgaatgtactgaatgtggaaaaaccttcagccagagctcaaccctcattcagcatcagaggattcataatggggctgaagcccccataaatgtaaccagtgtggtaaagccttcaactcaaagctccaaattttccattcacccccaaaaagttcatattggggaaaaaaccctccccttgtgttgaatgtggtaagggtttcagccaaagctcccacttctttcagcatcagatacatccacacgggcgaggcgcccctacaaatgcagtgagtgtgggaaagccttcagtcagcgttcggtcctcatccagcaccagaaggattcacactggggtgaagccctatgactgtgctgcttgtgggaaaaccttcagcccaacggatcaaagttggatcaaacaccagttgattcacacccagggaataggctgttgggctggcaggaattgaaaccgagcatagtttcctctccaactcctctttggcccattgtctcagcctctgcccacttcccagaccgaaagcctggactcagctcactgcctacatccagtggccgcatagccctgggaccctcctttgaaacatcctttacaggctcccttctcactgccactgctcttgcctcttgtgatgtcttgggtttgggcttgtttttacagcttgtgaacggactgcacgtttgttacaagggagaagattatggagggctgcatattcatgaatagggttttttattataatgaaaagttcccaaaaaagtaaagtgacgtttggtttgagaaaaaaaaaaaaaa

SEQ ID NO: 8422 - DNA, 458 bp, Homo sapiens
  SIMILAR (197)..(274): 881254mologous to Homo sapiens Krueppel-related DNA-binding protein,accession number M61870,Smith-Waterman Score=124.
  misc_feature (1)...(458): n = a,t,c or g
ccccaattgagtacattacattaggccgngcggnggaacgcgcggtctttgtctcttgctgccgctggagctccagatctcttgttcactgctctgtgttctctgctcatagaggcccagcctttgaggccctttgacctgcaggtattgggagatccacagccaagagccaggaccccctagaagtctagaaatgccagaactgatcacctgtctggagcaaggaaaaaaacctctgaccgtgaagagacatgagatgattgccaaacccccnnnnnnnnnnnnnnnnnnnnnnnnnnnnnnnnnnnnnnnnnnnnnnnnnnnnnnnnnnnnnnnnnnnnnnnnnnnnnnnnnnnnnnnnnnnnnnnnnnnnnnnnnnnnnnnnnnnnnnnnnnnnnnnnnnnnnnnnnnnnnnnnnnnnnnnnnnnnnnnnnnnnnnnnnnnaagcgtacattatg

SEQ ID NO: 8423 - DNA, 409 bp, Homo sapiens
  SIMILAR (235)..(47): 451254mologous to Human endogenous retrovirus HERV-K(II) env,accession number AB047240,Smith-Waterman Score=166.
  misc_feature (1)...(409): n = a,t,c or g
aaatgaaagggggagtaatgggagataccccatactttcaataagtagcctccaggcattcccttccaccagaggagcaattgttttttaaatagccctttggcgcccagtctattactaaaccatatgagtcattttttaatattactgcatgtgagttaacatagtcttcccaaattaaagttttagatgggccctcaaaatttttagggcatggttttcctgcaggtttatatggaaagtatnnnnnnnnnnnnnnnnnnnnnnngtggcctacactgcctttcagtttacctaggcctccaaagcactttagcctgtggggcttgccagaactcgggttccagctgctggaatggacagttcccctctggctagggttgatctaatgttccctctgggttactgg

SEQ ID NO: 8424 - DNA, 429 bp, Homo sapiens
  SIMILAR (149)..(187): 761254mologous to Homo sapiens hematopoietic cell derived zinc finger protein,accession number AF054180,Smith-Waterman Score= 52.
gcgtccgcggacgcgtgggcgcggcctttgtctcttgctgccgctggagctccagatctcttgttcactgctctgtgttctctgctcatagaggcccagcctctgaggccctttgacctgcaggtattgggagatccacagccaagagccaggaccccctagaagtctagaaatggtattgttctctccaagccagaactgatcacctgtctggagcaaggaaaaaaacctctgaccgtgaagagacatgagatgattgccaaacccccaggtaggtgcaagtgaaaatgaatacaacagatgacacaaatgagaggtcgcaacatccaagagaaggccagtccttaaaatgtgacctgggaagctgtgttctaaaggaaatagttcctgggcagctgttttttgtttgtttggttggttggctgggtg

SEQ ID NO: 8425 - DNA, 1456 bp, Homo sapiens
  SIMILAR (748)..(1224): 401254mologous to Homo sapiens Gag-Pro-Pol-Env protein,accession number AF164611,Smith-Waterman Score=377.
atgcatgaggaggaaggggaaagtggagattctcgtgtgtatatgtctactcaatgcacacatgttactctgaataagtttctgggcttcatagtatctgaatcagtttcaggtctgaacatacaagagtccatgaaagaggtactgagggggcagagccttaagcataatccaatcagggaggctggtctggaaaccctccaatcaggcaggcagctggagcgaagaggacggctttctggtatggcgcggcctttgtctcttgctgccgctggagctccagatctcttgttcactgctctgtgttctctgctcatagaggcccagcctctgaggccctttgacctgcagacaactctgactgcagctgaatgccattatacaggcaaaaaattctccctaaatgaaggcaagccagtgttacggaaaaactcccaaaccaatacctgggaacctggaacaattataacatggggaagagggtatgcttgtgtttcaccaggagatcaatcccctgtctgggtgcccactgagagactcaaacttcgtgtgaatagtgacaaagaaagccacagggaaaagacatccaagtcagagaccgccttcatacctgcacaggatcttgcttacaataggttttatttaataattctcctccttacactttctgtctcaccagtttcccctcaaactgatttacctgctacataaaattattcttattgggcttatgtgccttttcctccacttattcgacctctcacctggatggatgctcctgcagaaatctatactaacgatagtgtatatatgcctggagctacagatgaccattgccccactcgaccaagagaagaaggcactgcatttaatgttactatgggttataaataccctcctctgtgccttggacatgcacatgtagatggttgtattcatctacaagctcaaatctgggctgcttatcttccggagagattagctacaagagaacagggacatttgatctccagcctctctctttctcctttaagacaaatgaaagggggagtaataggagataccccaaactttcaatataaacctgtaggaaaaccatgtcctaaaaattttgagggcccatctaaaattttaatttgggaagactgtgttaactcacatgtagtagtactaaaaaatgacgcatatggtttagtaataggatgggcaccaaagggctattttaaaaaacaattgctcctctggtggaagggaatgcctggaggctacttattttatttctcattgggaggacaaggatcatcatcctactttgcataggagggtcagctcattctttcccttataatgggaagataagggcattacccctccgaggcctcatatgatattccccattctgagcctggaacactcagaactttggaaattggctattgccatgtctggactgtga

SEQ ID NO: 8426 - DNA, 1394 bp, Homo sapiens
  SIMILAR (897)..(1262): 761254mologous to Mus musculus small nuclear ribonucleoprotein N,accession number AF063665,Smith-Waterman Score= 438.
tcctctactgctgcaccgtgggtaaggggtggctgccaagcttgctaggcggagcctgcgccaacccatctccctcctcccccctctactgcgccacaaccggaaaggaacagctgctgtatcagccagcaatcattcagcgtcccttagtcactccagacagcgacaggccccgcggtcgccatgcccaccgcctccatgccatgcccaccgccgccatgcctaccgccgccaaagtccaccaccgccatgcctacccgctgccaatgcccaccgccgccaatacccactgtcgccgccttccccctacctcccagccacttcctacggactctccccgcgccgcgaccaccaacacaacccccaccactgtcacaccgactcatccccctgaacaaaggactttagggcccaaattccgtttatttagtactccaagtcctaaaaacttggaatatctgatgaataaaagtggccgctccccaggctgtctcttgagagaagccaccggcacagctgaccttgcccgctccatcgcgtcactgaccgctcctcagacagatgcgtcaggcatctccggcggccgctccactctgcgccagactcgctgcagcagcggcaggcttcgcacacatccccgcctgagcatgcgcgccagcctgcctctgcggccgcgcaggcgtgcttgtttgccgcagtgcagggacaaggaacttctaattaccaagcggaaataccgaaagaagaaggattttgctgcaggtctagaagatgtcacagaatttcaaggaagagaggagaacccgcgtcatacctttatctatagccttcccctaggtcttcagaagcatcaagttttaactgtggacattggatttggtggaacagcaatcatgactggcattgctcgggtaccacttgctggagctgctggaggccctggggttggtagggcagctggtagaggagtaccagctggtgtgccaattccccaggcccctgctggattggcaggccctgtccgaggagttgggggaccatcccagcaggtaatgactccacagggaagaggcactgtagcagctgctgctgttgctgcgactgccagcattatggctcctccacctggtatgagaccacccatgggcccaccaattgggcttccccctgctcgagggacgccaataggcatgccgcctccgggaatgagaccccctccaccaggcattagagattgcggtggaagtctaaccccccttggagatgtctgccttaaagggtctttggccagggtcctctgtagagccatagtccagatctactctatttgtgtgctccttacaacatcagaacagcaactctcaatccggattcatccccagaatgccgtctga

SEQ ID NO: 8427 - DNA, 752 bp, Homo sapiens
  SIMILAR (649)..(696): 431254mologous to Arabidopsis thaliana contains similarity to late embryogenesis abundant protein~gene_id:MLD14.16,accession number AB025624,Smith-Waterman Score=39.
tcctctactgctgcaccgtgggtaaggggtggctgccaagcttgctaggcggagcctgcgccaacccatctccctcctcccccctctactgcgccacaaccggaaaggaacagctgctgtatcagccagcaatcattcagcgtcccttagtcactccagacagcgacaggccccgcggtcgccatgcccaccgcctccatgccatgcccaccgccgccatgcctaccgccgccaaagtccaccaccgccatgcctacccgctgccaatgcccaccgccgccaatacccactgtcgccgccttccccctacctcccagccacttcctacggactctccccgcgccgcgaccaccaacacaacccccaccactgtcacaccgactcatccccctgaacaaaggactttagggcccaaattccgtttatttagtactccaagtcctaaaaacttggaatatctgatgaataaaagtggccgctccccaggctgtctcttgagagaagccaccggcacagctgaccttgcccgctccatcgcgtcactgaccgctcctcagacagatgcgtcaggcatctccggcggccgctccactctgcgccagactcgctgcagcagcggcaggcttcgcacacatccccgcctgagcatgcgcgccagcctgcctctgcggccgcgcaggcgtgcttgtttgccgcagtgcagggacaaggaacttctaattaccaagcggaaataccgaaagaagaaggat

SEQ ID NO: 8428 - DNA, 1371 bp, Homo sapiens
  SIMILAR (511)..(1230): 1001254mologous to Homo sapiens small nuclear ribonucleoprotein,accession number J04615,Smith-Waterman Score= 1298.
gaagcgtgcctgctgctgcatgcagagtctggcgcagagtggagcggcccccggagatgcctgacgcatctgtctgaggagcggtcagtgacgcgattggagcgggcaagggatcgcttacacctgagacgaactacagaacagcacgtaccagaggtggaagtccaagtcaaacgcagaaggactgcctcactgagcaaccaagagtgtcagttgtacccgaggcgttctcagcagcagcaaagtacctgtggtgggatttccaggctgaactgaggcaggcattcttagctgagacaccaagaggtggttaaagccatattgtgagttagcgaggaatctgatttccaagcaaaaaccaggctccattctactctttgaagcttctgccccagcttgcatttgtttcttaggggaacccgcgtcataccttttatctatagccttcccctaggtcttcagaagcatcaagttttaactgtggacattggatttggtggaacagcaatcatgactgttggcaagagtagcaagatgctgcagcacattgactatagaatgagatgtatcctgcaagatggccgaatcttcattggcacctttaaggcttttgacaagcatatgaatttgatcctctgtgattgtgatgagttcagaaagatcaagccaaagaatgcgaagcaaccagagcgtgaagaaaagcgggttttgggtctggtgttgctgcgtggggagaacttggtatccatgactgtggaggggccaccccccaaagatactggcattgctcgggtaccacttgctggagctgctggaggccctggggttggtagggcagctggtagaggagtaccagctggtgtgccaattccccaggcccctgctggattggcaggccctgtccgaggagttgggggaccatcccagcaggtaatgactccacagggaagaggcactgtagcagctgctgctgttgctgcgactgccagtattgctggagccccaacacagtacccaccaggacggggcactccgcccccacccgtcggcagagcaaccccacctccaggcattatggctcctccacctggtatgagaccacccatgggcccaccaattgggcttccccctgctcgagggacgccaataggcatgccgcctccgggaatgagaccccctccaccaggcattagaggtccacctcccccaggaatgcgtccaccaagaccttagcatactgttgatccatctcagtcactttttcccctgcaatgcgtcttgtgaaattgtgtagagtgtttgtgagctttttgttccctcattctgcattaataatagctaataataaatgcatagagcaattaaactgtg

SEQ ID NO: 8429 - DNA, 1266 bp, Homo sapiens
  SIMILAR (379)..(849): 751254mologous to Mus musculus B cell phosphoinositide 3- kinase adaptor,accession number AF293806,Smith-Waterman Score=569.
atgctgatgcagtgggagggcctgggggtcctggaatggcaggctgcgatggcctccctggaggctttggcagtgacatcaggccaaggttgtggctgtggctggggccaaggctctggagctcatagaggggcactaagcatcatcttggcctctgtgcccaagaagctgctgctgatggctgctacgccttggccagggaccgcactgccaccctgggccacctttgatgccatctctaagactgctagcaactggatccctgacctctggaaagagactgtattcaccaagtttccctaccaggaattcactgaccatctctcaagacccacaccagagtctctaagcagaagacgcaggttccagctgtggctacaacggccgcccgtcagaccatggagggacaggccccagtcgagtatatatgacccttttgcgggaatgaaaacgccaggccagcggcagcttatcaccctccaggagcaggtgaagctgggcattgtcaacgtggatgaggctgtgctccacttcaaagagtggcagctcaaccagaagaaacgatcggagtcctttcgtttccagcaggctgcttccttcaaagtactagccaggcccgaccctgcttaccctcagagatcagatgggattgggcgcgttcagggtgttatggctatagaccctggtgacttggagatcacggtcccaattcggcactcacagcacctgcctgcaaaagtggagtttggagtctatgagagtggccccaggaaaagtgtcattccccctaggacggagctgagacgaggagactggaaaacagacagcacctccagcacagcaaattctggctgtgactcagtcactgacactgagcctgaggacgagaaggttgtttcctactcgaagcagcagaacctgccgacggtgacttcacctgggaacctgatggtggtgcagccggaccgcattcgctgtggggttctgcagtcggtccctgcaacactgggtggacaaaatgtgaaggtggagcagtgtgtcaccatggatgctcatgatccatccaaagtggagtaccttcatagagttaattctcacaataataacttcaaagatgaagaaactgagacccctggagccatagttgggctggtagccaatgctgatgaaatagcagacacaagccgtggggtaattctagattttgcaaaagagaaattttttgaagttgatgaaagtgatgttggaaaactgtatcacaagtaa

SEQ ID NO: 8430 - DNA, 986 bp, Homo sapiens
  SIMILAR (318)..(986): 911254mologous to Homo sapiens hPMSR6,accession number U38980,Smith-Waterman Score=1064.
ggaattcccgggtcgacgatttcgactggcttcctaagtcacggctcagctaagagattgaggaaaatgtccgtgaaaggagcgaccccgaagccagagccagagccagagcatgtcataaaaaactacacggaagagctgaaagtgcccccagatgaggactgcatcatctgcatggagaagctgtctgcagcgtctggatacagcgaagtgactgacagcaaggcagtcgggcccctggctgtgggctgcctcaccaagtgcagccacgccttccacctgctgtgcctcctgaccatgtactgcaacggcaataagggccctgagcaccccaatcccggaaagccgttcactgccagagggtttccccgccagtgctaccttccagacaacgcccagggccgcaagcctccaggggcttccagaacccggagacactggctgacattccggcctccccacagctgctgaccgatggccactacatgacgctgcccgtgtctccggaccagctgccctgtgacgaccccatggcgggcagcggaggcgcccccgtgctgcgggtgggccatgaccacggctgccaccagcagccacgtatctgcaacgcgcccctccctggccctggaccctatcgtacagaacctgctaaggccatcaaacctattgatcggaagtcagtccatcagatttgctctgggccagtggtactgagtctaagcactgcagtgaaggagttagtagaaaacagtctggatgctggtgccactaatattgatctaaagcttaaggactatggaatggatctcattgaagtttcaggcaatggatgtggggtagaagaagaaaacttcgaaggcttaatgatgtcaccatttctacctgccacgtctcggcgaaggttgggactcgactggtgtttgatcacgatgggaaaatcatccagaagaccccctacccccaccccagagggaccacagtcagcg

SEQ ID NO: 8431 - DNA, 384 bp, Homo sapiens
  SIMILAR (382)..(281): 761254mologous to Homo sapiens farnesyl pyrophosphate synthetase,accession number M29863,Smith-Waterman Score=147.
  misc_feature (1)...(384): n = a,t,c or g
ctggctgccttctcctgagagtcggagccatagccagagccctgcccaggccgagccggagctgcagcccgagcgcggtggtgccctcagccccgtcctcttgtcctcctcagcctcggtgccttggaatttgtgtcgctgagtcagcaagcctttcagatttgcccggtttttgttgtttgtggtttgtatcaagatgggaactcaaacaagtcattcctcctaaggagctggtgtcttcatccagaagggacagtttgtgccagctctccagagagaaaaggatctggcactgttctggagtggcctgtancatacactgaaccaccagccagctgcatttgttgtcctggaagtcattgccaactctgccagtcacactgg

SEQ ID NO: 8432 - DNA, 857 bp, Homo sapiens
  SIMILAR (199)..(393): 981254mologous to Homo sapiens hPMSR6,accession number U38980,Smith-Waterman Score=356.
atgggtttagactggattattcgctttgtggcggtcttcttacatcatgccagcttcttcgtggggagaggcaggacgctgcttatgtacttctctcttctaggagcgaccccgaagccagagccagagccagagcaggtcataaaaaactacacggaagagctgaaagtgcccccagatgaggactgcatcatctgcatggagaagctgtctgcagcgtctggatacagcgatgtgactgacagcaaggcagtcgggcccctggctgtgggctgcctcaccaagtgcagccacgccttccacctgctgtgcctcctggccatgtactgcaacggcaataagggccctgagcaccccaatcccggaaagccgttcactgccagagggtttccccgccagtgctaccttccagacaacgcccagggccgcaagagctggtgccctacacaccacagataacagcttgggacctggaagggaaggtcacagccaccaccttctccctggagcagccgcgctgtgtcttcgatgggcttgccagcaccaacgataccgtctggctcgtggtggccttcagcaatgcctccaggggcttccagaacccggagacactggctgacattccggcctccccacagctgctgaccgatggccactacatgacgctgcccgtgtctccggaccagctgccctgtgacgaccccatggcgggcagcggtggtgcccccgtgctgcgggtgggccatgaccacggctgccaccagcagcccttctgcaacgcgcccctccctggccctggaccctatcggtgggtggtccccaccggagccctgggactggggctgtgcttggggtag

SEQ ID NO: 8433 - DNA, 1278 bp, Homo sapiens
  SIMILAR (137)..(214): 801254mologous to Mus musculus Deltex2,accession number AB015423,Smith-Waterman Score=118.
cccacgcgtccgcttgtcctgagagtcggagccacagccagagccctgcccaggccgagccggagctgcagcccgagcgcggtggtgccctcagccccgtcctcttgtcctcctcagcctcggagcgaccccgaagccagagccagagccagagcaggtcataaaaaactacacggaagagctgaaagtgcccccagatgaggactgcatcatcttcaatggagaagctgtccacagcgtctggatacagcgatgtgactgacagcaaggcaatcgggtccctagctgtgggccacctcaccaagtgcagccatgccttccacctgctgtgcctcctggccatgtactgcaacggcaataaggatggaagtctgcagtgtccctcctgcaaaaccatctatggagagaagacggggacccagccccagggaaagatggaggtattacggttccagatgtcgctccccggccacgaggactgcgggaccatcctcatagtttacagcattcccccatggcatccaggggcctggagcaccccaatcccggaaaagccgtttcactgccagagggtttccccgcccagtgctaccttccagaacaacgcccagggcccgcaaagtccttaagagctccctgaaggtgggcctggaagaaggcggctcatcttcacagtggggcacgtcccagcacctacgggtgagacggacaccgtggtatggaacgagattccaccacaagacagagatggaccgcaacattacgggccacggctatcccgaccccaactacctgcagaacgtgctggctgagctggctgcccagggggtgaccgaggactgcctggagcagcagtgacctcgcaccccaggcacgccccgcctctggtggccaccccgctgccccatggctggctgggtggccaggcaggaagtgccccagcccgaagaggctggaaggttttttaaaggttgtgggttgtcccccacttgaagccggggctccccttgcctgccctctctctcctcctccccctctgggaagttgggcagccctgggcagttgtaatcatggggggttaaaaatccagctacctcagtgcgcagggcccgtctgtcctctgggggctgcttcgtggcacgcggtgctcggggcctggtgtggggcgagtagagacttccccagcctggacgggcgtgggttctgggtcaagcttcttttacctcaattttgtttgcaataaatgctctatagccaaagccaaaaaaaaaaaaaaaa

SEQ ID NO: 8434 - DNA, 4656 bp, Homo sapiens
  SIMILAR (3853)..(4653): 1001254mologous to Homo sapiens apoAI protein,accession number X00566,Smith-Waterman Score=1362.
atggaatactatgcagccatagaaaatgatgagttcatgtcctttgtagggacatggatgaaattggaaatcatcattctcagtaaactatcgcaagaacaaaaaaccaaacatcgcatgttctcactcatagattttggtttcagtaacctcttcactcctgggcagctgctgaagacctggtgtggcagccctccctatgctgcacctgaactctttgaaggaaaagaatatgatgggcccaaagtggacatctggagccttggagttgtcctctacgtgcttgtgtgcggtgccctgccatttgatggaagcacactgcagaatctgcgggcccgcgtgctgagtggaaagttccgcatcccattttttatgtccacagggctggtacccgagctggacaaaagactgaaggcaggctgtttgtccattgcagaatgtgagcatttgatccgccatatgttggtgttagatcccaataagcgcctctccatggagcagatctgcaagcacaagtggatgaagctaggggacgccgatcccaactttgacaggttaatagctgaatgccaacaactaaaggaagaaagacaggtggaccccctgaatgaggatgtcctcttggccatggaggacatgggactggacaaagaacagacactgcagtcattaagatcagatgcctatgatcactatagtgcaatctacagcctgctgtgtgatcgacataagagacataaaaccctgcgtctcggagcacttcctagcatgccccgagccctggcctttcaagcaccagtcaatatccaggcggagcaggcaggtactgctatgaacatcagcgttccccaggtgcagctgatcaacccagagaaccaaattgtggaggcaagtagcaacctgtgggagctgtcagctgaaaccactttctttgccatatccttgcttcccttccttctgatttctaactcgatgccggatgggacactgaatttggacagtgatgagggtgaagagccttcccctgaagcattggtgcgctatttgtcaatgaggaggcacacagtgggtgtggctgacccacgcacggaagttatggaagatctgcagaagctcctacctggctttcctggagtcaacccccaggctccattcctgcaggtggcccctaatgtgaacttcatgcacaacctgttgcctatgcaaaacttgcaaccaaccgggcaacttgagtacaaggagcagtctctcctacagccgcccacgctacagctgttgaatggaatgggcccccttggccggagggcatcagatggaggagccaacatccaactgcatgcccagcagctgctgaagcgcccacggggaccctctccgcttgtcaccatgacaccagcagtgccagcagttacccctgtggacgaggagagctcagacggggagccagaccaggaagctgtgcagaggtacttggcaaataggtccaaaagacatacactggccatgaccaaccctacagctgagatcccaccggacctacaacggcagctaggacagcagcctttccgttcccgggtctggcctcctcacctggtacctgatcagcatcgctctacctacaaggactccaacactctgcacctccctacggagcgtttctcccctgtgcgccggttctcagatggggctgcgagcatccaggccttcaaagctcacctggaaaaaatgggcaacaacagcagcatcaaacagctgcagcaggagtgtgagcagctgcagaagatgtacggggggcagattgatgaaagaaccctggagaagacccagcagcagcatatgttataccagcaggagcagcaccatcaaattctccagcaacaaattcaagtaggccctcactctttgctttctccaacttgtttggagtttgctttcaggctgatttgcctgtgcattttggaggagaccactcagtgcaaagtggatttgaggttaaggattcagccttcaagcccaccccccaaccaccccaacaaccatctcttcaggcagcccagtaatagtcctccccccatgagcagtgccatgatccagcctcacggggctgcatcttcttcccagtttcaaggcttaccttcccgcagtgcaatctttcagcagcaacctgagaactgttcctctcctcccaacgtggcactaacctgcttgggtatgcagcagcctgctcagtcacagcaggtcaccatccaagtccaagagcctgttgacatgctcagcaacatgccaggcacagctgcaggctccagtgggcgcggcatctccatcagccccagtgctggtcagatgcagatgcagcaccgtaccaacctgatggccaccctcagctatgggcaccgtcccttgtccaagcagctgagtgctgacagtgcagaggctcacagttctctgtaccagtgggttctccctactgaggaggaggagctgttcccaggaagtctagtacttgttacatggatgtctggtactcccttttgtgtctgcagcttgaacgtgaatcggttctcccctgctaactacgaccaggcgcatttacacccccatctgttttcggaccagtcccggggttcccccagcagctacagcccttcaacaggagtggggttctctccaacccaagccctgaaagtccctccacttgaccaattccccaccttccctcccagtgcacatcagcagccgccacactataccacgtcggcactgcagcaggccctgctgtctcccacgccgccagactatacaagacaccagcaggtaccccacatccttcaaggactgctttctccccggcattcgctcaccggccactcggacatccggctgcccccaacagagtttgcacagctcattaaaaggcagcagcaacaacggcagcagcagcagcagcagcagcaacagcaagaataccaggaactgttcaggcacatgaaccaaggggatgcggggagtctggctcccagccttgggggacagagcatgacagagcgccaggctttatcttatcaaaatgctgactcttatcaccatcacaccagcccccagcatctgctacaaatcagggcacaagaatgtgtctcacaggcttcctcacccaccccgccccacgggtatgctcaccagccggcactgatgcattcagagagcatggaggaggactgctcgtgtgagggggccaaggatggcttccaagacagtaagagttcaagtacattgaccaaaggttgccatgacagccctctgctcttgagtaccggtggacctggggaccctgaatctttgctaggaactgtgagtcatgcccaagaattggggatacatccctatggtcatcagccaactgctgcattcagtaaaaataaggtgcccagcagagagcctgtcatagggaactgcatggatagaagttctccaggacaagcagtggagctgccggatcacaatgggctcgggtacccagcacgcccctccgtccatgagcaccacaggccccgggccctccagagacaccacacgatccagaacagcgacgatgcttatgtacagctggataacttgccaggaatgagtctcgtggctgggaaagcacttagctctgcccggatgtcggatgcagttctcagtcagtcttcgctcatgggcagccagcagtttcaggatggggaaaatgagggtgaggagccttatgcatggggcactccagagaagttcctggaggggcctccctccatcttccgtaactgctcctctcttcgtaggaagagctcatggggaggtcccccacggcccttcaggatgaaagctgcggtgctgaccttggccgtgctcttcctgacggggagccaggctcggcatttctggcagcaagatgaacccccccagagcccctgggatcgagtgaaggacctggccactgtgtacgtggatgtgctcaaagacagcggcagagactatgtgtcccagtttgaaggctccgccttgggaaaacagctaaacctaaagctccttgacaactgggacagcgtgacctccaccttcagcaagctgcgcgaacagctcggccctgtgacccaggagttctgggataacctggaaaaggagacagagggcctgaggcaggagatgagcaaggatctggaggaggtgaaggccaaggtgcagccctacctggacgacttccagaagaagtggcaggaggagatggagctctaccgccagaaggtggagccgctgcgcgcagagctccaagagggcgcgcgccagaagctgcacgagctgcaagagaagctgagcccactgggcgaggagatgcgcgaccgcgcgcgcgcccatgtggacgcgctgcgcacgcatttggccccctacagcgacgagctgcgccagcgcttggccgcgcgccttgaggctctcaaggagaacggcggcgccagactggccgagtaccacgccaaggccaccgagcatctgagcacgctcagcgagaaggccaagcccgcgctcgaggacctccgccaaggcctgctgcccgtgctggagagcttcaaggtcagcttcctgagcgctctcgaggagtacactaagaagctcaacacccagtga

SEQ ID NO: 8435 - DNA, 2778 bp, Homo sapiens; identical to SEQ ID NO: 2308
  SIMILAR (1093)..(2775): 941254mologous to Homo sapiens putative p150,accession number U93574,Smith-Waterman Score=2858.

SEQ ID NO: 8436 - DNA, 1842 bp, Homo sapiens
  SIMILAR (901)..(1311): 731254mologous to Homo sapiens KIAA0999 protein,accession number AB023216,Smith-Waterman Score=484.
atgccccgagccctggcctttcaagcaccagtcaatatccaggcggagcaggcaggtactgctatgaacatcagcgttccccaggtgcagctgatcaacccagagaaccaaattgtggaggcaagtagcaacctgtgggagctgtcagctgaaaccactttctttgccatatccttgcttcccttccttctgatttctaactcgatgccggatgggacactgaatttggacagtgatgagggtgaagagccttcccctgaagcattggtgcgctatttgtcaatgaggaggcacacagtgggtgtggctgacccacgcacggaagttatggaagatctgcagaagctcctacctggctttcctggagtcaacccccaggctccattcctgcaggtggcccctaatgtgaacttcatgcacaacctgttgcctatgcaaaacttgcaaccaaccgggcaacttgagtacaagatgagtggcttgcccctttctccccgccttcccctcatctcatggtccgtcctccccactctgttcctggcaggagcagtctctcctacagccgcccacgctacagctgttgaatggaatgggcccccttggccggagggcatcagatggaggagccaacatccaactgcatgcccagcagctgctgaagcgccacggggaccctctccgcttgtcaccatgacaccagcagtgccagcagttacccctgtggacgaggagagctcagacggggagccagaccaggaagctgtgcagaggtacttggcaaataggtccaaaagacatacactggccatgaccaaccctacagctgagatcccaccggacctacaacggcagctaggacagcagcctttccgttcccgggtctggcctcctcacctggtacctgatcagcatcgctctacctacaaggactccaacactctgcacctccctacggagcgtttctcccctgtgcgccggttctcagatggggctgcgagcatccaggccttcaaagctcacctggaaaaaatgggcaacaacagcagcatcaaacagctgcagcaggagtgtgagcagctgcagaagatgtacggggggcagattgatgaaagaaccctggagaagacccagcagcagcatatgttataccagcaggagcagcaccatcaaattctccagcaacaaattcaacagcctgctcagtcacagcaggtcaccatccaagtccaagagcctgttgacatgctcagcaacatgccaggcacagctgcaggctccagtgggcgcggcatctccatcagccccagtgctggtcagatgcagatgcagcaccgtaccaacctgatggccaccctcagctatgggcaccgtcccttgtccaagcagctgagtgctgacagtgcagaggctcacaggttgaaatgggaaacgagggagaaaggacttgaagatgactccagtgtttctagtaacacaggtggtgatgtcactaatgagggtaaaagcactgaaagcgcagattttggtttcagtaacctcttcactcctgggcagctgctgaagacctggtgtggcagccctccctatgctgcacctgaactctttgaaggaaaagaatatgatgggcccaaagtggacatctggagccttggagttgtcctctacgtgcttgtgtgcggtgccctgccatttgatggaagcacactgcagaatctgcgggcccgcgtgctgagtggaaagttccgcatcccattttttatgtccacaggatatttccacttattgggttctcattgcaatgtggttttaaatgccaaggataaagtaggctttgcatcttag

SEQ ID NO: 8437 - DNA, 3879 bp, Homo sapiens
  SIMILAR (631)..(3795): 731254mologous to Homo sapiens putative p150,accession number U93574,Smith-Waterman Score=3884.
atggagctgaaagccaaggctcgagaactatgggaagaatgcagaagcctcaggagccgatgtgatcaactgaaagaaagggtatcagtgatggaagatgagatgaatgaaatgaagcgagaagggaagtttagagaaaaaagaataaaaagaaacgaacaaagcctccaagaaatatgggactatgtgaaaagaccaaatctacgtctgattggtgtacctgaaagtgacggggagaatggaaccaagttggaaaacactctgcagggtattatccaggagaacttccccaatctagcaaggcaggccaacattcagattcaggaaatacagagaacaccacaaagatactcctcgagaagagcaactccaagacacataattgtcagattcaccaaagttgaaatgaaggaaaaaatgttaagggcagccagagagaaaggtcgggttacccacaaagggaagcccatcagactaacagtggatctctcggcagaaactctagaagccggaagagagtgggggccaatattcaacattcttaaagaaaagaattttcaacccagaacttcatatccagccaaactaagcttcataagtgaaggagaaataaaatactttacagacaagcaaatgctgagagattttgtcaccaccaggcctgccctaaaagagctcctgaaggaagcactaaacatggaaaggaacacccgcaaatgtaaaagatcagaaattataacaaactgtctctcagaccacagtgcaatcaaactagaactcaggaataagaaactcactcaaaaccgctcaactacatggaaaccgaacaacctgctcttgaatgactactgggtacgtaacgaaatgaaggcagagataaagatgttctttgaaaccaacgagaacaaagacagaacataccagaatctctgggacacattcaaagcagtgtgtagagggaaatttatagcactaaatgcccacaagagaaagcaggaaagatccaaaattgacaccctaacatcacaattaaaagaactagaaaagcaagagcaaagacattcaaaagctagcagaaggcaagaaataactaaaatcagagcagagctgaaggaaatagagacacaaaaaacccttcaaaaaattaatgaatccaggagctggttttttgaaaggatcaacaaaattgatagaccgctagcaagactagtaaagaagaaaagagagaagaatcaaatagacgcaataaaaaatgataaaggggatatcaccaccaatcccacagaaatgcaaactaccatcagagaatactacaaacacctctatgcaaataaactagaaaatctagaagaagtggataaattcctcaacacatacaccttcccaagactaaaccaggaagaagttgactctctgaatagaccaataacaggctctgaaattgtggcaataatcaatagcttaccaacgaaaaagagtccaggaccagatggattcacagccgaattctaccagaggtacaaggaggaactgccgggcagaagagacacaaccaaaaaagagaattttagaccaatatccttgatgaacattgatgcaaaaatcctcaataaaatactggcaaaccgaatccagcagcacatcaaaaagcttatccaccatgatcaagtgggcttcatccctgggatgcaaggctggttcaatatacacaaatcaataaatgtaatccagcatataaacagaaccaaagacaaaaaccacatgattatctcaatagatgcagaaaaggcctttgacaaaattcaacaacctttcatgctaaaaactctcaataaattaggtattgatgggacatatttcaagataataagagctatctatgacaaacccacagccaatatcatacttaatgggcaaaaactcgaagcattccctttgaaaactggcacaagacagggatgccctctctcaccactcctattcaagatagtgttggaagttctggccagggcaattaggcaggagaaggaaataaagggtattcaattaggaaaagatgaagtcaaattgtccctgtttgcagatgacatgattgtatatctagaaaaccccattgtctcagcccaaaatctccttaagctgataagcaacttcagcaaagtctcaggatacaaaatcaatgtgcaaaaatcacaagcattcttatacaccaataacagacaaacagagagccaaatcttgagtgaactcccattcacaattgcttcaaagagaataaaatacctaggaatccaacttacaagggatgtgaaggacctcttcaaggagaactacaaaccactgctcactgaaataaaagaggatacaaacaaatggaagaacattccatgctcatgggtaggaagaatcaatatcataaaaatggccatactgcccaaggtaatttatagattcaatgccatccccatcaagctaccaatgaccttcttcacagaattggaaaaaactactttaaagttcatatggaaccaaaaaagagcccgcattgccaagtcaatcctaagccaaaagaacaaagctggaggcatcacgctacctgagttcaaactatactacaaggctacagtaaccaaaacagcatggtactggtaccaaaacagagacatagatcaatggaacagaacagagccctcacaaataacgccgcatatctacaactatctgatctttgacaaatctgagaaaaataagcaatggggaaaggattccctatttaataaatggtgctgggaaaactggctagccatatgtagaaagctgaaactggatcccttccttacaccttatacaaaaattaattcaagatggattaaagacttaaacgttagacctaaaaccataaaaaccctagaagaaaacctaggcattaccattcaggacataggcatgggcaaggacttcatgtctaaaacaccaaaagcaatggcaacaaaagccaaaattgacaaatgggatctaattaaactaaagagtttttgcacagcaaaagaaactaccatcagagtgaacaggcaacctacaaaatgggagaaaattttcgcaacctactcatctgacaaagggctaatatccagaatctacaatgaactcaaacaaatttacaagaaaaaaacaaacaaccccatcaaaaagtggacgaaggatatgagcatacacttcttaaaagaagacatttatgcagccaaaaaacacatgaaaaaatgctcaccatcactggccatcagagaaatgcaaatcaaaatcacaatgagataccatctcacaccagttagaatggcaatcattaaaaagtcaggaaacaacaggtgctggagaggatgtggagaaattggaacacttttacactgttggtgggactgtaaactagttcaacccttgtggaagtcagtgtggcgattcctcagggatctagaactagaaataccatttgacccagccatcccattactgggtatatacccaaaggactataaatcatgctgctataaagacacgtgcacacgtatgtttattgcagcactattcacaatagcaaagacttggagccaacccaaatgtccaacaacgatagactggattaagaaaatgtggcacatatacaccatggaatactatgcagccataaaaaatgatgagttcatgtcctttgtagggacatggatgaaattggaaatcatcattctcagtaaaccattgcaagaacaaaaaaccaagcaccgcatgttctcactcatagtatcttcaaaagtaattaggcggctgtcccagaagttgcctttgaagattgttgcaatgtgtatacctgtcaaaaggaattga

SEQ ID NO: 8438 - DNA, 4068 bp, Homo sapiens
  SIMILAR (385)..(4065): 941254mologous to Homo sapiens putative p150,accession number U93563,Smith-Waterman Score=6062.
atggggaaaaaacagagcagaaaaactggaaactctaaaaagcagagcgcctctcctcctccaaagaaacgcagttcctcaccagcaacggaacaaagctggacggagaatgactttgatgagctgagagaagaaggcttcagacgatcaaattactccgagctacgggaggaaattcaaaccaaaggcaaagaagtggaaaactatgaaaaaagtttagaagaatgtataactagaataaccaatacagagaactgcttaaaggagctgatggagccgaaaacaaaggctcgagaactacgtaaagaatgcagaagcctcaggagccgatgctatcaactggtagaaagggtatcagcgatggaagatgaagtgaatgaaatgaaagacacacataggctcaaagtaaaaggatggaggaagatctaccaaggaaatggaaaacaaaaaaaggcaggggttgcaatcctagtctctgataaaacagactttaagccaacaaagatcaaaagagacaaagaaggccattacatgatggtaaagggatcaattcaacaagaagagctaactatcctaaatatatatgcacccaatacaggagcacccagattcataaagcaagtcctgagtgacctacaaagagacttagactcccacacattaataatgggagactttaacaccccactgtcaacattagacagatcgacgagacagaaagtcaacaacaatacccaggaattgaactcagctctgcaccaagcagacctaatagacatctacagaactctctaccccaaatcaacagaatatacatttttttcagcaccacaccacacctattccaaaattgaccacatacttggaagtaaagctctcctcagcaaatgtaaaagaacagaaattataacaaactatctctcagaccacagtgcaatgaaactagaactcaggattaagaatctcactcaaaactgctcaactacatggaaactaaacaacctgctcctgaatgactacggggtacaaaacaaaatgaaggcagaaataaagatgttctttgaaaccaacgagaacaaagacacaacataccagaatctctgggacgcattcaaagcagtgtgtagagggaaatttatagcactaaatgcccacaagagaaagcaggaaagatccaaaattgacaccctaacatcacaattaaaagaactagaaaagcaagagcaaacacattcaaaagctagcagaagtcaagaaataactaaaatcagagcagaactgaaggaaatacagacacaaaaaacctttcaaaaaattaatgaatccaggagctggttttttgaaaggatcaacaaaattgatagaccactagctagactaataaagaaaaaaagagagaagaatcaaatagacgcaataaaaaatgataaaggggatatcaccaccgatcccacagaaatacaaactaccatcagagaatactacaaacacctctacgcaaataaactagaaaatctagaagaaatggatacattcctcgacacatgcactctcccaagactaaaccaggaagaagttgaatctccgaatagaccaataacaggatctgaaattgtggcaataatcaatagcttaccaaccaaaaagagtccaggaccaaatggattcacagccgaattctaccagaggtacaaggaggaactggtaccattccttctgaaactattccaatcaatagaaaaagagggaatcctccctaactcattttatgaggccagcatcaccctgataccaaaggcgggcagagacacaaccaaaaaagagaattttagaccaatatccttgatgaacattgatgcaaaaatcctcaataaaatactggcacaccgagtccagcagcacatcaaaaagcttatccaccatgatcaagtgggcttcatccctgggatgcaatgctggttcaatatatgcaaatcaataaatgtaatccagcatataaacagaaccaaagacaaaaaccacatgattatctcaatagatgcagaaaaggcctttgacaaaattcaacaacccttcattctaaaaactctcaataaattaggtattcatgggacatatctcaaaataataagagctacctatgacaaacccacagacaatatcaaactgaatgggcaaaaactggaagcattccctttgaaaactgacacaagacagggatgccctctctcaccactcctattcaacatagtgttggaagttctggccagggcaattaggcaggagaaggaaataaagggtattcaattaggaaaagaggaagtcaaattgtccctgtttgcagatgacatgattgtatatctagaaaaccccattgtctcagcccaaaatctcctaaagctgataagcaacttcagcaaagtctcaggatacaaaatcaatgtacaaaaatcacaagcattcttatacaccaacaaaagacaaacacagagccaaatcatgagtgaactcccattcacaattgcttcaaagagaagaaaatacctaggaatccaacttacaagggatgtgaaggacctcttcaaggagaactacaaaccactgctcaaggaaataaaagaggatacaaacaaatggaagaacattccatgctcatcggtaggaagaatcagttttgtgaaaatggccatactgcccaaggtaatttacagattcaatgccatccccatcaagctaccaatgcctttcttcccagaattggaaaaaactactttaaagttcatatggaaccaaaaaagagcccgcatagccaagtcaatcctaagccaaaagaacaaagctggaggcatcacactacctgacttcaaactatactacaaggctacagtaaccaaaacagcatggtactggtaccaaaacagagatatagatcaatggaacagaacagagccttcagaaataacgccgcatatctacaactatctgatctttgacaaacctgagaaaaacaagcaatggggaaaggattccctatttaataaatggtgctgggaaaactggctagccatatgtagaaagctgaaactggatcccttccttacaccttatacaaaaatcaattcaagatggattaaagacttaaacgttagacctaaaaccataaaaaccctagaagaaaacctaggcattaccattcaggacataggcatgggcaaggacttcatgtctaaaacacaaaaagcaatggcaacaaaagccacaattgacaaatgggatctaattaaactaaggagcttctgcacagcaaaagaaactaccatcagagtgaacaggcaacctacaaaatgggagaaaatttttgtaatctactcatctgacaaaggactaatattcagaatctacaatgaactcaaacaaatttacaagaaaaaaacaaacaactccatcaaaaagagggcgaaggacatgaacagacacttctcaaaagaagacatttatgcagccaaaaatcacatgaaaaaatgctcatcatcactggccatcagagaaatgcaaatcaaaaccacaatgagatatcatctcacaccagttagaatggcaatcattaaaaagtcaggaaacaacagatgctggagaggatgtggagaaataggaacacttttacactcttggtgggactgtaaactagttcaaccattgtggaagtcagtgtggcgattcctcagggatctagaactagaaataccatttgacccagccatcccattacggggtatatacctgaaggactataaatcatgctgctataaagacacatgcacatgtatgtttattgcggcattattcacaatagcaaagacttggaaccaagccaaatgttcaacaatgatagactggattaagaaaatgtggcacatatacaccatggaatactatgcagccataaaaaatgatgagttcatgtcctttgtagggacatggatgaaattggaaatcatcattcttagtaaactatcacaagaacaaaaaaccaaacaccgcatattctcactcataggtgggaattga

SEQ ID NO: 8439 - DNA, 2229 bp, Homo sapiens; identical to SEQ ID NO: 6559
  SIMILAR (490)..(2226): 861254mologous to Homo sapiens putative p150,accession number U93565,Smith-Waterman Score=2720.

SEQ ID NO: 8440 - DNA, 3300 bp, Homo sapiens; identical to SEQ ID NO: 3981
  SIMILAR (1627)..(3297): 971254mologous to Homo sapiens putative p150,accession number U93563,Smith-Waterman Score=2950.

SEQ ID NO: 8441 - DNA, 2227 bp, Homo sapiens; identical to SEQ ID NO: 2312
  SIMILAR (542)..(2224): 941254mologous to Homo sapiens putative p150,accession number U93574,Smith-Waterman Score=2858.

SEQ ID NO: 8442 - DNA, 2871 bp, Homo sapiens; identical to SEQ ID NO: 2313
  SIMILAR (1558)..(2868): 961254mologous to Homo sapiens unknown,accession number AF148856,Smith-Waterman Score=2330.

SEQ ID NO: 8443 - DNA, 2205 bp, Homo sapiens
  SIMILAR (670)..(2202): 941254mologous to Homo sapiens putative p150,accession number U93574,Smith-Waterman Score=2643.
atgaaggcagaaataaagatgttatttgaaaccaacgagaacaaagacacaacataccagaatctctgggacacattcaaagcagtgtgtagagggaaatttagaacactaaatgcccacaagagaaagcaggaaagatccaaaattgacaccctaacatcacaattaaaagaactagaaaagcaagagcaaacacattcaaaagctagcagaaggcaagaaataactaaaatcagagcagaattgaaggaaatagagacacaaaaaacccttcaaaaaattaatgaatccaggagctggttttttggaaggatcaacaaaattgatagaccactagcaagactaataaagaagaaaagagagaagaatcaaatagacgcaataaaaaatgataaaggggatatcaccactgatcccacagaaatacaaactaccatcagagaatactacaaacacctccatgcaaataatctagaaaatctagaagaaatggataaattcctcgacacatacactctcccaagactaaaccaggaagaagttgaatctctgaatagaccaataacaggatctgaaattgtggcaataatcaatagcttaccaaccaaaaagagtccaggaccagatggattcacagccaaattctaccagaggtacaaggaggaactgagaataaaatacttaggaatccaacttacaagggacgtgaaggacctcttcaaggagaactacaaaccactgctcaaggaaataaaagaggatacaaacaaatggaagaacattccatgctcatgggtaggaagaatcaatatcgttaaaatggccatactgcccaaggtaatttatagattcaatggtatccccatcaagctaccaattactttcttcacagaattggaaaaaactactttaaagttcatatggaaccaaaaaagagcccgcgtcgccaagtcaatcctaagccaaaagaacaaagctggaggcatcatgctacctgacttcaaactatactacaaggctacagtaaccaaaacagcatggtactggtaccaaaacagagatatagatcaatggaacagaacagagccctcagaaataatgccacatatctacaactatctgatctttgacaaacctgagaaaaacaagcagtggggaaaggattccctatttaataaatggtgctgggaaaactggctagccatatgtagaaagctgaaaatggatcccttccttacaccttatacaaaaattaattcaagatggattaaagacttaaacgttagacctaaaaccataaaaaccctagaagaaaacctaggcaataccattcaggacataggcatgggcaaggacttcatgtctaaaactccaaaagcaatggcaacaaaagccaaaattgacaaatgggatctaattaaactaaagagcttctgcacagcaaaagaaactaccatcggagtgaacaggcaacctacaaaatgggagaaaatttttgcaacctactcatctgacaaagggctaatattcagaatctacaatgaacttaaacaaatttacaagaaaaaaacaaacaaccccatcaaaaagtgggcaaaggatatgaacagacaattctcaaaagaagacatttatgcagccaaaagacacatgaaaaaatgctcaacatcactggccatcagagaaatgcaaatcaaaaccacaatgagataccatctcacaccagttagaacagcgatcattaaaaagtcaggaaacaacaggtgctggagaggatgtggagaaataggaacacttttacactgttgctgggactgtaaactagttcaaccattgtggaagtcagtgtggcgattcctcagggatctagaactagaaataccatttgacccagccatcccattactgggtatatacccaaaggactataaatcatgctgctataaagacacatgcacacgtatgtttactgcggcactattgacaatagcaaagacttggaaccaacccaaatgtccaacaatgatagactggattaagaaaatgtggcacatatacaccatggaatcctatgcagccataaaaaatgatgagttcatgtcctttgtagggacatggatgaaattggaaatcatcattctcagtaaattatcgcaaggacaaaaaaccaaacaacgcatattctcactcatagatgggaactga

SEQ ID NO: 8444 - DNA, 2166 bp, Homo sapiens
  SIMILAR (50)..(133): 351254mologous to Homo sapiens putative p150,accession number U93565,Smith-Waterman Score=52.
atggttggtcaaggcctcaacctcgtgggggtcaagcctcccggaaagcggggacctccagaggtgcagggccacaatgcagatgagaacaaccatacagaagatcgacaaggaaacagaagacatgaacacagtatagatcagttggctgtaactgatgtccactcaacaacagcagaatacacattcttaagtactcgtggaggcttctccaagatagaccacatgttaggctgtaaaacaaatcttaacaaatataaggagattgaaatcatacaaagtatcttctccaatcacaatgaaataaaacaagaaatcaatagcagaaggaaaacaagaaagtccacgaatttgtgggaactaagcagtgccctcttaatgaatgggtcagagaagaaaacacaagtgaatttagataatatctggaaactaatgaaagcaaaaatgcaacatatcacacttatggaatgcagtgaaagtagaaagaataaaatacctaggaatccaacttacaagggacgtgaaggacctcttcaaggagaactacaaaccactgctcaaggaaataaaagaggatacaaacaaatggaagaacatcccatgctcatgggtggaagaatcaataccgtgaaaatggccatactgcccaaggtaatttacagattcaatgccatccccatcaagctaccaatgactttcttcacagaattggaaaaaactactttaaagttcatatggaaccaaaaaagagcccgcatcgccaagtcaatcctaagccaaaagaacaaagctggaggcctcacactacctgacttcaaactattctacaaggctacagtaaccaaaacagcatggtactggtaccaaaacagagatatagatcaatggaacagaacagagccctcagaaataatgccgcatatctacaactatgtgatctttgacaaacctgagaaaaacaagcaatggggaaaggattccctatttaataaatggtgctgggaaaactggctagccatatgtagaaagctgaaactggatcccttccttacaccttatacaaaaatcaattcaagatggattaaagacttaaccgttagacctaaaaccataaaaaccctagaagaaaacctgggcattaccattcaggacataggcatgggcaaggacttcatgtctaaaacaccaaaagcaatggcaacaaaagccaaaattgacaaatgggatctaattaaactaaagagcttctgcacaggaaaagaaactaccatcagagtgaacaggcaacctacaaagtggaagaaaatttttgcaacctactcatctgacaaagggctaatatccagaatctacaatgaactcaaacaaatttacaagaaaaaaacaaacaaccccatcaaaaagtgggtgaaggacatgaacagacacttctcgaaagaagacatttatgcagccaaaaaacacatgaaaaaatgctcaccatcactggccgtcagagaaatgcaaatcaaaaccacaatgagataccatctcacaccagttagaatggcaatcattaaaaagtcaggaaacaacaggtgctggagaggatgtggagaaataggaacacttttacactgttggtgggactgtaaactagttcaaccattgtggaagtcagtgtggcaattcctcagggatctagaactagaaataccatttgacccagccatcccattactgggtatatacccaagagactataaatcatgctgctataaagacacatgcacacgtatgtttattgcagcattattcacaatagcaaagacttggaaccaacccaaatgtccaacaatgatagactggattaagaaaatgtggcacatatacaccatggaatactatgcagccataaaaaatgatgagttcatgtcctttgtagggacgtggatgaaattggaaatcatctttctcagtaaactattgcaagaacaaaaaaccaaacaccgcatattctcactcatagacagcaaacctgcaccacaagattcaggtgccataataggtttgcaagaacctgagcctatgaccctagcccaagacctactgcatctgaaatccagtgccactgaagctgcttgcagggccatcagtcctgacaccaagagggatccccttggctaa

SEQ ID NO: 8445 - DNA, 2004 bp, Homo sapiens
  SIMILAR (484)..(2001): 941254mologous to Homo sapiens putative p150,accession number U93563,Smith-Waterman Score=2610.
atgcctcacatccaggtcatgctgatgcaagagatggactcccacagccttgggaagctctgcccctatggctttgcagagtacagccccacttctagctgctttcatgggtttgtgttgagtgtctgtggctcttccagggacaaagccacccagagagttgatgctcttgtcagacaggtcatagtcaatggaggcattgttcttgatcagtttgccgtccatgatagggtagccctggccgatcttatagatcttcttgttgatctcagtgccatgatgctttgtggtgtgccaacaactggtgacccctttgtagcctttgcccttggtcaccccgatgactttgatcatctcatcttgcccaaacacttggttgacaggtacctgctgctcgagcctcttctgggcccagtccagcttctcagccacagtgcctctgttcacctagatctccatcagttctgctctgattttagttatggaatccaacttacaagggacgtgaaggacctcttcaaggagaactacaaaccactgctcaaggaaataaaagaggatacaaacaaatggaagaacattccatgctcatgggtaggaagaatcaatatcatgaaaatggccatgctgcccaaggtaatttatagattcaatgccatccccatcaagctaccaatgactttcttcacagaattggaaaaaactactttaaagttcatatggaaccaaaaaagagcccgtatcgccaagtcaagccttagccaaaagaacaaagctggaggcatcacactacctgacttcaaactatactacaaggctacagtaaccaaaacagcatggtactggtaccaaaacagagatatagatcaatggaacagaacagagccctcagaaataacgccgcatatctacaactatctgatcttcgacaaacctgagaaaaacaagcaatggggaaaggattccctatttaataaatggtgctgggaaaactggctagccatatgtagagagctgaaactggatcccttccttacaccttatacaaaaattcattcaagatggattaaagacttaaatgttagacctaaaaccataaaaaccctagaagaaaacctaggccttaccattcaggacataggcatgggcaaggacttcatgtctgaaacaccaaaagcaatggcaacaaaagccaaaattgacaaatgggatctaatgaaactaaagagcttctgcacagccaaagaaactaccatcagagtgaacaggcaacctacaaaatgggagaaaattttcacaacctactcatctgacaaagggctaatatccagaatctacaaagaactcaaacaaatttacaagataaaaacaaacaaccccatcaaaaagtgggcaaaggacacgaacagacacttctcaaaagaagacatttatgcagccaaaaaacacatgaaaaaatgctcaccatcacgggccatcagagaaatgcaaatcaaaaccgcaatgagataccatctcacaccagttcgaatggcgatcattacaaagtcaggaaacaacaggtgctggagaggatgtggagaaataggaacacttttacactgttggtgggaatgtaaactacttcaaccattgtggaagtcagtgtggcaattcctcagggatctagaactagaaataccatttgacccagccatcccattactgggtatatacccaaaggactataaatcatgctgctataaagacacatgcacacgtatgtttattgtggcactattcacaatagcaaagacttggaaccaacccaaatgtccaacaatgatagactggattaagaaaatgtggcacatatacaccatggaatactacgcagccataaaaaatgatgagttcatgtcctttgtagggacacggatgaaattggagatcatcattctcagtaaactatcgcaaggacaaaaagccaaacaccgcatattctcactcataggtgggaattga

SEQ ID NO: 8446 - DNA, 3166 bp, Homo sapiens
  SIMILAR (35)..(3082): 751254mologous to Homo sapiens putative p150,accession number U93574,Smith-Waterman Score=3872.
caaatgtaaaagatcagaaattataacaaactgtctctcagaccacagtgcaatcaaactagaactcaggaataagaaactcactcaaaaccgctcaactacatggaaaccgaacaacctgctcttgaatgactactgggtacgtaacgaaatgaaggcagagataaagatgttctttgaaaccaacgagaacaaagacagaacataccagaatctctgggacacattcaaagcagtgtgtagagggaaatttatagcactaaatgcccacaagagaaagcaggaaagatccaaaattgacaccctaacatcacaattaaaagaactagaaaagcaagagcaaagacattcaaaagctagcagaaggcaagaaataactaaaatcagagcagagctgaaggaaatagagacacaaaaaacccttcaaaaaattaatgaatccaggagctggttttttgaaaggatcaacaaaattgatagaccgctagcaagactagtaaagaagaaaagagagaagaatcaaatagacgcaataaaaaatgataaaggggatatcaccaccaatcccacagaaatgcaaactaccatcagagaatactacaaacacctctatgcaaataaactagaaaatctagaagaagtggataaattcctcaacacatacaccttcccaagactaaaccaggaagaagttgactctctgaatagaccaataacaggctctgaaattgtggcaataatcaatagcttaccaacgaaaaagagtccaggaccagatggattcacagccgaattctaccagaggtacaaggaggaactgccgggcagaagagacacaaccaaaaaagagaattttagaccaatatccttgatgaacattgatgcaaaaatcctcaataaaatactggcaaaccgaatccagcagcacatcaaaaagcttatccaccatgatcaagtgggcttcatccctgggatgcaaggctggttcaatatacacaaatcaataaatgtaatccagcatataaacagaaccaaagacaaaaaccacatgattatctcaatagatgcagaaaaggcctttgacaaaattcaacaacctttcatgctaaaaactctcaataaattaggtattgatgggacatatttcaagataataagagctatctatgacaaacccacagccaatatcatacttaatgggcaaaaactcgaagcattccctttgaaaactggcacaagacagggatgccctctctcaccactcctattcaagatagtgttggaagttctggccagggcaattaggcaggagaaggaaataaagggtattcaattaggaaaagatgaagtcaaattgtccctgtttgcagatgacatgattgtatatctagaaaaccccattgtctcagcccaaaatctccttaagctgataagcaacttcagcaaagtctcaggatacaaaatcaatgtgcaaaaatcacaagcattcttatacaccaataacagacaaacagagagccaaatcttgagtgaactcccattcacaattgcttcaaagagaataaaatacctaggaatccaacttacaagggatgtgaaggacctcttcaaggagaactacaaaccactgctcactgaaataaaagaggatacaaacaaatggaagaacattccatgctcatgggtaggaagaatcaatatcataaaaatggccatactgcccaaggtaatttatagattcaatgccatccccatcaagctaccaatgaccttcttcacagaattggaaaaaactactttaaagttcatatggaaccaaaaaagagcccgcattgccaagtcaatcctaagccaaaagaacaaagctggaggcatcacgctacctgagttcaaactatactacaaggctacagtaaccaaaacagcatggtactggtaccaaaacagagacatagatcaatggaacagaacagagccctcacaaataacgccgcatatctacaactatctgatctttgacaaatctgagaaaaataagcaatggggaaaggattccctatttaataaatggtgctgggaaaactggctagccatatgtagaaagctgaaactggatcccttccttacaccttatacaaaaattaattcaagatggattaaagacttaaacgttagacctaaaaccataaaaaccctagaagaaaacctaggcattaccattcaggacataggcatgggcaaggacttcatgtctaaaacaccaaaagcaatggcaacaaaagccaaaattgacaaatgggatctaattaaactaaagagtttttgcacagcaaaagaaactaccatcagagtgaacaggcaacctacaaaatgggagaaaattttcgcaacctactcatctgacaaagggctaatatccagaatctacaatgaactcaaacaaatttacaagaaaaaaacaaacaaccccatcaaaaagtggacgaaggatatgagcatacacttcttaaaagaagacatttatgcagccaaaaaacacatgaaaaaatgctcaccatcactggccatcagagaaatgcaaatcaaaatcacaatgagataccatctcacaccagttagaatggcaatcattaaaaagtcaggaaacaacaggtgctggagaggatgtggagaaattggaacacttttacactgttggtgggactgtaaactagttcaacccttgtggaagtcagtgtggcgattcctcagggatctagaactagaaataccatttgacccagccatcccattactgggtatatacccaaaggactataaatcatgctgctataaagacacgtgcacacgtatgtttattgcagcactattcacaatagcaaagacttggagccaacccaaatgtccaacaacgatagactggattaagaaaatgtggcacatatacaccatggaatactatgcagccataaaaaatgatgagttcatgtcctttgtagggacatggatgaaattggaaatcatcattctcagtaaaccattgcaagaacaaaaaaccaagcaccgcatgttctcactcatagtatcttcaaaagtaattaggcggctgtcccagaagttgcctttgaagattgttgcaatgtgtatacctgtcaaaaggaattga

SEQ ID NO: 8447 - DNA, 2748 bp, Homo sapiens; identical to SEQ ID NO: 2297
  SIMILAR (1)..(1464): 961254mologous to Homo sapiens putative p150,accession number U93563,Smith-Waterman Score=2438.

SEQ ID NO: 8448 - DNA, 13931 bp, Homo sapiens
  SIMILAR (13293)..(10888): 1001254mologous to Homo sapiens oligophrenin 1,accession number AJ001189,Smith-Waterman Score=4206.
atgtactcacatgtgatcacggtgtgccggcatgtgaagaatggggacattctgctactgaaccgacagcccacactgcacagaccctccatccaggcccaccgtgcccgcatcctgcctgaagagaaagtgctgcggctccactatgccaactgcaaggcctataatgccgactttgatggagacgagatgaatgcccatttcccccagagtgagctgggccgggccgaggcctacgtcctggcctgcactgatcagcagtaccttgttcccaaggatggccaaccattggcgggactgatccaggatcacatggtttcaggggcaagcatgactactcggggttgctttttcacccgggagcactatatggagctggtgtaccgaggactcacggacaaagtggggcgcgtgaagctcctttctccttccatcctgaagccctttccgctgtggacaggaaaacagcatataaacagaaccaaagacaaaaaccacatgattatctcaatagatgcagaaaaggcctttgataaaattcaacaacccttcatgctaaaaactctcaataaattaggtattgatgggacgtatctcaaaataataagagctatctatgacaaacccacagccagtatcatactgaatgggcaaaaactggaagcattccctttgaaaactggcacaagacagggatgccctctctcaccactcctattcaacatagtgttggaagttctggccagggcaatcaggcaggagaaggaaataaagagcattcagttaggaaaagaggaagtcaaattgtccctgtttgcagatgacatgattgtatatctagaaaaccccactgtctcagcccaaaatctccttaagctgatgagcaacttcagcaaagtctcaggatacaaaatcaatgtgcaaaaatcacaagcattcttatacaccaataacagacaaacagagagccaaatcatgagtggactcccattcacaatcacttcaaagagaataacatacctaggaatccaacttacaagggatgtgaaggacctcttcaaggagaactacaaaccactgctcaaggaaataaaagaggatacaaacaaatggaagaacattccatgctcatgggtaggaagaatcaatatcgtgaaaatggccatactgcccaaggtaatttatagattcaacaccatccccatcaagctaccaatgactttcctcacagaattggaaaaaactactttaaagttcatatggaaccaaaaaagagcccacattgccaagtcaatcttaagccaaaagaacaaagctggaggcatcatgctacctgacttcaaactatactacaaggctacagtaaccaaaacagcatggtactggtaccaaaacagagatatagaccaatggaacagaacagagccctcagaaataatgccgcatatctataactatctgatctttgacaaacctgacaaaaacaagcaatggggaaaggattccctatttaataaatggtgctgggaaaactggctagccatatgtagaaagctgaaactggatcccttccttacaccttatacaaaaattaattcaagatggattaaagacttacatgttagacctaaaaccataaaaaccctagaagaaaacctaggcaataccattcaggacataggcatgggcaaggacttcatgtcgaaaacaccaaaagcaatggcaacaaaagccaaaattgacaaatgggatctcattaaactaaagagcttctgcacagcaaaagaaaccaccatcagagtgaacaggcaacctacagaatgggagaaaatttttgcaacctactcatctgacaaagggctaatatccagaatctacaatgaactcaaacaaatttacaagaaaaaaacaaacaaccccatcaaaaagtgggcaaaggatatgaacagacacttctcagaagaagacatttatgcagccaaaaaacacatgaaaaaatgctcatcatcactggccatcagagaaatgcaaatcaaaaccacaatgagataccatctcacaccagttagaatggtgatcattaaaaagtcaggaaacaataggtgctggagaggatgtggagaaataggaacacttttacactgttggtgggactgtaaactagttcaaccattgtggaagtcggtgtggcaattcctcagggatctagaactagaaataccatttgacccagccatcccattactgggtatatacccagaggattataaaccatgctgctataaagacacatgcacacgtatgtttattgcggcactattcacaatagcaaagacttggaaccaacccaaatgtccaacaatgatagacgggattaagaaaatgtggcacatatacaccatggaatactatgcagccataaaaaaggatgagttcatgtcctttgtagggacatggatgaagctggaaaccatcattctcagcaaactatcgtcttcgctgaaacatgggcactcgtgggaagtgctttctgttccccaggctcagttattttcatatcttcagctgctgctattacattcccatctcttggaaggagccagagccagagaaatacagggttcctctgtggccaagggaaaaatgcctgccaagaatgctgaacttctggtgaagaaccagatgatttcttggattggccagattaattccaggcccaaggagcaaaagaatcctaaaacagagacagaggctgtgagaagcgaaaggcgctgtggatgttgctgccctagcgtttggaagcccgaacattcacatgacttgcttcaatctcatagagagccagcagctgagctgtgggtccaagtgtcaggacacctcgcccatatctctgtgtgcgaaaggatgtgcatgatgtggtcccaatcctcaggcccagtgctacttctctattcatgccgagagcagcaggccagggaggccagaaagcaggtgggacagagaaatcttcaggcccatgaaaagatgatgtgtagagattacagccaccaaatggcttcagaattattcactgagtgcaatagacctgtcgaaaagggtgtccacatttgtcaaaaaggaacactttccagttccaaaattagaggtgaaacctgttgtacccagctctgccgaacattccacactcctcagtggaggaaggagttggctccatctaggcgaggtctgaggatctggaaggtgctcagctcccatagctattggcacgtttatttacatgcagatctaacacctacagaggacttaagttcacagaggcatgaggtggagagtaacaaagcatctgctattcaacaagaagagctaactatcctaaatatatatgcacccaatacaggaggacccagattcataaagcaagtcctgagtgacctacaaggagacgtagactcccacacaataataatgggagactttaacaccccactgtcaacattagacagatcaacaagacagaaagttaacaaggatacccaggaattgaactcagctctgcaccaagcagacctaatagacatctacagaactctccaccccaaatcaaaagaatttacatttttttcagcaccacaccacacctattccaaaattgaccacatacttggaagtaaagctctcctcagcaaatgtaaaagaacagaaattataacaaactgtctctcagaccacagtgcaatcaaactagaactcaggattaagaaactcactcaaaactgctcaactacatggaaactgaacaacctgctcctgaatgactactgggtacataacgaaatgaaagcagaaataaagatgttctttgaaaccaacgagaacaaagacacaacataccagaatctctgggacacattcaaagcagtgtgtagagggaaatttatagcactaaatgcccacaagagaaagcaggaaagatccaaaattgacaccctaacatcacaattaaaagaactagaaaagcaagagcaaacacattcaaaagctagcagaaggcaagaaataactaaaatcagagcagaactgaaggaaataaagacaaaaaaaaaaaccctccaaaaaattaatgaatccaggagctggttttttgaaaggatcaacaaaattgatagaccgctagcaagactaataaacaagaaaagagagaagcatcaaatagacgcaataaaaaatgataaaggggatatcaccaccgatcccacagaaatacaaactaccatcagagaatactacaaacacctctacgccaataaactagaaaatctaggagaaatggataaattcctcgacacatacaccctcccaagactaaaccaggaagaagttgaatctctgaatagaccaataacaggctctgaaattgtggcaataatcaatagtttaccaacaaaaaagagtccaggaccagatggattcacagccgaattctaccagaggtacaaggaggaactggtaccattccttctgaaactattccaatcaatagaaaaagagggaatcctccctaactcattttatgaggccagcatcattctgataccaaagccgggcagagacacaacaaaaaaagagaattttagaccaatatccttgatgaacattgatgcaaaaatcctcaataaaatactggcaaaccgaatccagcagcacatcaaaaagcttatccaccatgatcaagtgggcttcatccctgggatgcaaggctggttcaatatacgcaaatcaataaatgtaatccagcatataaacagaaccaaagacaaaaaccacatgattatctcaatagatgcagaaaaagcctttgacaaaaattcaacaacgcttcatgctaaaaacttttaataaatttgctattgatgggacgtatctcaaaataataagagctatctatgacaaacccacagccaatatcatcctgaatgggcaaaaactggaagcattccctttgaaaactggcacaagacagggatgccctctctcaccactcctactcaacatagtgttggaagttctggcctgggcaattaggcaggacaaggaaataaagtgtattcaattaggaaaagacgaagtcaaattgtccctgtttgcagatgacatgattgcatatctagaaaaccccattgtctcagcccaaaatctccttaagctgataagcaacttcagcaaagtttcaggatacaaaatcaatgttcaaaaatcacaagcattcttatacaccaataacacagacaaacaagagagccaaatcatgagtgaactcccattcacaactgcttcaaagagaataaaatacctaggaatccaacttacaagggatgtgaaggacctcttcaaggagaactacaaaccactgctcaatgaaataaaagaggatacaaacaaatggaagaacgttccatgttcatgggtaggaagaatcagtatcgtgaaaatggccatactgcccaaggtaatttatagattcaatgccatccccatcaagctaccaatgactttcttcacagaattggaaaaaactactttaaagttcatatggaaccaaaaaagagcccacatcaccaagtcaatcctaagccaaaagaacaaagctggaggcatcacgctacctgacttcaaactatactacaaggctacagtaaccaaaacagcatggtactggtaccaaaacagatatatagaccaatggaacagaatagagccctcagaaataatgccgcatatctacaactatctgatctttgacaaacctgacaaaaacaagaaatggggaaaggattccctatttaataaatggtgctgggaaaactggctagccatatgtagaaagctgaaactggatcccttccttacaccttatacaaaaattaattcaagatggattaaagacttaaatgttagacctaaaaccataaaaaccctagaagaaaacctaggcaataccattcaggacacaggcatgggcaaggacttcatgtctaaaacaccaaaagcaatagcaacaaaagccaaaattgacaaatgggatctaattaaactaaagagcttctgcacagcaaaagaaactaccatcagagtgaacaggcaacctacagaatgggagaaaatttttgcaacctactcatctgacaaagggctaatatccagaatctacaatgaactcaaacaaatttataagaaaaaaacaaacaaccccatcaaaaagtgggcgaaggatatgaacagacacttctcaaaagaagacatttatgcagccaaaaaacacatgaaaaaatgctcaccatcactggccatcagagaaatgcaaatcaaaaccacaatgagataccatgtcacaccagttagaatggcaatcattaaaaagtcaggaagcaacaggtgctggagaggatgcggagaaataggaacacttttacactgttggtgggactgtaaactagttcaaccattgtggaagtcagtgtggcgattcctcagggatctagaactagaaataccatttgacccagccatcccattactgggtatatacccaaaggattataaatcatgctgctataaagacacattcacacgtatgtttattgcggcactattcacaatagcaaagacttggaaccaacctaaatgtccaacaacgatagactggattaagaaaatatggcacatatataccatggaatactatgcagccataaaaaatgatgagttcatgtcctttgtagggacatggatgaaactgccaaccatcattctcagcaaactatcgcaagaacaaaaaaaccaaacaccgcgtattctcactcataggtgggaattgaacaatgagaacacatggacacagaaaggggaacatcacactctggggactgttgtggggtggggagaggcgggagggatagcattgggagatatacctaatgctagatgacacattagtgggtgcagcgcaccagcatggcacatgtatacatatgtaactaacctgcacaatgtgcacatgtaccctaaaacttagagtataataaaaaaaagaaaaaaaaaagaaaaaaaaaggtatcttgattctctctgaaattttttattatttctgatgtttttttccaggcttgtaatgtgtcaaggccacttatctgcagctaccttagaagtagtataattgatctatgttctctcaaaagcaattttttcctagtcacagaactatttcttcttttactactttatttgttctagttattacagaatcaaagaacttcttgaaaagagaatactttcccatgataaccaattactttagaaatactctgcatgacactataattgaaattagatgctaagttttgtccctcagtggctgaacacccccaaccttttaaaaaacaaaaacttcaaaaataaaaattcaatatttctttttgtaagccatctcttgattttgctatcaccacagaaaaatttgtagagatttgaccccaatacatcaagtactgcagaggcaccaagaccttttctgcttctaaaactgcatttgtggatgtcaccagtctcttaggctgaaactgaaactgcccatgctacaaccttggcgaagtatggagacacctgtgaggacctttttactttttgaaaaatggcaagccaaggacttaacaactgccaactaaaacacaaatccttcacttcacaaaataaaattagatgatcattttaaaaacattaccaaatgtgcaagctgaatatgaagagaaagcctaactcaggaatatcttccagcccagtttgcatttccatataaactgaacctgcaccccctccctccttcaaatgtttgcctttcaatattttgttaggcaggcaagagtcaagagtcatgccaactctagtaatgtggcctctgttcaaacacctaccacagtgtggcaaagggaaaacagcatgggctaagagtggcctggattcaaatcacagtccttttatttactttctatgtgcccttgagttgtttactttagccccctgggccataatttctttctctgtaaaatgagaatacttgcatgaatatgaaacactgagcagttaataaatacgtgcttaataaatgttaggttctttgttatccctgccagttcatcactttcagttcatccattgccagattctctaacttgctggccaaggtatgttgataatttcctatagctgccactcttctattatcaccctcttcccatagcctctgcaaaatgactgcccatccattaagcctagggcaagccagtctcattccatgatagcatgcctcgccacagaagctttttgcactttaagtcagagtgccaaaggcaggcgttgaaattcattctttggcattcttaaggtatagaccagagcaaaggcagagctactcagccactgctccctggcctccaggcagactgctggtccccagctctccaagataggcccttgatctgtgtcccaggcaacacacagcaatctcatgacatttctgggacatattttctactgggatcacagcagctttctagggctctcaataatcttccaatgtttgcatcggtgattgtggtattttcccccaagaaaaccagagtcaaaccatgtttctttaaagggactgtggccctattagccatgctttcatggccaaaatctgcacacctgtctgctttattcaggatagagcagggaggccacagccctgaaacaagggctcaaaaatcacttcctaggtgaggtcagtaaggcctcacagagactactattgggggcaagcagcaggtgaaatgatggtcacttgactcttttactcctggtttcttagcaacctggcctttgagactgggtacagtggagtgagttcaaaccgggccacctggatatgccttgatttagaatggcatcaagtttccactcaattactttcaaaaaggctctcagtgtacttggccttacatgttcctaactcaccaataaaccatgtttggaattcagtcttgaaaatgactactgcctttcagtagcactgttccaaatgcatctctgagtgggtttgcacatgagtgtgcatgtactcactctctatctctctcatctaggctttatctgtcagtactataatcagtgcactaacagggccttggtagaagagtgcaagtaggaaagctctttccctcacactgggcaacattataattatacagacgctacagacaagctacggcccaggcatctgcatagaaacaagtactgatgctctttccagcaacttcccttcaacaaacaggaattagaaatgtccattcctcagatttctgccccattacaccaatttttaggtcctttccaataatagagatagcaaatgaaagggacctggcaagggtttatgtcctaacatttttcacttggtggcaaatattcaagaaaaagggtaaaagccaacccccagaaatgatggccactaaagccacaaaccacaaggtcccttgctaaataagtgtgatataatggggaaaaaaaacttgcataggagcctgggacctgaaatcttgtactggtgtgatcactaccttgctctgcctcagttcccccgactggaaactgggcagttgttagactaaatgattttgaaaagcccttccaatcaagggcttatatggattgtaaaaagagtattttaactcaagtgctgtggttcttgacttttttgggtcacgagcccatttgaaatttagcagaacattatggactatctccccagaaagggcatattgtcatggaattgtgcataccatctcaggggcatcatggagtttctgagtccatggacactgggttaagaactgcttttttcaggagataaaagagtttatgtgcagaaggcaaacatgaagcagcagtgacagctgcctggcctcaatccaccttaacaatttttctagcatttgaccccaaaatagaactcctacaggaccaaacacagtctcctttttttaaaaggaaatgtgttcagcttttgtttgtttcttgattgcttgacaggaagctgtcaaaaaaaaggagaaagaataatccaaatagacctaggcttttacatgcaaaacatgctttgcagatttgtcctaagtggctgcatgtaacagcaggaaggccaccttcctaagtccacatggaggtgctgtgggggcatcactcatcccactcatagcctcgcaggagcagacgggctcttggcaacatactgcagcaccagagcgctgacatggcaccagtgtccatatcctcagtaggagacatgttgagattctccaatgttcagcaaacatttctattcccttccaaccaaggtaagcaatggccccaactcaagtggccttcagttcaaggtaagacccctgagatcagtctttagccccaaatctctcagagttcaatggccctctgaggaagcaggaagttcagggaagagttgaaaactgagctcccctcttcaactcaggtaagtggatatcttggttttggcagagtctggcttgagggagtccagctcttcacagtgttataggaactcaaaacagaccttctgaggggatgaagacagaatacaaaggagatataaacacctgtctaggacatatgctccttattttatggcctcccagagagagtctgaaagtgcaaggctaggaaggagctgctcttcaacacaaaatgactccgcacacaaaggtttgaagaagaaagactctttcagaacctggaaagggtcctctgaggccaaggcttttaaaacctgtagcctcaactttcatctccaggaagtctgccttgagaacttcctgttttccgggaagctgtttcaaaaaacctggtcctggaagccaccacagatgatgtgatttcccccgcattgccagccacaatatctggctttggttctggcttttggggagtagctgcccggcagggaggatctgggggcctcactggggggcggatgatggttggcttttctcctggaggccgcactttgctgaaactgtcagcatccccctccttgtggtgggccaggggccggggagctggtctctttatgtggaaagagggggtcttggtgggcccagagcctggcatgggtccattggtggcctttggggtgatcttggtccctccatcctgcagcctagacaccaacttccccacgtccacctctgggcagggctccaacttgccatccaaaataggcctgcttggggacttcctcccaggatcagtttccccactcctctgaataggtagtttggggtgttgtggtggcttggggggttctatgctgctggtgatagtaccattcggtgtttgatgttggatttcatcttcgctttcatccagggaagaagtatagaaaaccgtcctttctcgcagcaagcgctttgaaatcgtgattggtttgtgccttcttgctgtcacccgaggcggaggcactggcggtgcagcgctttcctcaggtggacctaaatagatcttgccaaagtgctcgattagtatttccaccactatgttctggaatttgatgttcatcatggcggccacagtgtcctcctgagctctcatcagggtgggcccaaagattactcccatgttggagggggtcataagattctctttgctgtgctcacacacattgaccaagtgtcttatcagaagttccagcatctctcggttcttttctggtagcttatataccagggagtgaatagctcctaggcggtaatccaggttgtcagacttggcagcagagaccagctctttgtgaagtctataggtcatgacaggttcagaaagattcctgaggtagaatttcaaggagctggtgattgtcttaatgtcccagtcactattatgaaaatcaacatctcctgggcatttaggatcaaaaaaggcattcagcagcttctgaacctgaatattgctgcccacagtgcggtacaacccttctgtcttgatccctttggtctcaataatattgatgcacttcctgacaaacttgaagcccacttcatttagctccatttcttgctgttttgttatagggctgtggtagataggttctttcccatccatggcttccatccatagccttctgttagcttctgaaagggcctgcagagtgatggttcctggcctttcattagtttctatgtcaaaacagaacctcttgtcgatagactccgtcttccttctcacacagtacttcagtgttaagtccaagggcccctgcttagcacctggcttctgctccataggcgtcatggtcagtgttttggtctctttctcatactggcaatagtatttcacccaggatattcctaaagcccatttctcttgtgtatagagatagccttcaatagttggctgtcctggaagtttgcatgtctggggagcttctttcatccttttcttaagttcttccatctcttcccgggtactggagaaatgatttcttgtattctgtaaactgagttggagctgttgtttgtatgggaggaaatcctgtgtgagctccacagtcaggctgttagaaatgaacagactatgaagaaaggccaagacaggctccacaatattgaacttcttggactcctgaacttcctggatttgataaacataatcaagagaggactcgaaaaaattgtgcctctccttgtccacctgtaggtctgcctcttgtaactgagattctttcttttttgaagacaggtgtaagtgccgatccagtaaagaataaaacctctcaccatccttttcaaatttctttttccgctccttggtgaagcctatttgttccttccggaaattttccaagggtttaatcagcaaatcactagcattgtgtaccatcatcatcctctcattttctacctcgttgagcaattcagcaaattccttgaaggattcagcgatgttaatttcatcatcagtcagagtgtctccaatgaaatcaaactgaaatgactgcagcgtctgggaaaatttctgaacagcagaagaataatttctcatagcgctgataagcgcgttgccgtctttgattacgtctttgatgaatttgttggtcctctccagttcctgctcataacacttgagcctctcgcggaaatcggggctgtccaggtagcagtcgctgaactccagcgggggatgacccatggttctgtttcagtgagactcctgaggagcgctggctggtccggacagagaacaggcgccccggcgatggcttcagggccagggagagctaactatcgcagtcggatcccggcagggtgctgcctagcaagcagcatgtcccttaggcatcgccttcccagataagcagcaaaaaccgcagcccgacttgcctccggagacgggccggatccttcctgagcaattgcaaacgtgacattgggcccgcccaaggtgtaggcgaggttagagctggagctgggaacagcctctttacaggctcctcgctccggagcgagcggaagattccttggccgaatccgcgggcaacccggattgcactgtcccctcccctttcttaaagccaacgcctgcgccccgccccagcgaagcccgaggaccaaaccggagcgctctggctccttcctcaactgttttccttgtaccttagagtttcctgaccagggcccgctggctgctaagacttcttcctggtgcaagggaccggccggccggccgtccttttaggcgccggaagggttaagccagggcggcaatgaaacgtagcctcgctccatagacactgcagcgggaagaggagggcgagagcgcgacgcaca

SEQ ID NO: 8449 - DNA, 410 bp, Homo sapiens
  SIMILAR (195)..(356): 521254mologous to Arabidopsis thaliana putative protein,accession number AL049659,Smith-Waterman Score=145.
aatcccatacttaccttaatccacctaacatggagactggtatgatttatgtggtccagggcatatatggctatcatcattatatgcaggatcgcatagatgacaatggctggggctgtgcttatcgatctctgcagactatctgctcttggttcaaacatcagggatacacagagaggtccattccaacacacagagaaattcagcaggctctagtcgatgccggggacaaaccagcaacatttgtcggatcgcggcaatggattggatctattgaggtgcagctggtactaaaccaattgatcggtataacgtcaaaaatcctgtttgtcagtaacacccgaaaaaacaagaaagtaggaaacattgtctcctagctcattatttgaccgtagtgttggaagtagttc

SEQ ID NO: 8450 - DNA, 1011 bp, Homo sapiens
  SIMILAR (754)..(999): 451254mologous to Arabidopsis thaliana putative protein,accession number AL049659,Smith-Waterman Score=163.
atggaaggtgaggaggacatgaagttggtttgggccatgtttaagacctcacatcaaatagtaaatatagatcttatgctggaaatgtcaacctccctggcagctgtaacgcccatcattgaaagggaaagcggaggacaccattatgttaatatgactttacctgtcgatgcagttatatctgttgctccagaagaaacatggggaaaagttcgtaaactcctggttgatgcaattcataatcaactaactgacatggaaaaatgtattttgaaatatatgaaaggaacatctattgtggtccctgaaccactgcactttttattaccagggaaaaaaaatcttgtaacaatttcatatccttcaggaataccagatggccagctgcaggcctataggaaggagttacatgatcttttcaatctgcctcacgacagaccctatttcaaaaggtctaatgcttatcactttccagatgagccatacaaagatggttacattagaaatccacatacttaccttaatccacctaacatggagactggtatgatttatgtggtccagggcatatatggctatcatcattatatgcaggatcgcatagatgacaatggctggggctgtgcttatcgatctctgcagactatctgctcttggttcaaacatcagggatacacagagaggtccattccaacacacagagaaattcagcagctgtcttgtgtatggatgttttatatttttaaatacatcaaggctctagtcgatgccggggacaaaccagcaacatttgtcggatcgcggcaatggattggatctattgaggtgcagctggtactaaaccaattgatcggtataacgtcaaaaatcctgtttgtcagtgttggaagtagttcatctgatagaaaatggtttctttctagccaaggttcagaaattgcctctcaaggacgggaactggctaatcatttccaaagtgaaggaactccagttatgatcgagtatatctga

SEQ ID NO: 8451 - DNA, 1530 bp, Homo sapiens
  SIMILAR (899)..(870): 1001254mologous to Homo sapiens Human secreted protein, SEQ ID NO: 6436,accession number G02355,Smith-Waterman Score=62.
  misc_feature (1)...(1530): n = a,t,c or g
ttttttaacagttacaggtaaattttttttaatgatttttatgatgaattacatacatagaattaaaagttcaaaaacctaccttaaagggtaagatacgttacttttctatgctagtaggaattcaaatccttgaatgataaagccatttagagtcttattccaaggtcctgctgacagagcctgatgtcacgatttccatgacataatcttgtaactttgtaaaaggctttcctttcccgtcttctctatccagggctggtgcggatggaagggcccagatttttggaacaaggatgcatactataacttatgtcttcctcagcgaccaaatatgatttaaaatatcttgggagtcaaagactgcagtagaagtggtaattataaaattttgtgaataaagaatccagtttaatttttcacattaaatcctggttctagtttgaccatttaaattatgacctttttcaaaggttgtaaatactgcacggagaatgtattttttagacgttcctttaataacttaaaagacaaagcatacacaaccagcatattataggcatgtagaatacatgggttcttaaatggatcttcacttgggaagaaagtttttcgtccttctcagaaggagattagacacaacatatggtaaaancccaaaagcaggagcttaatagatttgccatgaaaatgaaggcgttccttcaagacttccttcataaccccacgtgacatcagcacttcctttttcccactgggtattttctacacttccgaggactccgtttctgtctgaggcacgggcaacacaatcattcctgtcaggggtgttcacttgcttttattgtctgcatacatttaattgttgtaagaaacttggcacagtctggaaatccacatggaccaagcgagatcttcagctgtttgcccgttcttattacataaatcaatttgggcatcactggctacaagcaggcttaggcactccaggcttccaacttttgctgccttgtgtagtggagcttctcctaaaacatcctgctggttgaggtcagcgcccgtttgcagctgccagagaagaaagcaagcaaggccgcttcctgcggctaagtggacaggcgactgcttgcagggatccgggggtgcgttgaccgaggcccctgtctccagcaaatgcttcagaccatccacctttgtccagtcccgcgcccctccgggctggaaacctccccgcccttcacaaccagctctgaccaggcagcgcccagtggtccgtccccgcattaacgagaagacgaatctagaagcttgagcctgcaagacaaaagctcgggctctgtgagcccgaatctcacctcggggttgcaatccagcaacagcatttcccgccaaacctggactggatctaattaacacaagtgatgagtaaatgcatggtgctgtgcgagtcagatgtttggttttccattcctgagttactccacttagaataatagtctcaaattccatccaggttgctgtgaaggccat

SEQ ID NO: 8452 - DNA, 1701 bp, Homo sapiens
  SIMILAR (721)..(810): 381254mologous to Arabidopsis thaliana putative protein,accession number AL049659,Smith-Waterman Score=59.
aaatcttgtaacaatttcatatccttcaggaataccagatggccagctgcaggcctataggaaggagttacatgatcttttcaatctgcctcacgacagaccctatttcaaaaggtctaatgcttatcatctttccttatgagccatacaaagatggttacattagaaatccacatacttaccttaatccacctaacatggagactggtatgatttatgtggtccagggcatatatggctatcatcattatatgcaggatcgcatagatgacaatggctggggctgtgcttatcgatctctgcagactatctgctcttggttcaaacatcagggatacacagagaggtccattccaacacacagagaaattcagcaggctctagtcgatgccggggacaaaccagcaacatttgtcggatcgcggcaatggattgggatctaattgagggtgcagctggtactaaaccaattgatcggtataacgtcaaaaatccctggtttgtccagcccaaggttccagaaattgccctctccaaggaccgggaactggcttaatccattttccaaagtgaaggaactccagttatgatcgggggaggagttttggcccacacaatactaggagttgcatggaatgagattacagggcagataaaagtttctgattctagatccacattataccggtgctgaagacctgcaagttattttgggaaaagggctggtgcggatgggaagggcccagatttttggaaacaaaggatgcatactataacttatgtcttcctcgagcgaaccaaaatatgatttaaaatatcttggagtcaaagactgcagtagagtggtattataaatttgtgaataaagaatccagtttaatttttcacattaaatcctggttctagtttgaccatttaaattatgacctttttcaaaggttgtaaatactgcacggagaatgtattttttagacgttcctttaataacttaaaagacaaagcatacacaaccagcatattataggcatgtaaatacatgtgttcttaaatggatcttcacttggaagaaaagtttttcatccrtctcagaaggagattagacacaacatatggtaaagccaaaagcaggagcttatagatttgcatgaaatgaaggcggtcttcagacttcctcataacccacgtgacatctgtttttaaaaacacgttaacattaaaaacrtttttttaaaaagagttttawccccaaacttccaccatgcagmcccatttttggtctctagactctggtaagtataaccagtactaaaatgttaatgagaatgaaccaatcctactagaaatacgagtgtcagtattaaatggaataataaatgctatgcaaacaagagatcactgcgggaggaaaaaagcagcagctctgagttacttaccagcacttccttttcccactggtattttttacacttccgagactccgtttctgtctgagcacggcaacacaatcattcctgtcagggtgttcacttgcttttattgtctgcatacatttaattgttgtaagaaacttggcacagtctggaaatccacatgaccaagcgagatcttcagctgtttgcccgttcttattacataacctgaaaacaggataaaaacggagtgaaatgaaacattgaacttaagtcttttttttatatctta

SEQ ID NO: 8453 - DNA, 882 bp, Homo sapiens
  SIMILAR (3)..(656): 1001254mologous to Homo sapiens KIAA1267 protein,accession number AB033093,Smith-Waterman Score=1148.
cgcccagctggcgggaggttgatcttcagtctctgaaggggagtcctgatgaggagaatgaagagattgaggacctatccgacgcagccttcgccgccctgcatgccaaatgtgaggagatggagagggcacggtggctgtggaccacgagtgtgccaccccagcggcggggcagcaggtcctacaggtcatcagacggccggacaaccccccagctgggcagtgccaacccctccaccccccagcctgcctcccctgatgtcagcagtagccactctttgtcagaatactcccatggtcagtcccctaggagccccattagcccggaactgcactcagcacccctcacccctgtggctcgggacactctgcgacacttagccagtgaggatacccgttgttccacaccagagctggggctggatgaacagtctgtccagccctgggagcggcggaccttccccctggcgcacagtccccaggcggagtgtgaggaccagctggatgcacaggagcgagcagcccgctgcactcgacgcacctcaggcagcaagactggccgggagacagaggcagcgcccacctcgcctcccattgtccccctcaagagtcggcatctggtggcagcagccacagctcagcgcccgactcacagatgagcgggagacagccatctaaacagactcactaactattggcattaaagcttcagaaatctctgcgtttgatattcaaacatcatatgccggaaattttcacagtttttagtgaacttaaggaatttagatcctactttggtatttttttttcttgttttaatttttgttttgtttttgtttccatgttttcttgtcacacaccttgagcacttccttccgttgg

SEQ ID NO: 8454 - DNA, 1991 bp, Homo sapiens
  SIMILAR (537)..(1775): 871254mologous to Homo sapiens KIAA1267 protein,accession number AB033093,Smith-Waterman Score=1823.
tcgaaccgcaccggattgccagtccacgatttcggcaggcatttgattcagatggcactgaccgtactttatgatttttgtctgatattgaagaggaagaactgaccagaggtgatcccgagcagcgtcatgtacccctgagacgcaagtcagaatggaaatgggctgcagaccgggcagctattgacagccgctggaactggcttcaggctcatgtttctgacttggaatatcgaattcgtcagcaaacagacatttacaaacagatacgtgctaataaggggttgataggtcttggggaggtacctcccccaagagcatacaacagacttatttcttccgcttagttctgaggtgaagacagatcatgggactgataaattgattgagtctgtttctcagccattggaaaaccatggtgcccctattattgggtcatatttcagagtcactgtctaccaaatcatgtggagcactcagacctgtcaatggagttattaacactcttcagcctgtcttggcagaccacattccatggtgactgctctgatgctgaggaacaattacataagaagcaacgactgaatctcgtctcttcatcatctgatggcacctgtgtggcagcccggacacgtcctgtactgagctgtaagaagcggaggcttgttcgacccaacagcatcgttcctctttccaagaaggttcaccggaacagcacaatccgccctggctgtgatgtgaatccctcctgcgcactgtgtggttcaggcagcatcaacaccatgcctcccgaaattcactatgaagcccctctgttggaacgtctttcccagttggactcttgtgttcatcctgttctagcatttccagatgatgttcccacaagcctgcatttccagagcatgctgaaatctcagtggcagaacaagccttttgacaaaatcaaacctcccaaaaagttatcgcttaagcacagagcacccatgccgggcagtctgccagattcagctcgtaaggacaggcacaaattggtcagctccttcctaacaacagccaagctgtcccatcaccaaacccggcctgacaggacccacaggcagcacttagacgatgtgggggccgtgcccatggtggagcgagtgacagcgccaaaagcagagcgcttgctcaacccaccaccacccgtgcatgacccaaaccacagcaaaatgagattgcgagaccattcatctgagagaagtgaagtgttgaagcatcacacagacatgagcagttcgagctacttggcagccacccaccatcctccacacagtcccttggtgcgacagctctccacctcctcagattcccctgcacccgccagctctagctcacaggttacagccagcacatcgcagcagccagtaaggaggagaaggggagagagctcatttgatattaacaacattgtcatcccaatgtctgttgctgcaacaactcgcgtagagaaactgcaatacaaggaaatccttacgcccagctggcgggaggttgatcttcagtctctgaaggggagtcctgatgaggagaatgaagagcctgcctcccctgatgtcagcagtagccactctttgtcagaatactcccatggtcagtcccctaggagccccattagcccggaactgcactcagcacccctcacccctgtggctcgggacactccgcgacacttagccagtgaggatacccgttgttccacaccagagctggggctggatgaacagtctgtccagccctgggagcggcggaccttccccctggcgcacagtccccaggcggagtgtgaggaccagctggatgcacaggagcgagcagcccgctgcactcgacgcacctcaggcagcaagactggccgggagacagaggcagcgcccacctcgcctcccattgtccccctcaagagtcggcatctggtggcagcagccacagctcagcgcccgactcacagatga

SEQ ID NO: 8455 - DNA, 817 bp, Homo sapiens
  SIMILAR (327)..(175): 311254mologous to Mus musculus Niban,accession number AB049355,Smith-Waterman Score=61.
ttagctgggcgtggtgacagcaatgccctgataaatacccgagtcggtacgtataggagtggccgtagaaacaggcagacatcgcttgacactggcggaggcagacggttgcatgtgagccgatgatcgtgaccatttgcacatccagacctggtgcgcaaaagctccagtctttttgcagcctggctcgagttggctcagcacaaaaggtaaaaagatgcagagaccccagcctcggatgaacctcctctgcgccaacccgctgtccgatttgaatttcttcagcacgcgccccctgactctctccagcctctgggcagccctggtcacagttgagggccgtcgtcagacactggtcagccagctgcaggaaggtggccacggcgtcagccatgagctgctgtgcaagatcttgggccccaaacacgaggctctgcatccccagaaagccaaacggtgctgccagctgccccaagcgcccccggctccgctcggcctcacggtagcatgtctgcatcagcgccaagtcccacggcatctccccaaatgagtaaacctccctgcgcagccgcgtgcctgaggggctctggcgcaggcggtgggacagtcggtccatgccttgagccaggagggtccgcaccgcctcgagcgaggcttccacggtgcgcagcagggtctgcacgacccggggcagctgcgggtccacctcccggcgcaggcacgactcgagcggtcccctgatatccgagatggggatgtgcaggggccctcgcgagggggacgcgagcagggacgctgagcgccctcttctacccat

SEQ ID NO: 8456 - DNA, 795 bp, Homo sapiens
  SIMILAR (192)..(257): 451254mologous to Homo sapiens apoptosis-associated nuclear protein PHLDA1,accession number AF220656,Smith-Waterman Score=64.
atgcggatgtgcctgcgactacccacgctgatgaccaagtgcactaactggcatgttaccggccacctgtgcagacccacaatagagaaccgacaccggaaccgggacgggggacacaacaacagcatgaatggaaacacgatggccggcggagcagcccgcattggcggagagaaggctcttccgagcggcacccagaggagctttcgcgggcatcgccgcaccttcaccggcagccccaccccaacccgggtccctcgggattctgcccgagcctacgccggcgcaagcgtgggcagcgaggaaccagctgagaggcaggatcaaagagcgtgggagttgaagacaagggaaaactgggggacagaggcgaaaactcggatccgaaaggggatacgcgacgataatgaaacacggcatacattgatgcgttccaagtcccattcgctacatccatctcctggcacaaggaaacacacattcatgaaaatcaaacggatggcaataatggacaaattgaaatccccacatacatccaatcgatcgattgatgggcaagtgacaaccgatcggcacccatatgatgccaatcctgtgcaactccgcacctacaccgtcatccccaccccaacccggttcccacttgattctgcccggtccaactccggcgcaagcgggggcatcgatgaaccatcagagatgcatgaacaaagagcatgggaggagaagacaagggaaaacggggggacagaggcgaaaacgcggaaccgaaagggggactgtaaccacaagtag

SEQ ID NO: 8457 - DNA, 549 bp, Homo sapiens
  SIMILAR (3)..(53): 941254mologous to Homo sapiens Human pp392_3 secreted protein,accession number Y28682,Smith-Waterman Score=84.
ccaagaagtttaatccagctggggagagagtctgtaccatcctggtggatccttccattccttccactgcctatcctagctatggagttccccacagctgaggtccttctctcagccttccacatttgtaagttcctccaggccaagttctatcagctgtcccttgaacggcccgtggaaaggctgctcctgacctccctgcagagcacaatgtgctcagccacagcaggcaacctgagaaagttgtatacactcctgagcaactgcatccctccagcctgggagggtgagactccatctaaaaaaaataaaataaatggcaacccctggtctaagataagagataaaacatcaggtggtgaggttgaggtttggggcttggtagcagttgccccagtcatgagatgactcacttaacccgtctcctttaagtgagctgggctgggaggcttcctacaggggaagaggcccctctggggagctgactcagccaggctccctgaacttttttccttgtcccatcctggggtcaataaaactgaatgttgc

SEQ ID NO: 8458 - DNA, 1623 bp, Homo sapiens
  SIMILAR (467)..(1576): 961254mologous to Homo sapiens Human pp392_3 secreted protein,accession number Y28682,Smith-Waterman Score=1899.
  misc_feature (1)...(1623): n = a,t,c or g
cgcaccggcatttccgggtcgacgatcccgtgcagaaatggcgacggagcctggctgtgggcccatctttggaaataagatctgggaatgattgtctagcctccagcctcaacttacttgatgcttgagagactcaaagccccgtggtcagctgccctgcaaagaaagtattttgaccttggcatttggacagctcccatctctcccatggccctgacaatgctgaatgggctcctgattaaggactcaagcccacctatgctgctgcaccaggttaacaagactgcccagttagataccttcaactaccagagctgctttatgcaaagtgtctttgaccatttccctgagatcttatttatccaccggacctataacccaaggggtaaggtcttatataccttcctggtggatggacctcgggtgcagctggagggtcatcttgcccgagcagtctactttgccatccctgccaaggagggacacttgaggcctgtcccagatgttccaagtattcaagaagtttaatccagcatgggagagagtctgtaccatcctggtggatcctcatttccttccactgcctatcctagctatggagttccccacagctgaggtccttctctcagccttccacatttgtaagttcctccaggccaagttctatcagctgtcccttgaacggcccgtggaaaggctgctcctgacctccctgcagagcacaatgtgctcagccacagcaggcaacctgagaaagttgtatacactcctgagcaactgcatccctccagccaagctgcccgagcttcactcacactggctgctcaacgaccgcatctggctggctcaccgctggagaagccgagctgagagcagccactacttccagagcctcgaggtcaccacccacatcctcagccagttctttggtaccaccccatctgagaaacaaggtatggcttctctgttccgttacatgcagcagaactctgcagacaaggcaaacttcaaccagggcctgtgtgcccagaacaatcatgctccctcagacaccatccccgaaagccccaaactggagcagctggtagaatcccacatccagcactccctcaatgccatctgcacagggccagcagcccaactgtgcctgggcgagcttgctgtggtccagaaatccacacacctcattggctctggctcagaaaagatgaacatacagatcctggaagatacccataaggtgcagccccagccccctgccagctgcagctgctactttaaccaggccttccacctgccctgccgccacatcctagccatgctcagtgcccgccgccaggtgctccagcccgacatgctgccggctcagtggacggcaggctgtgctaccagtctagacagcatcctgggcagcaagtggagtgagaccctggataagcacctggcagtgactcacctcaccgaggaggtgggtcagctgttgcagcactgcaccaaggaggagtttgagcggaggtacagcaccctgcgggaactggccgacagctggattgggccttatgagcaggtccaactctgattattctcgatgcccagagatgctcatgcaccttgntgaacaat

SEQ ID NO: 8459 - DNA, 326 bp, Homo sapiens
  SIMILAR (1)..(30): 901254mologous to Mus musculus olfactory receptor F3,accession number AF102530,Smith-Waterman Score=47.
tgcctgactcagatgtacttcctcatctccttgccaacgtggacacctttctgctggccatcatggcactggaccactattggccatctgcagcgccctgcggtactgctccatcatcacccccggctcattcacacttctactgtgacgcctacctgctcatgaagattgcctgctcaatacatgtcaatcagcatgtgttcctgggggccgtggtcctgttcctggtccctgtgcgctcatcttggtctcctacatccgcattgctgcagccatctccggattccctctcctacaagaaggcgcaaggcatgttccatatgtag

SEQ ID NO: 8460 - DNA, 677 bp, Homo sapiens
  SIMILAR (97)..(306): 531254mologous to Mus musculus olfactory receptor F3,accession number AF102530,Smith-Waterman Score=174.
  misc_feature (1)...(677): n = a,t,c or g
gacgatctcttatccccagtgcctgactcagatgtacttcctcatctcctttgccaacgtggacacctttctgctgcccatcatggcactggaccactatgtggccatctgcagcgccctgcagtagtgctccatcatcacccccggctctgtcaggggctgnccgtgctagcgtgagcaggctccagcctcatctccccggtccacacggtcatcatgagcagactggccttctgctcctccgcccagatttcacacttctaccgtgacgcctacctgctcatgaagattgcctgctcacatacatgacaatcagcatgtgttcctgggggctgtggtcctgttcctggctccctgtgcgctcatcttggtctcctacatccgcattgctgcagccatcctccggattccatctcctacaagaaggcgcaaggcatgttccatatgtagctcccacctgtctctggtcaccctgttctatggaactgtcctggggatctgcatatgacccccagactccttctcagcccaggacgccatagcaaccatcatgtacactgtggtgacctctatgctaaaccccttcatctacagtctgatgaacaaggaggtccaggaggctgtgagaaggctcttcagtaggggctcacactcatcatggtgctggtgagacgaaa

SEQ ID NO: 8461 - DNA, 3597 bp, Homo sapiens
  SIMILAR (1)..(3594): 1001254mologous to Homo sapiens Attractin; DPPT-L,accession number AF034957,Smith-Waterman Score=6715.
atggtggccgcagcggcggcaactgaggcaaggctgaggaggaggacggcggcgacggcagcgctcgcgggcaggagcggcgggccgcactgtgtcaacggcggtcgctgcaaccctggcaccggccagtgcgtctgccccgccggctgggtgggcgagcaatgccagcactgcgggggccgcttcagactaactggatcttctgggtttgtgacagatggacctggaaattataaatacaaaacgaagtgcacgtggctcattgaaggacagccaaatagaataatgagacttcgtttcaatcattttgctacagagtgtagttgggaccatttatatgtttatgatggggactcaatttatgcaccgctagttgctgcatttagtggcctcattgttcctgagagagatggcaatgagactgtccctgaggttgttgccacatcaggttatgccttgctgcatttttttagtgatgctgcttataatttgactggatttaatattacttacagttttgatatgtgtccaaataactgctcaggccgaggagagtgtaagatcagtaatagcagcgatactgttgaatgtgaatgttctgaaaactggaaaggtgaagcatgtgacattcctcactgtacagacaactgtggttttcctcatcgaggcatctgcaattcaagtgatgtcagaggatgctcctgcttctcagactggcagggtcctggatgttcagttcctgtaccagctaaccagtcattttggactcgagaggaatattctaacttaaagctccccagagcatctcataaagctgtggtcaatggaaacattatgtgggttgttggaggatatatgttcaaccactcagattataacatggttctagcgtatgaccttgcttctagggagtggcttccactaaaccgttctgtgaacaatgtggttgttagatatggtcattctttggcattatacaaggataaaatttacatgtatggaggaaaaattgattcaactgggaatgtgaccaatgagttgagagtttttcacattcataatgagtcatgggtgttgttgacccctaaggcaaaggagcagtatgcagtggttgggcactctgcacacattgttacactgaagaatggccgagtggtcatgctggtcatctttggtcactgccctctctatggatatataagcaatgtgcaggaatatgatttggataagaacacatggagtatattacacacccagggtgcccttgtgcaagggggttacggccatagcagtgtttacgaccataggaccagggccctatacgttcatggtggctacaaggctttcagtgccaataagtaccggcttgcagatgatctctaccgatatgatgtggatacccagatgtggaccattcttaaggacagccgatttttccgttacttgcacacagctgtgatagtgagtggaaccatgctggtgtttgggggaaacacacacaatgacacatctatgagccatggcgccaaatgcttctcttcagatttcatggcctatgacattgcctgtgaccgctggtcagtgcttcccagacctgattccaccatgatgtcaacagatttggccattccagcagtcttacacaacagcaccatgtatgtgttcggtggtttcaatagtctcctcctcagcgacatcctggtattcacctcggaacagtgtgatgcgcatcggagtgaagccgcttgtttagcagcaggacctggtattcggtgtgtgtggaacacagggtcgtctcagtgtatctcgtgggcgctggcaactgatgaacaagaagaaaagttaaaatcagaatgtttttccaaaagaactcttgaccatgacagatgtgaccagcacacagattgttacagctgcacagccaacaccaatgactgccactggtgcaatgaccattgtgtccccaggaaccacagctgctcagaaggccagatctccatttttaggtatgagaattgccccaaggataaccctatgtactactgtaacaagaagaccagctgcaggagctgtgccctggaccagaactgccagtgggagccccggaatcaggagtgcattgccctgcccgaaaatatctgtggcattggctggcatttggttggaaactcatgtttgaaaattactactgccaaggagaattatgacaatgctaaattgttctgtaggaaccacaatgcccttttggcttctcttacaacccagaagaaggtagaatttgtccttaagcagctgcgaataatgcagtcatctcagagcatgtccaagctcaccttaaccccatgggtcggccttcggaagatcaatgtgtcctactggtgctgggaagatatgtccccatttacaaatagtttactacagtggatgccgtctgagcccagtgatgctggattctgtggaattttatcagaacccagtactcggggactgaaggctgcaacctgcatcaacccactcaatggtagtgtctgtgaaaggcctgcaaaccacagtgctaagcagtgccggacaccatgtgccttgaggacagcatgtggagattgcaccagcggcagctctgagtgcatgtggtgcagcaacatgaagcagtgtgtggactccaatgcctatgtggcctccttcccttttggccagtgtatggaatggtatacgatgagcacctgcccccctgaaaattgttcaggctactgtacctgtagtcattgcttggagcaaccaggctgtggctggtgtactgatcccagcaatactggcaaagggaaatgcatagagggttcctataaaggaccagtgaagatgccttcgcaagcccctacaggaaatttctatccacagcccctgctcaattccagcatgtgtctagaggacagcagatacaactggtctttcattcactgtccagcttgccaatgcaacggccacagtaaatgcatcaatcagagcatctgtgagaagtgtgagaacctgaccacaggcaagcactgcgagacctgcatatctggcttctacggtgatcccaccaatggagggaaatgtcagccatgcaagtgcaatgggcacgcgtctctgtgcaacaccaacacgggcaagtgcttctgcaccaccaagggcgtcaagggggacgagtgccagctatgtgaggtagaaaatcgataccaaggaaaccctctcagaggaacatgttattatactcttcttattgactatcagttcacctttagtctatcccaggaagatgatcgctattacacagctatcaattttgtggctactcctgacgaacaaaacagggatttggacatgttcatcaatgcctccaagaatttcaacctcaacatcacctgggctgccagtttctcagctggaacccaggctggagaagagatgcctgttgtttcaaaaaccaacattaaggagtacaaagatagtttctctaatgagaagtttgattttcgcaaccacccaaatatcactttctttgtttatgtcagtaatttcacctggcccatcaaaattcaggtgcaaactgaacaatga

SEQ ID NO: 8462 - DNA, 671 bp, Homo sapiens
  SIMILAR (3)..(83): 641254mologous to Homo sapiens dJ741H3.1.1 (attractin (with dipeptidylpeptidase IV activity) isoform 1),accession number AL132773,Smith-Waterman Score=82.
gctctctgtgcaccccaaccgggcaagtgcttctgcacaacaaaggggtcaagtggcacgagtgccagctatgtgaggtagaaatcgataccaagcaaaccctctcagaggaacatgttataatactcttcttattgactatcagttcactttcagtctatcccaggaagatgatcgctattacacagctatcaattttgtggctactcctgacgaacaaaacagggatttggacatgttcatcaatgcctccaagaatttcaacctcaacatcacctgggctgccagtttctcagctggaacccaggctggagaagagatgcctgttgtttcaaaaaccaacattaaggagtacaaagatagtttctctaatgagaagtttgattttcgcaaccacccaaatatcactttctttgtttatgtcagtaatttcacctggcccatcaaaattcaggtgcaaactgaacaatgaggacgcatggacacaggaaggggaacatcacacaccagggcctgttgtggggtggggggaaggggaagggatagcattaggggatatacctaatgttaaatgacgagttaatgggtgcagcacaccaacatggcatatgtatacatatgtaacaaacctgcatgttgtgcacatgtaccctaaaacttaaagtataatt

SEQ ID NO: 8463 - DNA, 8561 bp, Homo sapiens
  SIMILAR (4)..(4287): 921254mologous to Mus musculus attractin,accession number AF119821,Smith-Waterman Score=7300.
atggtggccgcagcggcggcaactgaggcaaggctgaggaggaggacggcggcgacggcagcgctcgcgggcaggagcggcgggccgcactgggactgggacgtgaccagggctgggaggccggggctgggggccgggctgcgcctcccgcggctgctgtctccaccgctgcggccacggctgctgctgctgctgttgttgctcccgccgccgctgttgctgctgctgctgccctgtgaggccgaggccgcggcggcggcggcggcggtgtcgggctcagccgcagccgaggccaaggaatgtgaccggccctgtgtcaacggcggtcgctgcaaccctggcaccggccagtgcgtctgccccgccggctgggtgggcgagcaatgccagcactgcgggggccgcttcagactaactggatcttctgggtttgtgacagatggacctggaaattataaatacaaaacgaagtgcacgtggctcattgaaggacagccaaatagaataatgagacttcgtttcaatcattttgctacagagtgtagttgggaccatttatatgtttatgatggggactcaatttatgcaccgctagttgctgcatttagtggcctcattgttcctgagagagatggcaatgagactgtccctgaggttgttgccacatcaggttatgccttgctgcatttttttagtgatgctgcttataatttgactggatttaatattacttacagttttgatatgtgtccaaataactgctcaggccgaggagagtgtaagatcagtaatagcagcgaaactgttgaatgtgaatgttctgaaaactggaaaggtgaagcatgtgacattcctcactgtacagacaactgtggttttcctcatcgaggcatctgcaattcaagtgatgtcagaggatgctcctgcttctcagactggcagggtcctggatgttcagttcctgtaccagctaaccagtcattttggactcgagaggaatattctaacttaaagctccccagagcatctcataaagctgtggtcaatggaaacattatgtgggttgttggaggatatatgttcaaccactcagattataacatggttctagcgtatgaccttgcttctagggagtggcttccactaaaccgttctgtgaacaatgtggttgttagatatggtcattctttggcattatacaaggataaaatttacatgtatggaggaaaaattgatccaactgggaatgtgaccaatgagttgagagtttttcacattcataatgagtcatgggtgttgttgacccctaaggcaaaggagcagtatgcagtggttgggcactctgcacacattgttacactgaagaatggccgagtggtcatgctggtcatctttggtcactgccctctctatggatatataagcaatgtgcaggaatatgatttggataagaacacatggagtatattacacacccagggtgcccttgtgcaagggggttacggccatagcagtgtttacgaccataggaccagggccctatacgttcatggtggctacaaggctttcagtgccaataagtaccggcttgcagatgatctctaccgatatgatgtggatacccagatgtggaccattcttaaggacagccgatttttccgttacttgcacacagctgtgatagtgagtggaaccatgctggtgtttgggggaaacacacacaatgacacatctatgagccatggcgccaaatgcttctcttcagatttcatggcctatgacattgcctgtgaccgctggtcagtgcttcccagacctgatctccaccatgatgtcaacagatttggccattcagcagtcttacacaacagcaccatgtatgtgttcggtggtttcaatagtctcctcctcagcgacatcctggtattcacctcggaacagtgtgatgcgcatcggagtgaagccgcttgtttagcagcaggacctggtattcggtgtgtgtggaacacagggtcgtctcagtgtatctcgtgggcgctggcaactgatgaacaagaagaaaagttaaaatcagaatgtttttccaaaagaactcttgaccatgacagatgtgaccagcacacagattgttacagctgtacagccaacaccaatgactgccactggtgcaatgaccattgtgtccccaggaaccacagctgctcagaaggccagatctccatttttaggtatgagaattgccccaaggataaccccatgtactactgtaacaagaagaccagctgcaggagctgtgccctggaccagaactgccagtgggagccccggaatcaggagtgcattgccctgcccgaaaatatctgtggcattggctggcatttggttggaaactcatgtttgaaaattactactgccaaggagaattatgacaatgctaaattgttctgtaggaaccacaatgcccttttggcttctcttacaacccagaagaaggtagaatttgtccttaagcagctgcgaataatgcagtcatctcagagcatgtccaagctcaccttaaccccatgggtcggccttcggaagatcaatgtgtcctactggtgctgggaagatatgtccccatttacaaatagtttactacagtggatgccgtctgagcccagtgatgctggattctgtggaattttatcagaacccagtactcggggactgaaggctgcaacctgcatcaacccactcaatggtagtgtctgtgaaaggcctgcaaaccacagtgctaagcagtgccggacaccatgtgccttgaggacagcatgtggagattgcaccagcggcagctctgagtgcatgtggtgcagcaacatgaagcagtgtgtggactccaatgcctatgtggcctccttcccttttggccagtgtatggaatggtatacgatgagcacctgcccccctgaaaattgttcaggctactgtacctgtagtcattgcttggagcaaccaggctgtggctggtgtactgatcccagcaatactggcaaagggaaatgcatagagggttcctataaaggaccagtgaagatgccttcgcaagcccctacaggaaatttctatccacagcccctgctcaattccagcatgtgtctagaggacagcagatacaactggtctttcattcactgtccagcttgccaatgcaacggccacagtaaatgcatcaatcagagcatctgtgagaagtgtgagaacctgaccacaggcaagcactgcgagacctgcatatctggcttctacggtgatcccaccaatggagggaaatgtcagccatgcaagtgcaatgggcacgcgtctctgtgcaacaccaacacgggcaagtgcttctgcaccaccaagggcgtcaagggggacgagtgccagctatgtgaggtagaaaatcgataccaaggaaaccctctcagaggaacatgttattatactcttcttattgactatcagttcacctttagtctatcccaggaagatgatcgctattacacagctatcaattttgtggctactcctgacgaacaaaacagggatttggacatgttcatcaatgcctccaagaatttcaacctcaacatcacctgggctgccagtttctcagctggaacccaggctggagaagagatgcctgttgtttcaaaaaccaacattaaggagtacaaagatagtttctctaatgagaagtttgattttcgcaaccacccaaatatcactttctttgtttatgtcagtaatttcacctggcccatcaaaattcagattgccttctctcagcacagcaattttatggacctggtacagttcttcgtgactttcttcagttgtttcctctctttgctcctggtggctgctgtggtttggaagatcaaacaaagttgttgggcctccagacgtagagagcaacttcttcgagagatgcaacagatggccagccgtccctttgcctctgtaaatgtcgccttggaaacagatgaggagcctcctgatcttattggggggagtataaagactgttcccaaacccattgcactggagccgtgttttggcaacaaagccgctgtcctctctgtgtttgtgaggctccctcgaggcctgggtggcatccctcctcctgggcagtcaggtcttgctgtggccagcgccctggtggacatttctcagcagatgccgatagtgtacaaggagaagtcaggagccgtgagaaaccggaagcagcagccccctgcacagcctgggacctgcatctgatgctggggccagggactctcccacgcacgagctagtgagtggcacaccagagccatctgcagggaagggcgtggcggggaaatggctgtgcggtgcgggacggaagactggaaaccctcaaagcatctgactcacctgcatgatcacaagctttctttgacggtttctcccatccgtgttccagcatctaaccttttacttttgcataggaaatacttgatttaattacaggtccagggatgagctgatggttgctggaggaggccagtgtagagccagtgagagaactaggaatgacactcaggttcactgtggaaaactgttcttgggactgtctcaactgtgcaaaaaacaaaagatggagtgtttacaagtagacattcgtcatcagttgttcttgaacatggtcttttaaaaactagtcagatgaattaacttgttttcatctgaagcctgctatcttttttaaaagatgtgctatttattcttgcacgatttaggcaattatctctcttccagggagtacctttttttctagttgagaattaataatggtccatctcttttgatcatatcaagctaggatagaaggggggctattttaaatgtcaaggtcagcagtgttactttgaatgtaaactggtataataggtagttttctatagtaacttgattaatttagtcttaatccatttgaaactctctcttcctttctctctgcctgtccctctccttctccatctcaccctccctctctcacacatacacacacaaacacatacacacaacactaagtgcctagactttaaatagatctagcaattggaaagttagtaagcctaagtttttacataattgcattcctacattcttgtaaaatttaaatagctaccattggcaatctgctttttttctaaaatctgatttgcagccaggaaagaattttctcacccaaggaacatttgatctagcagcagggatgagaggaaagcagaaatgaatgaactgtgaaagctcctgtttttattatcaaaaaggacactgtcaagaaggcgccccctgcccccacccccgtgtcaccctaggcctgataagcgatcagaggaaaggactcattcatgtcacgcttccttgagcagaaaagagcactgagagcacttgggacccctggatcagagagcatctgtgtgtcctgcagcctcctctgaacttgtggttcattctcaggctggggtggactcagatgccaggaaagggacagcctcccattgtcaggcagaagctgcccaaagcctggagaaggacttgtttgccctctttcccccaggaggggctcgacccacccaccctccctctcagaccaaggtggtggctgtgaggagggcagcaaatgctgacaaggatgaaaagcacatggaaaaaaatggacgaggagggaaaactctgccaaatggaaaatgaccaaatttaagagggtgggacagtcccctgctcctctcccagagggcactgcttggaaattgtgttttccccatttatggtgctctgtattctggcattatgcagcagcctcccagaagctctcttctgcttcaaaacctgggatctctggcattaccctattgggatggaccgctggacagcaatgctcgagtttgtgaatttggagagatactcaaaagagctaaaactgcagcattttacctttaaatgcagtgcctagagagagagtattgtctcttccccaacactaaccccactcccatgaagaattgcctggaaagatgttttcaaggaatttgaaccataaaacactatctgatgcacagaacacctctactttgagactcacctctcataaagcttctttttcacattactgttaaagaccagacgttctagaaaagacccctcctctcatgagctcccccatccctgctacagaacacagcacccatggcgcctgcagtggactggccccttaattcccacaggcccccccagcaaggccaaagggaggcccctgggtattgtcctcctacaaggaagatcctctttgtttgttcaaaggaccagttttcctaggccaaagaagtctcttccccatgttagtcctatgccttgaaatatcatgcaccatgacccacagccatctggttatgtcttatttttttcctaaaagataatgtttatttttaaaaaggaaggaagaagcaagtgaagtttcattctgctccagcggtggggaagccgctgaatccacctgcttctcctttgcaaccgacagcaaacagctttctccggcctcagggcagaaaaagggaatggcagggagtaagaggcgctgggctcggagcctgtttccaagaaggaattggttgtcatctggcagtgttgcgcgtcacaagagagcctgtatataaattaaaatagtcaagacaacactgaccttgcacttgtacataactatacagtagtgtccagaatgttcagacattcggagtgtacataaaacagaaaaaatcttcatgtatttttattaaatataacaatgtctgagtttcacctaagatgtttttgtgccatatgctggatatccaggttctcgccaggccccgatacatgaataacaaacccaagaaacgcatccccattgtgtgatgtgttcagatgcatctggcaccaattaggtatttcttaaaacaggactcatctgtcagagtgcacatgaaaaatcaggcagggaatcgaaacgacagcgctggaggagactcaggaagcagaggcgtccctgccgctgcccttggccctgcaagcacatcatgaccctttctggcagcctcttggtgctctgggtagtgagggatgaccagtcttgtcctgagaaatgtttctcttagtctttaagttcaaagactaacctgtagcaatcagactttccaaaagggggttctccattttttgtagttttgtctaaatttttaatgaccatttcctggaatcagtttattatactgaaaactgggggtgggagtagggagctagtttgttgataaatagttcccatttccccgtggagaatttgacataccctggactcctgtgtgcctcctgccatccctgcacacagcctggggagaagcctgtgcctccccgtgtggagagaaggcaaccccagatcccctgagctaacccggaggaaaggcagtcctggacagaagactgtcagcagaaggaaagtactggactacccgtgggtaagtcctgccattcaagactggagacacctgggaaataaaaagagcagggcactgctggtgggaagaggcattttaccttccagtgcaaatcctgctcctttgatttaatggggtgtactggggccaggggctgattcacttccttgggagatggtggtgttttcatgaacatctttgatccttccatttcatttattcatccatccattcaacaagtatttgctaaacactaacttaagctaatgctagggtagtgactgagatgtaaaaatagattttagaattaaaacaaaatccaagtcctcacacccctgtcatcccaggagatctttccttgtggtggtttctgtgagaattggccatcctgaggacacagccaggacggcagaggcctcctggcctcagggcatgccctgcctaccttctgaaatgtttaccccattgaccaaacttggctccagccattgcggtggtttctagatagccaggcccaccaagagatattgccccttgatgagagtcaaacaccctgcctacaaggagatgttttgaaatggagaggaaaattggcacctcatcttttaaaggcagtaatggaattgattttcagtaactgaatttgtgcacaaaacattctaaacactagtgaagcctgtttcgttgaactaattctggctctggaaatgtttttgttttatagttatttacgatttcgtttgtttggattcaagcttagtttgttaatatgtataatttagcatctattacactcatgtaaatatggagtaagtattgtaaactatttcattgcggggattgtgggtgttatacatacatttaggactgcaattttttggtattttttgtattgtaaaataacagctaatttaagcaggaacaagagaactaagggaggtctgtgcattttaaacacaaatgtgaagaacttgtatataaacaaaagtaaatactataatacaaacttccttctgaaataaaagtagatctggt

SEQ ID NO: 8464 - DNA, 3490 bp, Homo sapiens
  SIMILAR (22)..(1848): 861254mologous to Homo sapiens Attractin; DPPT-L,accession number AF034957,Smith-Waterman Score=2787.
atggattatggagtcttaactagactaactggatcttctgggtttgtgacagatggacctggaaattataaatacaaaacgaagtgcacgtggctcattgaaggacagccaaatagaataatgagacttcgtttcaatcattttgctacagagtgtagttgggaccatttatatgtttatgatggggactcaatttatgcaccgctagttgctgcatttagtggcctcattgttcctgagagagatggcaatgagactgtccctgaggttgttgccacatcaggttatgccttgctgcatttttttagtgatgctgcttataatttgactggatttaatattacttacagttttgatatgtgtccaaataactgctcaggccgaggagagtgtaagatcagtaatagcagcgatactgttgaatgtgaatgttctgaaaactggaaaggtgaagcatgtgacattcctcactgtacagacaactgtggttttcctcatcgaggcatctgcaattcaagtgatgtcagaggatgctcctgcttctcagactggcagggtcctggatgttcagttcctgtaccagctaaccagtcattttgggactcgagaggaatattctaactttaaagctcccccagagcatctcataaagctgtggtcaatggaaacattatgtgggttgttggaggatatatgttcaaccactcagattataacatggttctagcgtatgaccttgcttctagggagtggcttccactaaaccgttctgtgaacaatgtggttgttagatatggtcattctttggcattatacaaggataaaatttacatgtatggaggaaaaattgattcaactgggaatgtgaccaatgagttgagagtttttcacattcataatgagtcatgggtgttgttgacccctaaggcaaaggagcagtatgcagtggttgggcactctgcacacattgttacactgaagaatggccgagtggtcatgctggtcatctttggtcactgccctctctatggatatataagcaatgtgcaggaatatgatttggataagaacacatggagtatattacacacccagggtgcccttgtgcaagggggttacggccatagcagtgtttacgaccataggaccagggccctatacgttcatggtggctacaaggctttcagtgccaataagtaccggcttgcagatgatctctaccgatatgatgtggatacccagatgtggaccattcttaaggacagccgatttttccgttacttgcacacagctgtgatagtgagtggaaccatgctggtgtttggaggaaacacacacaatgacacatctatgagccatggcgccaaatgcttctcttcagatttcatggcctatgacattgcctgtgaccgctggtcagtgcttcccagacctgatctccaccatgatgtcaacagatttggccattcagcagtcttacacaacagcaccatgtatgtgttcggtggtttcaatagtctcctcctcagcgacatcctggtattcacctcggaacagtgtgatgcgcatcggagtgaagccgcttgtttagcagcaggacctggtattcggtgtctcttgaccatgacagatgtgaccagcacacagattgttacagctgcacagccaacaccaatgactgccactggtgcaatgaccattgtgtccccaggaaccacagctgctcagaaggccaggtatgagaattgccccaaggataaccccatgtactactgtaacaagaagaccagctgcaggagctgtgccctggaccagaactgccagtgggagccccggaatcaggagtgcattgccctgcccgaaaatatctgtggcattggctggcatttggttggaaactcatgtttgaaaattactactgccaaggagaattatgacaatgctaaattgttctgtaggaaccacaatgcccttttggcttctcttacaacccagaagaaggtaggaatttgtccttaaggcaggctgcgaataatgcaggtcatctcagaggcatgtccaaggctcaccttaaccccatggggtcgggccttcgggaagatcaattgtgtcctactggtgctgggaagatatgtccccatttacaaatagtttactacagtggatgccgtctgagcccagtgatgctggattctgtgggaattttattcaggaacccagttacttcggggactgaaggctgcaacctgcattcaacccacttcaatggtagtgtctgtgaaaaggcctggcaaaccacagtggttaagcagtgccggacaccatggtgccctttgagggacagcatgtggagattgcaccagcggcagctctgagtggcatgtggtgcagcaacatgaaggcagtgtgtggactccaatgcctatgtggcctccttcccttttgggccagtgtatggaatggtatacgatgaggcacctgcccccctgaaaattgttcaggctactgtacctgtagtcattgcttggagcaaccagggctgtggctggtgtactgatcccagcaatactggcaaagggaaatgcatagagggttcctataaaggaccagtgaagatgccttcgcaagcccctacaggaaatttctatccacagcccctgctcaattccagcatgtgtctagaggacagcagatacaactgggtctttcatttcactgtccagtttgccaatggaacgggccacagtaaatgcatcaatcagagcatctgtgagaagtgtgagaacctgaccacaggcaagcactgcgagacctgcatatctggcttctacgggtgatcccaccaattggagggaaatgtcagccatgcaagtgcaatgggcacgcgtctctgtgcaacaccaacacgggcaagtgcttctgcaccaccaagggcgtcaagggggacgagtgccagctatgtgaggtagaaaatcgataccaaggaaaccctctcagaggaacatgttattatactcttcttattgactatcagttcacctttagtctatcccaggaagatgatcgctattacacagctatcaattttgtggctactcctgacgaacaaaacagggatttggacatgttcatcaatgcctccaagaatttcaacctcaacatcacctgggctgccagtttctcagctggaacccaggctggagaagagatgcctgttgtttcaaaaaccaacattaaggagtacaaagatagtttctctaatgagaagtttgattttcgcaaccacccaaatatcactttctttgtttatgtcagtaatttcacctggcccatcaaaattcaggtgaatgtggaggttagggataggtgggctttcaaggactggttcacctttaaccatggaagcatggtcactggacggaggctgttgctgtttgccaatgttcagaagcataatcaacctcagaagcaagtcaccacaaacatatga

SEQ ID NO: 8465 - DNA, 6678 bp, Homo sapiens
  SIMILAR (303)..(707): 651254mologous to Homo sapiens Human secreted protein, SEQ ID NO: 6135,accession number G02054,Smith-Waterman Score=477.
  misc_feature (1)...(6678): n = a,t,c or g
tcagagggcctgggaacggagcatcctgggaaagatagttcccagacgggcttcccgcgctgcttcccggcgccttcggcggcgagaggactccatttcccgacgtgccccgggaccgggaggcggagggccgccgtggcgtcgggccccgggccgagccgggggtgggggctcgaggcgcctccgcggccgtggacgagcgtccgtgcggcctggtccgggccatgtccgcgtgagtgttcttttcgctgtcgccgctcccgctccggccctggcccctctgcccggcagcgcggcgcaccatgggctccattctcagccgccgcatcgcgggggtggaggacatcgacatccaggcgaactcggcctatcgctaccctccgaagtccggaaactactttgcttcgcactttttcatgggaggagagaaattcgacaccccccaccctgaaggtcacctctttggagagaacatggatctgaacttcctgggcagccgcccgagccagtttccctacgtcactcctgccccccacgagcccgtgaagacgctgcggagcctggtgaacatccgcaaagactccctgcggctggtgaggtacaaagacgatgccgacagccccaccgaggacggcgacaagccccgggtgctctacagcctggagttcaccttcgacgccgatgcccgcgtggccatcaccatctactgccaggcatcggaggagttcctgaacggcagggcagtatacagccccaagagcccctcgctacagtccgagaccgtccactacaagagaggggtgagccagcaggtctccctgccctccttcaagattgacttctcggaatggaaggatgacgagctgaactttgacctggaccggggcgtgtttccagtagtcatccaggctgtggtggacgaaggagatcagtggtggaagtgactggccacgcccacgtgctcttggctggctttgaaaagcacatggacggcagcttctctgtgaagcctttaaagcagaagcaaattgtggaccgggtcagctacctcctgcaggagatctatggcattgagaacaagaacaaccaggagaccaagcccttcggacgacgagaacagcgacaacagcaacgagtgtgtggtgtgcctgtccgacctgcgggacacgttgattcctgccctgccgccacctgtgcctctgtacctcctgcgccgacacgctgcgctaccaggccaacaactgccccatctgccggctgcctttccgggccctcctgcagatccgggcggtgcggaagaagccaggagccctgtcccccgtgtccttcagccccgtcctggcccagagcctggagcatgatgagcactcttgtccctttaaaaaatcaaagccgcaccccgcctccctggccagcaagaaacctaaaagggaaacaaactctgacagcgtcccacctggctacgagcccatctcgctgctcgaggcgctcaacggcctccgggctgtctccccggccatcccctcggcccctctttatgaagaaatcacctattcaggcatctcggacggcctgtcccaggccagctgtcccctcgcggctatcgaccacatcctggacagcagccgccagaagggcaggccgcagagcaaggcccccgacagcaccctacggtccccgtcttcccccatccacgaagaggatgaggagaagctctccgaggacgtggacgcccctcccccactgggtggcgcagagctggccctgcgggaaagcagctcccctgagagtttcataacagaagaggttgatgagtcgtctgtcaccacaagcaaggggacccgagcagcttccattgagaatgtcctgcaggacagcagccccgagcactgtggccgaggcccacctgctgacatctacctgccagccctggggcccgactcctgctctgttggtatagacgagtaagccggtacgtgaccttccagacgcgcttcgggggctctgacgcgcgtccttggagagaggagccctcccctgctctctggcgggggttccttctggtttttgggtcttcgtccgcatccgcatcttcccaggggccctggattccgaatccagagctctccagtggctgctgcaccttcccccagaaagtggcctcctggggggtcctgactttcggggccagaggtctctccatctggactaggcggccggtcaggctcttcttccagccttgaggggccctggaacagtcccagcccaggcagggagacagacacagcccaggtgcgccagagccactgtccactgcgggaggcaggagcttgagggatgagggcagcaccgtggagggaaccccagggagacatggggtgagcgtcccaaggggagaggcctgggcctggccttgttccggatggtcccaccatgagttcgcatcggtcctgcagcagacacgttaggacgctcagcaggtccactcccgtgttccggtcatggctttaacaattcatggggaaagaatgcgccccgattgggagagcccctggatcacgtcttcccaagctcagtccctgtctcttggagggagtccgtcctcgaggggccctctggtgcccaggggagagtatcttgcgtcctgtcctgagggcgtccgctcacacagccacctgctcccccgctccctccttcccttgtcagcatggccaccgtgggcctggcatcaccatgggcctggcacacagtccctcgtgggctgcctttgtgccatgagcccactgctgccgactcacctgtccctcccagtactggaaccttctggaacaccagcactaaaagataggaggccctgtgaggttggcatcccccatccccccccaagaggtgccctctaccagggtggcccaggtgagtgttttacagaaggcggctctgtccaggcagtggttcgcacctataagcccggtactttgggagaccgaggggatagatcacttgagcccaggaattcaagatcagtgtagaaaacatagaccccctctctataaaaaataaaaaattggcttgggcgtggtagcttgtgcctgtggtcccagctactcaggggtgctgaggtgggaggattgccggagctggggaggtcaaggcccactccagcctgagacgctgtctcaataaaaaaaaatacacacacacccacccacccactccagcctgagaccctgtctcaagaaaaaaaaaaatacacacacacacacacacacacacacacacacacacacacacacacacacacgggggagagagagaaggcagctccaggagtgccaccaaaatgtaggcagacggattggggaccctctgccttcccagagggtcttggcacacaagctgcgtgcagctctggtctgccgaggcccatgcagcctgctgggaggtgcctggccgggggtgcaggctctaagaggccctttccccttgggtggacttgagccgggtcagggagaacttcgcttcttttgactgcgctctgcattcccatgaacctctgtcttcttgagcccagcgagtccctctgttgacccctgtcctgagccattatacccctagattgaaacagtcagcacctttcagacggccccggcctgcgcatcggtggaaggtgccatgcgaatgtcacgattcaggtcaagcttccggagctggggagtgcaggtgtgatctagaacagggctcacagcctcggaaacctgctctcgccgcggcccccgaagaaaatagacgcccttcaccggagagtggggcctgggccgtgtctgctgggagccatgtgtcagggctggtggctgggtgtcaggcagccctgaggccatgctggccccgtcccaggctctgcaccagcaccattgcccaagccccagggacgccagacccatccggggacagcgcccggcggcgtcgtgcaggccacagtctgggcattggggctctgtgggaggctcctctctttgccttgcagtagccatccgggggctactctgagcacgggcttgttctcacccagggccgctcccgacccctgcaccctgggttgaccgagttccaccctaacccagccgtaagaaccttggcaggacagtggctggccacatcccaggaaaccggaaccagggcaagggcaggaggcccagagggcatccactgcggtgccgtgtcgcgctctgactcggggctgcagatctgctgtgggtgtccggggatctgggatcgtctgtcccaagagggacacagcgtatttggcacagttagggagtccccgggcccttggtgtgctcacatctgagtgaatgctgttgtggccacaggcggcgggagtgggggtgctggatggcccagcccctctggggctccagatcggtaggagcgggtggcgtggcaccaggcatccgagtgtgaccctcctccctctgctcccacctgcaggacggcccacctccatggagacggcccacggcctcgccaccaccagccccacctggcctccacttggtggccccagccccgatcccagcgccgccgagctgaccccactctgagagcctggccgagctggcagcatggagccctcggctccccagactttgccgaggggctgctccggaccccgttgtgagccggcctcctgtctgcatgccccctgtggccaccaggctccgaggggccgtggtgactcttgatcaaagagcacagtgaactgtcccttctgagtctcccttttctacagttgatatatttgtaactggtacaagatgaaggacagcagctttccatccctagttcagagcccccgttccccagggtcctgtgggctgagcggctggggctggggctgcccacgtgtggcctccgctggctctgcctgctcctgcaacagtgcggtccctgcccggagaactcaggaggcctgcagaagagaactgattggtggtcgaagcaccatcttcacagatgttcaggggcagtggggggctccaggcacggtcaatgaaggaaacagtgcctgtccacccaccctgcgtgtcactgtggcggcctggctgtcgctgctttttgtcctctgccgtgtttgcgcggcctcagtgccctccctggtgcgtctgcgctggggccctcagtgctcggggccttggggtgcatgggcgccgccctgggcagctagagtgtctcagcccggtgctgggcctggccgaggggcggaggcacagctgcttccagcagccagcattcagtggccttgtcaccaagctccacacctcctcctggtgctggctttggtgacatcacaaggcccctccaggtgcaggggcttctgtttggcaggcccctgccagggaggacctggtggcctcctcattctcttttgccattggaatgtccccttgcagttctcttctctttttttttttttttgagatggagtttcactcttgctgcccaggctggagtgcagtggctcaatctcgggtcactgcaacctccgcctcccgggttcaagtgatcgtcctgccttaggctcctgagtagctggggattacaggtgcctaccagcatgctcggctaatttttttgtatttttagtagagaagggatttcaccatgttggccgggctggtctcaaactcctaaggtcatccacctgcctcggcctcccagagtgctgagattacaggcgtgagcctccgcgcccggcccccttgcagttctctctgatttggtttgttctgtctcaggcttctgtggcaggactggcccagggaggaggaagccagcagcacacctggggaatggggtcccggccgggaggcttggcctctgggcgacctcgtcctgttttgtttgtttgtttgtttgttttttttataggtaaacctcctggggccgcagatggcaaagggagtgcctgggccgtggtgacccagggcatggatccacccctgcggagccctgggccaggcaaggtgtctgctgctcacctggctctggagggctgccctgcagtgggggcctggggacaggtcggctgtggggcagctcagtaccctccctgaggctcacggtggctccgagcatgagctctgcctcctgggcgagacccagcagtggacagcacggtcctcacacccaagctccctgcacacccaggccagccacccctcccgctcgtgcacagggcacgcaagantgcgcttcacacgtacacacacacaaatgcacgcccacttgcacatgctcacgcacacgttcacacatgcacactcacgctcacacatgctgtcacgcatacacacacgcacatactcctgcacatgttcccatgcatgtgtgtgcactcggaccgagcatctcccacgcacctctaccccaccccaagcacctctctccccccatgcacctctccccaacaaacacacacagccccttgcaccgcccgccccccgcccccaccaaggccccagcctctggccatcagtcctggtgccagagctttgcgtgaagttcgggccgcagagtggcccgctgggactcccatgtgctgccgtctgatgtgctcagatgggctcatcgttggttcgtttttactgtatatttatagtaataaaatcatgcagcaat

SEQ ID NO: 8466 - DNA, 2871 bp, Homo sapiens; identical to SEQ ID NO: 7760
  SIMILAR (2293)..(2868): 991254mologous to Cloning vector pBACe3.6 levansucrase,accession number U80929,Smith-Waterman Score=986.

SEQ ID NO: 8467 - DNA, 409 bp, Homo sapiens; identical to SEQ ID NO: 7762
  SIMILAR (383)..(3): 891254mologous to Homo sapiens signal recognition particle subunit 14,accession number X73459,Smith-Waterman Score=570.
  misc_feature (1)...(409): n = a,t,c or g

SEQ ID NO: 8468 - DNA, 539 bp, Homo sapiens; identical to SEQ ID NO: 7763
  SIMILAR (50)..(457): 921254mologous to Homo sapiens signal recognition particle subunit 14,accession number X73459,Smith-Waterman Score=625.
  misc_feature (1)...(539): n = a,t,c or g

SEQ ID NO: 8469 - DNA, 2187 bp, Homo sapiens; identical to SEQ ID NO: 1148
  SIMILAR (1501)..(2184): 991254mologous to Escherichia coli ATH1 protein,accession number D90769,Smith-Waterman Score=1180.

SEQ ID NO: 8470 - DNA, 445 bp, Homo sapiens; identical to SEQ ID NO: 7765
  SIMILAR (20)..(193): 601254mologous to Homo sapiens signal recognition particle subunit 14,accession number X73459,Smith-Waterman Score=154.

SEQ ID NO: 8471 - DNA, 2655 bp, Homo sapiens; identical to SEQ ID NO: 7766
  SIMILAR (511)..(1323): 901254mologous to Escherichia coli ATH1 protein,accession number D90769,Smith-Waterman Score=1283.

SEQ ID NO: 8472 - DNA, 837 bp, Homo sapiens; identical to SEQ ID NO: 7767
  SIMILAR (223)..(618): 1001254mologous to Filamentous phage cloning vector fd-tet adsorption protein pIII precursor,accession number AF217317,Smith- Waterman Score=695.

SEQ ID NO: 8473 - DNA, 882 bp, Homo sapiens
  SIMILAR (13)..(699): 941254mologous to Escherichia coli ATH1 protein,accession number D90769,Smith-Waterman Score=1145.
atgggtatcagttcgggtaacaccatcgcaagcggtcgctttgtttcggcagaccacctgccgctcattgcgctggaaatcactattacgccactggactccgacgcgtcagtgatgatttcaacaggcattgacgccacgcaaaccaatcacggtcgccaacatctcgacgaaacccaggtgcgggtgtttggtcagcatctgatgcaggggagctactccacccaggatggacgcagtgatgtggccatcagctgttgctgtaaggtgagcggtgatgtgcagcaatgctataccgccaaagagcgccgtttattgcaacataccagtgcgcagcttcatgcaggcgagacaatgacgttgcaaaaactggtgtggatcgactggcgggatgacaggcaagctgctttagacgagtggggcagcgcgtcgcttcgccagcttgaaatgtgcgcgcagcagagttacgaccaacttcttgcagcatcaacagaaaactggcgtcaatggtggcagaaacgtcgtatcacggtaaatggcggcgaagcgcacgatcagcaagcgttagattatgcgctttatcatctgcgcatcatgacgcctgcccacgacgagcgcagcagcattgcggcaaaaggcttaaccggcgaaggctacaaaggccacgatcactgggatacagaatttatctttggtccggcagctgttgaaggcggcattcagatgtactgggcgcagcatctgcaagagttcagttggagcgccgagccgctgaaatcgttgttcccggaaggcggttttgccctgcacggtaactcaaaaatctttggtgccgtgggcatttctttagcgatgtacttcactgccgcaccggaaaatcgg

SEQ ID NO: 8474 - DNA, 1047 bp, Homo sapiens; identical to SEQ ID NO: 7768
  SIMILAR (265)..(918): 881254mologous to Filamentous phage cloning vector fd-tet adsorption protein pIII precursor,accession number AF217317,Smith- Waterman Score=1002.

SEQ ID NO: 8475 - DNA, 2285 bp, Homo sapiens; identical to SEQ ID NO: 7769
  SIMILAR (253)..(993): 891254mologous to Filamentous phage cloning vector fd-tet adsorption protein pIII precursor,accession number AF217317,Smith- Waterman Score=1174.
  misc_feature (1)...(2285): n = a,t,c or g

SEQ ID NO: 8476 - DNA, 855 bp, Homo sapiens
  SIMILAR (791)..(426): 381254mologous to Homo sapiens signal recognition particle subunit 14,accession number X73459,Smith-Waterman Score=109.
ttttttttttttttttgataaacagacatgtttaatgatagcttgctcttcacagagatgtctacagagacttttaatctataatccaggagtatataaccatgcagcacagaccaattagccaaatgcaaaataaactagattcttaccacaactatcctataaacactgcaactattctttccaaaaggaccctaatcttatgtgaaaaacacctactgtgggggaaccagaaacctagctatctggccaaaaaggaaaaaatagcaattcagtggttaaattggtgaaagcaggaaatgtatgcccctttaactgtgctgcttgtttgctggctggttggttggctggctggttggttggctggcttgtttggcttgcttgcgggcaaggtgcttgcttgcttgctgctgcctgttgttgactgctgttgctgcctgcctttgggtccttccttaattttgttctttttgtctctccttccttcaaaccccatcccatgttagcttcttaaggaggtttgaaataagccattctgaaaacttattcacattccttggaagctcaccacagtgctgatcttcttcttcccatcgggtagctcttaacagacacttgttgtccttgcgggctcaaagccatccaaaagtaccttttctttggaatgggtttggttcggaccgtcatacttcttacaaggtgatataggacgctggcccgacgtccgggcacttctggaaaaagtctggtcagctcccgtcaggaactgctcggctctccaacaacaccaactcgcggcgacgctggctcgactccctcggcttaagcccctagcagtgagagccggagtcgacc

SEQ ID NO: 8477 - DNA, 1278 bp, Homo sapiens
  SIMILAR (1270)..(398): 301254mologous to Streptomyces coelicolor A3(2) putative translation initiation factor IF-2(fragment),accession number AL355913,Smith-Waterman Score=166.
ctaggaaagagataggatgatttgaactagagtggtactggtaagaggtggtcgtattttgaaaatatctttgaagtaaaattcttccttccagctcaacagagcaaatccacctactgctctgcaaactttggggaagggtcctcttgggtctacaggattccgccgcttttccttgtattcctgcaaaacgatgacatgctcctctccaggtacctgaaccttaggactcaaagggtagagaaagttcacaggcagaatcttcacaatacatgcacaaaagaaaggcacttctagtaggagctgtgtctccatgttcctagtcctcacggccacctggcaagggtgaggaactgagactgggttgaggacacacagcctgtgagtggtacagccagggccgccacccaggcccagagctctctccgtttctctaaggaccaggctgaaacgcagggcatgtgatctcaatgcccgccgcccgacccatggagccctgcttggggactgggggcctcgatgttctccttcaccatctgcggccagatctccctccagcagccttgccaggcagtgcctggcctggagaaggggccctgccccttccggggcaggtctccgggaggggcaggtccgcggcgtgccttcaacccggcgcctggccagggcgcggggctgccccggtccgccgccgtcctcgccccgcagccgccggctccgtccgggaggctgagctccttgagagcccgcacttagcggcacaccgcgactgctaattagcccggaagctgaatagcggcgggtacataccgcaagcggagtacggaaagcacgcagggctgccgctacctggcgcacgcgcactgagctgcggctgccgagcccgtgccccggtccctgccgctttacctcacccgctcttggatcaccaggacccgggtccagccgggaggatctacgggaccggggctggaacccagacgttggacggctcagcgccccgaacgtcccgggccctggggagcacacagatgcccgaagcacgtcccggccttgctggctggggagttgcaggggtctggtctcgcgggtaaagccggtgaacgcgaggctccgcatcctgccccggccgcggcgctgcgccctgctcgctctgcccggtgcagctgtaagcggggaccttagagctaggaaccctcggggatcgcggcctccgaaagccccatcgggcaggggaggccccctgctgcctccccaccgcagcacccctaggcgcat

SEQ ID NO: 8478 - DNA, 2495 bp, Homo sapiens
  SIMILAR (567)..(1919): 221254mologous to Drosophila melanogaster Nopp140-like nucleolar protein,accession number AF162774,Smith-Waterman Score= 182.
ggtatcagaggcagtccagttctcctgaggatccagcagaaactgcatcaccaacctatgccttgatagcggcctgccaatcagagattcagctgcagaccaggcagcagccatgtgatatggctccaggcccacttgactgtgatccagtcaagggatccagcaggaaaagaatgtttctcatgaatgctcctccagtggttgctctccagcccaaatgggaggcctctgtcccgccagggagctttaggttccccgagtgcttctcggaggctgacaagggcgtggagagcatgtcgcccaccatgcacaaggagctgcctgcgttggctgcctgtggtcttgttgctgactttgaccccgtgggggaggaggaaactgcagactttggcccattggtgctagattcagacagtgacgattccgtggaccgggacattgaggaggccatccaggagtacctgaaggcggaggcagtagatgtaagcgggaactggctcacagcagtgcccaactgccctgtgttccccaaaacttgtacctggctcaggtggtgtggccctggcagccaggtgggatccagcaaggaccagggctctgcctccccagtcagcatgagcagagcagactcctttgagcagagcatcagggcagaaatagaacagtttctgaatgagaaaagacagcatgagacccaaaaatgtgatgggtcagtggagaagaaaccagacacacatgaaaattcggcgaagtcactctcgaaatcccaccaagagccggctacaaaggtggtgcaccggcagggcctgatgggcgtccagaaggagttcgccttctgcagacctcccccggttagcaaagacaaacgtgcagcccagaagcctcaggtccaaggtcacgaccacgaccacgcaggagaaggagggcagcacaaagccagcaacccccaccgcccttcagaagcagtacagaataaaagtgggattaaaaggagtgccagcaccgcaaggaggggaaagcgagtcacgagcgccgtacaggcgcccgaggcgtccgactccagcagcgacgacggcattgaggaggccatccagctgtaccaggtgcagaaaacacgcaaggaggccgacggggacccgccccagagggtccagctccaagaggaaagagcacctgcccctcccgcacacagcacaagcagcgccacaaaaagtgccttgccagagacccacaggaaaacacccagcaagaagaagccagtgcccaccaagaccacggaccctggtccaggggatctggacgctgaccattcccccaagatcccaaaggaaaccaaagctccacctccaacgagcccggcttccaggagcaagtttgtggaatggtcctcttgccaggcagacacctccgctgagctgataagcagtcctggacattttcaagacgatcctgccggccctatggagggcagcgatgggtccctgtccgcaagcccactcttctactcccccaacgtgccttcccgctctgatggtgacagtagctccgtggacagcgacgacagcattgagcaggaaatctggacgtttttggccctcaaggtgcagtctagaagtttgctggccagaggagcagctgggcaggctcctgagagagtggaaaaacaggcacctgcaggtgctgaagagctgcctaagtccaagagagacagctgcgagggctccaggaagaaaccccccagtgtctttggcagcagggccgagaggacgaagccccggccttcctgcagttcagtggacagcgacgatagcatcgaactggagattaggaagtttttggtggaaaaggccaaggagtcgggagtcccaggccaggcccagccctgtctttggaagcccacacttgctggcgaagaaggactgcggtcaccggccaagcaggaaggattaacctcagcgattgttgctggcatcagtgcagccctgggaccagagcacacctgggtgcctggtgctacgactcccaggaccccaagtgtggccccagtccttgttccagcagtccccacccactggaagaagctggcccctgcctgtgggggcccaggccagtccctcatcgacattgactttcacagggtccggcggaactctaccctagggcccttcatcttccgaggctatgactcagcacctccaggcccttggaccctggagaatgacagccacacagagactcccccactcagaacccctcgcacttggagcccctcccaggagcaggactgcagcaacaccaacttctgcgccatagtgtcgggcttgaggaaggtgcctgagccagggctctcagtgaatctgaggtccaccttcctgctggcgtcgatgcggcccaacacctcgagctactgtcgcttcgctgggtcactgaccccgcctgactgcgagcccacggtgctctggaccgtcttcgaggaccccatacccatccgatga

SEQ ID NO: 8479 - DNA, 2466 bp, Homo sapiens
  SIMILAR (1588)..(1704): 841254mologous to Homo sapiens Human breast cancer related protein BCRB1,accession number W48350,Smith-Waterman Score=169.
atgcacaaggagctgcctgcgttggctgcctgtggtcttgttgctgactttgaccccgtgggggaggaggaaactgcagactttggcccattggtgctagattcagacagtgacgattccgtggaccgggacattgaggaggccatccaggagtacctgaaggcggaggcagtagatgtaagcgggaactggctcacagcagtgcccaactgccctgtgttccccaaaacttgtacctggctcaggtggtgtggccctggcagccaggtgggatccagcaaggaccagggctctgcctccccagtcagcatgagcagagcagactcctttgagcagagcatcagggcagaaatagaacagtttctgaacgagaaaagacagcatgagacccaaaaatgtgatgggtcagtggagaagaaaccagacacacatgaaaattcggcgaagtcactctcgaaatcccaccaagagccggctacaaaggtggtgcaccggcagggcctgatggacgtccagaaggagttcgccttctgcagacctcccccggttagcaaagacaaacgtgcagcccagaagcctcaggtccaaggtcacgaccacgaccacgcaggagaaggagggcagcacaaagccagcaacccccaccgcccttcagaagcagtacagaataaaagtgggattaaaaggaacgccagcaccgcaaggaggggaaagcgagtcacgagcgccatacaggcgcccgaggcgtccgactccagcagcgacgacggcattgaggaggccatccagctgtaccaggtgcagaaaacacacaaggaggccgacggggacccgccccagagggtccagctccaagaggaaagagcacctgcccctcccgcacacagcacaagcagcgccacaaaaagtgccttgccagagacccacaggaaaacacccagcaagaagaagccagtgcccaccaagaccacggaccctggtccaggggatctggacgctgaccattcccccaagatcccaaaggaaaccaaagctccacctccaacgagcccggcttccaggagcaagtttgtggaatggtcctcttgccaggcagacacctccgctgagctgataagcagtcctggacattttcaagacgatcctgccggccctatggagggcagcgatgggtccctgtccgcaagcccactcttctactcccccaacgtgccttcccgctctgatggtgacagtagctccgtggacagcgacgacagcattgagcaggaaatctggacgtttttggccctcaaggtgcagtctagaagtttgctggccagaggtgagagctgccctcaggctgcccagggcccactttcaccacctggcctcagcagccagaccggcagccccaaggcccctctctctaaaacactggacccactcctggctgcaaaaggaagcatagaggcggctgccaaggcacagccagcgaggccccgggatgggagggcgccgctagggtgggacctttccatccagggcacagccagcgaggccccgggaggagagggcgccgctagggtgcccggtgacactcgcacgtcacagggccagggtaagacagacgaggcaaggcacctagacaagaagaagagctccgaagacaaaagcagttccctggacagtgacaaggacctggacacagccatcaaggacttgttaagagagtcccagggcccagctcccagccctggctccttgtctgacaacagcagttcagtggacagcgacgatagcatcgaactggagattaggaagtttttggtggaaaaggccaaggagtcgggagtcccaggccaggcccagccctgtctttggaagcccacacttgctggcgaagaaggactgcgatcaccggccaagcaggaaggattaacctcagcgattgttgctggcatcagtgcagccctgggaccagagcacacctgggtgcctggtgctacgactcccaggaccccaagtgtggccccagtccttgttccagcagtccccacccactggaagaagctggcccctgcctgtgggggcccaggccagtccctcatcgacattgactttcacagggtccggcggaactctaccctagggcccttcatcttccgaggctatgactcagcacctccaggcccttggaccctggagaatgacagccacacagagactcccccactcagaacccctcgcacttggagcccctcccaggagcaggactgtagcaacaccaacttctgcgccatagtgtcgggcttgaggaaggtgcctgagccagggctctcagtgaatctgaggtccaccttcctgctggcgtcgatgcggcccaacacctcgagctactgtcgcttcgctgggtcactgaccccgcctgactgtgagcccacggtgctctggaccgtcttcgaggaccccatacccatccgatga

SEQ ID NO: 8480 - DNA, 3345 bp, Homo sapiens
  SIMILAR (2279)..(2446): 621254mologous to Homo sapiens Human secreted protein clone dd428_4 protein sequence SEQ ID NO:104,accession number Y94949,Smith-Waterman Score=135.
atgcacaaggagctgcctgcgttggctgcctgtggtcttgttgctgactttgaccccgtgggggaggaggaaactgcagactttggcccattggtgctagattcagacagtgacgattccgtggaccgggacattgaggaggccatccaggagtacctgaaggcggaggcagtagatgtaagccggaactggctcacagcagtgcccaactgccctgtgttccccaaaacttgtacctggctcaggtggtgtggccctggcagccaggtgggatccagcaaggaccagggctctgcctccccagtcagcatgagcagagcagactcctttgagcagagcatcagggcagaaatcgaacagtttctgaatgagaaaagacagcatgagacccaaaaatgtgatgggtcagtggagaagaaaccagacacacatgaaaattcggcgaagtcactctcgaaatcccaccaagagccggctacaaaggtggtgcaccggcagggcctgatgggcgtccagaaggagttcgccttctgcagacctcccccggttagcaaagacaaacgtgcagcccagaagcctcaggtccaaggtcacgaccacgcaggagaaggagggcagcacaaagccagcaacccccaccgcccttcagaagcagtacagaataaaagtgggattaaaaggaacgccagcaccgcaaggaggggaaagcgagtcacgagcgccgtacaggcgcccgaggcgtccgactccagcagcgacgacggcattgaggaggccatccagctgtaccaggtgcagaaaacacgcaaggaggccgacggggacccgccccagagggtccagctccaagaggaaagagcacctgcccctcccgcacacagcacaagcagcgccacaaaaagtgccttgccagagacccacaggaaaacacccagcaagaagaagccagtgcccaccaagaccacggaccctggtccaggggatctggacgctgaccattcccccaagatcccaaaggaaaccaaagctccacctccaacgagcccggcttccaggagcaagtttgtggaatggtcctcttgccaggcagacacctccgctgagctgataagcagtcctggacattttcaagacgatcctgccggccctatggagggcagcgatgggtccctgtccgcaagcccactcttctactcccccaacgtgccttcccgctctgatggtgacagtagctccgtggacagcgacgacagcattgagcaggaaatctggacgtttttggccctcaaggtgcagtctagaagtttgctggccagaggagcagctgggcaggctcctgagagagtggaaaaacaggcacctgcaggtgctgaagagctgcctaagtccaagagagacagctgcgagggctccaggaagaaaccccccagtgtctttggcagcagggccgagaggacgaagccccggccttcctgcagttcagtggacagcgacgatagcatcgaactggagattaggaagtttttggtggaaaaggccaaggagtcgggagtcccaggccaggcccagccttgtctttggaagcccacacttgctggcgaagaaggactgcgatcaccggccaagcaggaagctgcctggtgctacgactcccaggaccccaagtgtggtgactcgaagaagccttccaaaaagcgtgtgaaaaggaagccctactctactaccaaggtgacttcagggagcacattcaatgagaacacaagaagctatgctgtgcacaccaaccagtgtaggagacctcatggctcccgggtaaagaagaagaggtacccacaagaagatgacttccatcatacagtcttcagcaaccttgaaagattggacaagcttcagcccactcttgaagcctctgaggagtctctagttcacaaggacagaggagatggagagaggccagtcaacgtgagggtggtgcaggtggcccctctgaggcgtgaatctagtaagtattctggaatcacttaccgagaaaacaatctggatgccaagaaagctccccatgaggacaccgtacacaacatcactaacgaggatgcctcacacgatatcactaacgaggacgctgtccacggcatcgctaacgaggccgccgacaagggcatcgccaacgaggacgccgcccagggcatcgccaacgaggacgccgcccacggaatcgccagcgaggacgccgcccagggcatcgccaacgaggtcgccgcccagggcatcgccaacgaggacgccgcccagggcatcgccaaggaggacgccgcccacggcatcgccaacgaggatgctgcccacggcattgctaacgaggatgccgtgcacggcatcgctaatgaggactccgtatacgacatcgctaatgaggatgccatatatgacatcgctaatgacaccgtacaaggcacactaacgaggacgctgtacacgacatcgctaatgaggacaccatacaaggcattggtaatgaggacgttgtatatgacatcgctaacaaggacactctacaagccgtcgctaacaaggacactgtacacaacatcgctaatgacggcaccatacaagacatcaccaatgagggcgctttatacgacattgctaatggcaccgacaaggcacgctaacgtggacactgtacacgacattgctaatgaggactccgtatacgacatcgctaatgagggtgccgtatatgacatcgctaatgacaccgtacaaggcacgctaacgaggacgctgtacacgacatcgctaatgaggacaccatacaaggcatcggtaatgaggacgctgtatacgacatcgctaacgaggacaccatacaagccgtcgctaacaaggacactgtacacaacatcgctaatgatggcaccgtacaagacatcaccaatgagggcgctttatacgacattgctaatgataccgacaaggcacgctatcgtggacgctgtacacgacatcgctaatgaggactccgtatacgacatcgctaatgagggtgccgtatatgacatcgctaatgacaccgtacaaggcacgctaacgaggacgctgtacacgacatcgctaatgaggacaccatacaaggcatcggtaatgaggacgctgtatacgacatcgctaacgaggacaccatacaagccgtcactaacaaggacactgtacacaacatcgctaatgacggcaccgtacaagacatcaccaatgagggcgctttatacgacattgctaatgataccgacaaggcacgctaacgtggacgctgtacacgacattgctaatgaggacaccgtataa

SEQ ID NO: 8481 - DNA, 1593 bp, Homo sapiens
  SIMILAR (1157)..(1324): 641254mologous to Homo sapiens Human secreted protein clone dd428_4 protein sequence SEQ ID NO:104,accession number Y94949,Smith-Waterman Score=141.
atgacaaagaaaagtcctggacctgatagctttactggacattggtgtgtcatttctataccatctggctacgagaggagccgactgaaagtcacactgccggaggaggggagaggtgctcttccgtttctggtgtctgtagccatctccagtggtagctgcagtgataataatgctgcggtgccgacagttctggaaggagcaacaacagtgatttcagcagcagcagtattgcgggatccccacgatggagcaagggaaataattctggaagcaatgacaatatcagctgtggctatagcagctgagatcagttggacctcacagtgtggattgtgccttcaccctggaatgtttatgccctatcgccatggtgatgggattagggatctgctgcccttggtcctaagtgccactatctgtgctgagtttttcaaaggtgactcgaagaagccttccaaaaagcgtgtgaaaaggaagccctactctactaccaaggtgacttcagggagcacattcaatgagaatataagaagatatgctgtgcacaccaaccagtgtaggagacctcatggctcccgggtaaagaagaagaggtacccacaagaagatgacttccatcatacagtcttcagcaatcttgaaagattggacaagcttcagcccactcttgaagcctctgaggagtctctagttcacaaggacagaggagatggagagaggccagtcaacgcgagggtggtgcaggtggcccctctgaggcttgaatctagtaagtattctggaatcacttgccaagaaaacaatctggatgccaagaaagctccccatgaggacaccgtacatgacatcactaaccaggacgccacacacgacatcgctaacgaggatactgtccacggcatcgctaacgaggccgccgacaagggcatcgccaacgaggacgccgcccagggcatcgccaacgaggacgccgcccacggaatcgccagcgaggatgccgcccagggcatcgccaacgaggtcgccgcccagggcatcgccaacgaggacgccgcccagggcatcgccaacgaggacgccgcccagggcatcgccaaggaggacgccgcccacgggatcgccaaggaggacgccgcccagggcatcgccaacgaggacgccgtccacggcatcgccaacgaggacgccacccatggcatcgccaacgaggacgctgcccacggcattgctaacgaggatgccgtgcacggcatcgctaatgaggactccgtatacgacatcgctaatgagggtgccgtatatgacatcgctaatgacaccgtacaaggcacgctaacgaggacgctgtacacgacatcgctaatgaggacaccatacaaggcatcggtaatgaggacgctgtatacgacatcgctaacgaggacaccatacaagccgtcgctaacaaggacactgtacacaacatcgctaatgacggcaccgtacaagacatcaccaatgagggcgctttatacgacattgctaatgataccgacaaggcacgctaacgtggacgctgtacacgacattgctaatgaggacagcgtataa

SEQ ID NO: 8482 - DNA, 3093 bp, Homo sapiens
  SIMILAR (160)..(1914): 531254mologous to Homo sapiens KIAA0649 protein,accession number AB014549,Smith-Waterman Score=1296.
atgcacaaggagctgcctgcgttggctgcctgtggtcttgttgctgactttgaccccgtgggggaggaggaaactgcagactttggcccattggtgctagattcagacagtgacgattccgtggaccgggacattgaggaggccatccaggagtacctgaaggtgggatccagcaaggaccagggctctgcctccccagtcagcatgagcagagcagactcctttgagcagagcatcagggcagaaatagaacagtttctgaatgagaaaagacagcatgagacccaaaaatgtgatgggtcagtggagaagaaaccagacacacatgaaaattcggcgaagtcactctcgaaatcccaccaagagccggctacaaaggtggtgcaccggcagggcctgatgggcgtccagaaggagttcgccttctgcagacctcccccggttagcaaagacaaacgtgcagcccagaagcctcaggtccaaggtcacgaccacgaccacgcaggagaaggagggcagcacaaagccagcaacccccaccgcccttcagaagcagtacagaataaaagtgggattaaaaggagcgccagcaccgcaaggaggggaaagcgagtcacgagcgccgtacaggctcccgaggcgtccgactccagcagcgacgacggcattgaggaggccatccagctgtaccaggtgcagaaaacacacaaggaggccgacggggacccgccccagagggtccagctccaagaggaaagagcacctgcccctcccgcacacagcacaagcagcgccacaaaaagtgccttgccagagacccacaggaaaacacccagcaagaagaagccagtgcccaccaagaccacggaccctggtccaggggatctggacgctgaccattcccccaagatcccaaaggaaaccaaagctccacctccaacgagcccggcttccaggagcaagtttgtggaatggtcctcttgccaggcagacacctccgctgagctgataagcagtcctggacattttcaagacgatcctgccggccctatggagggcagcgatgggtccctgtccgcaagcccactcttctactcccccaacgtgccttcccgctctgatggtgacagtagctccgtggacagcgacgacagcattgagcaggaaatctggacgtttttggccctcaagggcacagccagcgaggccccgggaggagagggcgccgctagggtgcccggtgacactcgcacgtcacagggccagggtaagacagacgaggcaaggcacctagacaagaagaagagctccgaagacaaaagcagttccctggacagtgacaaggacctggacacagccatcaaggacttgttaagagagtcccagggcccagctcccagccctggctccttgtctgacaacagcagttcagtggacagcgacgatagcatcgaactggagattaggaagtttttggtggaaaaggccaaggagtcgggagtcccaggccaggcccagccctgtctttggaagcccacacttgctggcgaagaaggactgcgatcaccggccaagcaggaaggtgcctggtgctacgactcccaggaccccaagtgtggtgacttgaagaagccttccaaaaagcgtgtgaaaaggaagccctactctactaccaaggtgacttcagggagcacattcaatgagaatacaagaagatatgctgtgcacaccaaccagtgtaggagacctcatggctcccgggtaaagaagaagaggtacccacaagaagatgacttccatcatacagtcttcagcaaccttgaaagattggacaagcttcagcccactcttgaagcctctgaggagtctctagttcacaaggacagaggagatggagagaggccagtcaacgtgagggtggtgcaggtggcccctctgaggcttgaatctagtaagtatactggaatcacttgccaagaaaacaatctggatgccaagaaagctccccatgaggacaccgtacacgacatcactaacgaggacgccacacacgacatcgctaacgaggatactgtacacgacatcgctaacgaggccgccgacaagggcatcgccaacgaggacgccgcccacggcatcgccagcgaggacgccgcccacggcatcgccagcgaggacgccgcccagggcatcgccagcgaggacgccgcccagggcatcgccagcgaggacgccgcccagggcatcgccaaggaggacgccgcccagggcatcgccaacgaggacgccgcccagggcatcgccaacgagggcgccgcccagggcatcgccaaggaggacgccgcccagggcatcgccaaagagggcgccgcccacggcatcgccaacgaggacgccgcccagggcatcgccaacgaggactccgcccacggaatcgccagcgaggacgccgcccacggcatcgccatcgctaatgaggatgccatatatgacatcgctaatgacaccgtacaaggcacgctaacgaggacgctgtacacgacatcgctaatgaggacaccatacaaggcattggtaatgaggacgttgtatatgacatcgctaacaaggacactctacaagccgtcgctaacaaggacactgtacacaacatcgctaatgacggcaccgtacaagacatcaccaatgagggcgctttatacgacattgctaatgataccgacaaggcacgctaacgcggacactgtacacgacatcgctaatgaggactccgtatacgacatcgctaatgagggtgccgtatatgacatcgctaatgacaccgtacaaggcacgctaacgaggacgctgtacacgacatcgctaatgaggacaccatacaaggcatcggtaatgaggacgctgtatacgacatcgctaacgaggacaccatacaagccgtcgctaacaaggacactgtacacaacatcgctaatgacggcaccgtacaagacatcaccaatgagggcgctttatacgacattgctaatgataccgacaaggcacgctaacgtggacgctgtacacgacattgctaatgaggacaccgtataa

SEQ ID NO: 8483 - DNA, 2922 bp, Homo sapiens
  SIMILAR (2362)..(2919): 511254mologous to Homo sapiens Human secreted protein clone dd428_4 protein sequence SEQ ID NO:104,accession number Y94949,Smith-Waterman Score=385.
atgcacaaggagctgcctgcgttggctgcctgtggtcttgttgctgactttgaccccgtgggggaggaggaaactgcagactttggcccattggtgctagattcagacagtgacgattccgtggaccgggacattgaggaggccatccaggagtacctgaaggtgggatccagcaaggaccagggctctgcctccccagtcagcatgagcagagcagactcctttgagcagagcatcagggcagaaatagaacagtttctgaatgagaaaagacagcatgagacccaaaaatgtgatgggtcagtggagaagaaaccagacacacatgaaaattcggcgaagtcactctcgaaatcccaccaagagccggctacaaaggtggtgcaccggcagggcctgatgggcgtccagaaggagttcgccttctgcagacctcccccggttagcaaagacaaacgtgcagcccagaagcctcaggtccaaggtcacgaccacgaccacgcaggagaaggagggcagcacaaagccagcaacccccaccgcccttcagaagcagtacagaataaaagtgggattaaaaggagcgccagcaccgcaaggaggggaaagcgagtcacgagcgccgtacaggctcccgaggcgtccgactccagcagcgacgacggcattgaggaggccatccagctgtaccaggtgcagaaaacacacaaggaggccgacggggacccgccccagagggtccagctccaagaggaaagagcacctgcccctcccgcacacagcacaagcagcgccacaaaaagtgccttgccagagacccacaggaaaacacccagcaagaagaagccagtgcccaccaagaccacggaccctggtccaggggatctggacgctgaccattcccccaagatcccaaaggaaaccaaagctccacctccaacgagcccggcttccaggagcaagtttgtggaatggtcctcttgccaggcagacacctccgctgagctgataagcagtcctggacattttcaagacgatcctgccggccctatggagggcagcgatgggtccctgtccgcaagcccactcttctactcccccaacgtgccttcccgctctgatggtgacagtagctccgtggacagcgacgacagcattgagcaggaaatctggacgtttttggccctcaaggtgcagtctagaagtttgctggccagaggagcggctgggcaggctcctgagagagtggaaaaacaggcacctgcaggtgctgaagagctgcctaagtccaagagagacagctgcgagggctccaggaagaaaccccccagtgtctttggcagcagggccgagaggacgaagccccggccttcctgcagttcagtggacagcgacgatagcatcgaactggagattaggaagtttttggtggaaaaggccaaggagtcgggagtcccaggccaggcccagccctgtctttggaagcccacacttgctggcgaagaaggactgcggtcaccggccaagcaggaaggtgactcgaagaagccttccaaaaagcgtgtgaaaaggaagccctactctactaccaaggtgacttcagggagcacattcaatgagaatacaagaagatatgctgtgcacaccaaccagtgtaggagacctcatggctcccgggtaaagaagaagaggtacccacaagaagatgacttccatcatacagtcttcagcaaccttgaaagattggacaagcttcagcccactcttgaagcctctgaggagtctctagttcacaaggacagaggagatggagagaggccagtcaacgtgagggtggtgcaggtggcccctctgaggcgtgaatctagtaagtattctggaatcacttaccaagaaaacaatctggatgccaagaaagctccccatgaggacaccgtacacaacatcactaacgaggatgcctcacacgatatcactaacgaggacgctgtccacggcatcgctaacgaggccgccgcccagggcatcgccaacgaggacgccgcccagggcatcgccaacgaggacgccgcccacggaatcgccagcgaggacgccgcccagggcatcgccaacgaggtcgccgcccagggcatcgccaacgaggacgccgcccagggcatcgccaacgaggacgccgtccagggcatcgccaacgaggacgccgcccacggcatcgccaacgaggacgctgcccacggcattgctaacgaggatgccgtgcacggcatcgctaatgaggactccgtatacgacatcgctaatgaggatgccatatatgacatcgctaatgacaccgtacaaggcacgctaaagaggacgctgtacacgacatcgctaatgaggacaccatacaaggcattggtaatgaggacgttgtatatgacatcgctaacaaggacactctacaagccgtcgctaacaaggacactgtacacaacatcgctaatgacggcaccgtacaagacatcaccaatgagggcgctttatacgacattgctaatgataccgacaaggcacgctaacgcggacactgtacacgacatcgctaatgaggactccgtataccacatcgctaatgagggtgccgtatatgacatcgctaatgacaccgtacaaggcacgctaacgaggacgctgtacacgacatcgctaatgaggacaccatacaaggcatcggtaatgaggacgctgtatacgacatcgctaacgaggacaccatacaagccgtcgctaacaaggacactgtacacaacatcgctaatgacggcaccgtacaagacatcaccaatgagggcgctttatacgacattgctaatgataccgacaaggcacgctaacgtggacgctgtacacgacattgctaatgaggacaccgtataa

SEQ ID NO: 8484 - DNA, 1122 bp, Homo sapiens
  SIMILAR (13)..(198): 341254mologous to Saccharomyces cerevisiae SFL2 gene poduct (AA 1-669),accession number X16365,Smith-Waterman Score=110.
atggctggagattcagggagaagagtcattgccgcatcctatgataagacagtgagggcctgggacctggagacaggcaagctgctgtggaaggtcaggtatgataccttcatcgtctcctgtaagttttctcctgatggtaaatacgtggtctcaggcttcgacgtggatcatggaatctgcataatggacgccgagaacatcaccaccgtttccgtcatcaaagagctgccaagagactatcgaccagtgcattatttcagacccatggtggccgccacctccgagaactcacacttactgcaggtattatcagagtcagctggaaaggcaacgcctgacccagggacacacagtaagcaccaactgaatgcctccaaacgggctgagttgcttggagagacgcctattcaaggttcagctacttcagtgttagaatttctgtcccaaaaagacaaagagagaatcaaagaaatgaagcaggcaactgacctgaaagcagctcagctcaaggccaggagtctggcccagaacgctcagagcagcagagcccagctctcccctgcagcggctgctgggcactgctcttggaacatggcattaggtggtgggacggccaccttaaaagccagcaacttcaagcctttcgccaaagatccggaaaagcaaaagcgatacgacgagttcttagtacacatgaaacagggtcagaaaggctcttttctcatttctggagggtttgataggactgtggctatttgggatgtagcagaaggctaccggaagctctctttgaagggtcatgcaacggatgcggtaggcttgtcggcggccaccggcggaccgggcttcgagatggcctccccgccgcggtgctccccgacagcccatgacagggaatgcaagttgccgccaccctccgcccccgccagcgagtattgtcccggcaagctgtcctgggggaccatggcgagggccttaggccgcttcaagctgtcgatcccgcacacgcacctgctggccaccctcgaccccctggccttggacagggaaccaccaccgcatctgttgcatgagaagcaccaggtgcccggagaaattgatctggggcgaccaggatag

SEQ ID NO: 8485 - DNA, 1074 bp, Homo sapiens
  SIMILAR (1)..(1074): 1001254mologous to Homo sapiens CCAAT/enhancer binding protein alpha,accession number U34070,Smith-Waterman Score=1937.
atggagtcggccgacttctacgaggcggagccgcggcccccgatgagcagccacctgcagagccccccgcacgcgcccagcagcgccgccttcggctttccccggggcgcgggcccgccgaagcctcccgccccacctgccgccccggagccgctgggcggcatctgcgagcacgagacgtccatcgacatcagcgcctacatcgacccggccgccttcaacgacgagttcctggccgacctgttccagcacagccggcagcaggagaaggccaaggcggccgtgggccccacgggcggcggcggcggcggcgactttgactacccgggcgcgcccgcgggccccggcggcgccgtcatgcccgggggagcgcacgggcccccgcccggctacggctgcgcggccgccggctacctggacggcaggctggagcccctgtacgagcgcgtcggggcgccggcgctgcggccgctggtgatcaagcaggagccccgcgaggaggatgaagccaagcagctggcgctggccggcctcttcccttaccagccgccgccgccgccgccgccctcgcacccgcacccgcacccgccgcccgcgcacctggccgccccgcacctgcagttccagatcgcgcactgcggccagaccaccatgcacctgcagcccggtcaccccacgccgccgcccacgcccgtgcccagcccgcaccccgcgcccgcgctcggtgccgccggcctgccgggccctggcagcgcgctcaaggggctgggcgccgcgcaccccgacctccgcgcgagtggcggcacgggcgcgggcaaggccaagaagtcggtggacaagaacagcaacgagtaccgggtgcggcgcgagcgcaacaacatcgcggtgcgcaagagccgcgacaaggccaagcagcgcaacgtggagacgcagcagaaggtgctggagctgaccagtgacaatgaccgcctgcgcaagcgggtggaacagctgagccgcgaactggacacgctgcggggcatcttccgccagctgccagagagctccttggtcaaggccatgggcaactgcgcg

SEQ ID NO: 8486 - DNA, 1086 bp, Homo sapiens
  SIMILAR (51)..(89): 531254mologous to Homo sapiens Human CCAAT/Enhancer Building Protein (C/EBP),accession number R62381,Smith-Waterman Score=45.
atgtgggtggcgaaacatgggcggcacatggcccgcgcttaccaggcaagcctcggctcaatgcccaagttctccattgcggccaatcatagccccggctcttgttttaatcttcggccgtttccccttcggcaaagttgtcgggcgctcagtgccgccggcctgccgggccctggcagcgcgctcaaggggctgggcgccgcgcaccccgacctccgcgcgagtggcggcagcggcgcgggcaaggccaagaagtcggtggacaagaacagcaacgagtaccgggtgcggcgcgagcgcaacaacatcgcggtgcgcaagagccgcgacaaggccaagcagcgcaacgtggagacgcagcagaaggtgctggagctgaccagtgacaatgaccgcctgcgcaagcgggtggaacagctgagccgcgaactggacacgctgcggggcatcttccgccagctgccagagagctccttggtcaaggccatgggcaactgcgcgcgccactacatgcccccccagtggacagagctgccctctggccacgccgccagctggctagggctgatcagaagccttcagtttcaggacagctgccagggtgtggaccatggggactgctttctgctgctctggagcgccgtcctcatcatgtaccccaccagccttgctgtcatctccatgaccttctccaactacgtgctgcagcccgtgttccccaactgcatcccccccaccacagcctcccgggtgctgtccatggcctgcctgatgctcctgacatgggtgaacagctccagtgtgcgctgggccacgcgcatccaggacatgttcacaggcgggaagctgctggccttgtccctcatcatcggcgtgggccttctccagatcttccaaggctcttttctcatttctggagggtttgataggactgtggctatttgggatgtagcagaaggctaccggaagctctctttgaagtgtttgcctgaggtgactgaatgtgatttgctgcaggtaaaacgcagttcccaggaccatcaagcaggagcagatgtgctgtggtcagtggctcggccgtcttga

SEQ ID NO: 8487 - DNA, 3786 bp, Homo sapiens
  SIMILAR (1771)..(1857): 311254mologous to Homo sapiens bA395L14.1 (novel forkhead protein similar to FOXD4 (forkhead box D4, FREAC5)),accession number AL078621,Smith-Waterman Score=41.
atgaacttgccaagagctgagcgccttcgctccacaccgcagcgcagcctccgggactccgatggggaagacggtaaaatcgatgtcctgggagaggaggaagatgaagacgaggtggaagacgaggaggaggaggcgagccagcagttcctagagcagtcgctccagccggggctgcaggtggcccggtggggcggggttgcgcttccccgagagcacatcgagggcggcggcggcccgagcgacccctcagagtttggcaccgagttcagggcaccgccaaggtctgcggcggcctctgaagatgcccggcagccggcaaagcccccctactcgtacatcgcgctcatcaccatggccatcctgcaaagcccgcacaagcgcctcacgctcagcggcatctgcgccttcattagtggccgcttcccctactaccgccgcaagttccccgcctggcagaacagcatccgccacaacctctcgctgaacgactgcttcgtcaagatcccccgcgagccgggccgcccaggcaagggcaactactggagcctggaccccgcctcccaggacatgttcgacaatggcagctttctccggcgtaggaagcgtttccagcgccaccaactgaccccgggagcccacctgccccaccccttccctctacctgctgcacacgccgccctgcacaacccccgcccaggccctctgcttggggcccctgccccgccgcagccagtcccgggggcctaccccaacaccgcccccgggagacgcccttacgctctgctgcacccgcatcctcctcgctacctactgctctcggcccccgcctatgccggggcaccgaagaaagcagaaggcgcggacctggcgaccccggcacccttcccgtgctgcagccctcacttgcgaccgtcaagcctgtcggacaattttgcagcaacagcagcggcatcaggaggaggactgcgcaacggctgcgctcccaccaagggcgcggtgctgggcgggcacctgtcggccgcgtcggcagctgctgcggtatcaggcggtggcagagggctctgggctgacatcgctagagccctttgggcggagagggacctcaccagtttttttagtatcgcccacgcccagttccctggccgagtccgcagggccctcctagagccaggcagccgtcagccccatagccccaccggcgtccagaagagaccacttttagcaaatccggcagggctggggcagtctaagagttcggaaacaactgagaatagaggggtcctatgtcatgccagcttctcgctggtttacgctccaactcccctctgtccgttgtgcgaaaacgtctccgggccgaccttccttcatttattgccaacaaacgtcctgggagagcggctacagccgctgaacccagaagggactttctctaggctttcttggcaccctcccaatcatcttccttctcttgcccgagggcagatcacccggctacgaacgagcttcgggtccacctgtttggaagcacccaggcggcttggaggggtccggccttcgggcgcgacccgcaggggttgccttgcccggctcgcggaacggacgtttacccgtcgcagctacgaacccaccaacgacaccaagcaccggccgggcagaccaggcgtcgtggaggcgccccagccccccagccccccgcaacgacgcgtcccagggcactcgcagcacgcactgaagaagacgctacggaagtctccgttttccagactcgggggaattaggaaacgcgcccggcgaccctcgggcagtagcaccgggccaggggtggaagccgacctgggccagggccggatttcttcctcccggcctctgcgccaccgcccccggtgcaggacgcgctttgctctcgccgagacccagacgcgccgaaagcctcgcgcgggcagttccccgccccacgccccgggctgcgcgttctcccgcgaacgctctgccgagtgcgcgcaacggcgcgcggatctcccccggaccgcgctcccgcgcacgcctgaccggagcacccgcttcacgggggcgttctgcgcgtccttcctccccggtgcgatttccgttctttttcctctcgcggtccccaggagcccaggcacccctcgacgccgctgccggcggtaccgggaaccctccccggggctccctgcgggcccgaagccgccttcccgaggcggcggagttgggcagctccgggccccgcgccgccccgcgccgccccgcggagccggagtttctctccggagtctggacacagctctccgcttcgtcgccgcgcactggaccccggtagcctgtagcctgcccgggaagctgggctgcgccggcctggggcgaaggtccaaggggcgcgggggccgggacgcggggctgtggcgacgaccggccctctgcgaaccctcaggccggcgggtccgggccacaggctgggagtggagctggcggccactggggagtagagaggacgcccaggaacaggtgcaccagggtcccggcggctgggccgagggtcgcaagcagaggggaccggcggctgccagcaagtcccaagcagatgcctccggcggggcagccgcactctacagcgcccattccgcgtacatcgagtatcgccaagctgggggcatcggcaaggcccaacgtcgcagcatgaaggagcgaaagctggagaagaagaagcagaaggagcaggagcaagtgagagccacgagccaaggtgggcacttgatgtcggatctcttcaacaagctggtcatgaggcgcaaggcaggatccctgcagaccaggcccatgacaaacaccgtctccagcgggcagagcaaaggaagggcacagcgccaggcagtggtgcagctgcctgtcaggatgaggcctacttctagtgaaactgggcagacaaaaggcagtgagaaatgtgatctcggggtggtggaggctctagggaaaggaaaaggcaggagtgaacttccacacagcagcaatggcagaaccaaaggtggctttgacctccacgagggctcagatccaggccaacagcttgtccaggacagggtgccgggtgtatcactggtccaggagcactatgctggcagaatccctttggtgcctgatggccctgccttcgtgggaacagaggctaaggctttgagttacagctgcctccccaacagtgcatccccttctccctcctcagcctcagggccaaagccagacctgctgagcccctccctccagccggctggtctgagcagtcacagcccggctttgggctccgatggcagcagacggcagggcgagggctgcccggaggagccgaggctggcggacagcttggccctgagcttgaggggaaggcagcgatgggacaaaggacggaggtctaggaagagggtctgcagagcagaaagcacgggtaggggcggcctgacgctcggaagacaacggatgggagccgtgtgcacgtcgggagctcggagtgagcgtgagttccgtgcccaggcccgcgactcggtccaccaggacagcgctccgggtcgacggggtcctggagccgcgctcggggagggcgcagcggaggcgcagtacccgcccaacttcatccggagcgcgctgtcgtccgtcgacctgcgcgaccgtcagggccgcaccacgggggtgggcagcgacggcaggtacttcggcaggacggccgtcgaggtccagcagcatctcaaggacatctacaagagggatacctaa

SEQ ID NO: 8488 - DNA, 1287 bp, Homo sapiens
  SIMILAR (968)..(1219): 721254mologous to Homo sapiens bA395L14.1 (novel forkhead protein similar to FOXD4 (forkhead box D4, FREAC5)),accession number AL078621,Smith-Waterman Score=297.
atgaacctgccaagagctgagcgccctcgctccacaccgcagcgcagcctccgggactccgatggggaagacggtaaaatcgatgtcctgggagaggaggaagatgaagacgaggtggaagacgaggaggaggaggcgagccagaagttcctagagcagtcgctccagccggggctgcaggtggcccggtggggcggggttgcgcttccccgagagcacatcgagggcggcggcggcccgagcgacccctcagagtttggcaccaagttcagggcaccgccaaggtctgcggcggcctctgaagatgcccggcagccggcaaagcccccctactcgtacatcgcgctcatcaccatggccatcctgcaaaacccgcacaagcgcctcacgctcagcggcatctgcgccttcattagtggccgcttcccctactaccgccgcaagttccccgcctggcagaacagcatccgccacaacctctcgctgaacgaatgattcgttaagatcccccgcgagccgggccacccaggcaagggcaactactggagcctggaccccgcctcccaagacatgttcgacaatggcagctttctccggcgtaggaagcgtttcaagcgccaccaactgaccccgggagcccacctgccccaccccttccctctacctgctgcacacgccgccctgcacaacccccgcccaggccctctgcttggggcccctgccctgccgcagccagtcccgggggcctaccccaacaccgcccccgggagacgcccttacgctctgctgcacccgcatcctcctcgctacctactgctctcggcccccgcctatgccggggcaccgaagaaagcagaaggcgcggacctggcgacccccggcacccttcccgtgctgcagccctcacttggtcctcagccttgggaggagggcaagggtctggcgtcgccaccgggaggcggatgcatctctttcagcattgagagtatcatgcaaggggtcaggggagcgggtacaggggctgcgcagagtttgtccccgaccggcgtggagctactgccccctgctccagcgaccgtcaagcctgtcggacaattttgcagcaacagcagcagcatcaggaggaggactgcgccaacggctgcgctcccaccaagggcgcggtgctgggcgggcacctgtcggccgcgtcggcgctgctgcggtatcagccggtggctaaaggcctctgggctgacatcgctgccgcccctttgggcggagaggggacctcaccagtttttttag

SEQ ID NO: 8489 - DNA, 1600 bp, Homo sapiens
  SIMILAR (442)..(1083): 741254mologous to Homo sapiens dJ551D2.5 (novel protein),accession number AL109928,Smith-Waterman Score=740.
ggaacaagagttattacccgctgatgacttctgcagctggccttaatcagcctctggcgcttggggagcatatttgtagccagaatctccgacttttagctttgtttccaagcaagccagaaacaccagcaaggcctggagcttgttttctgcctatttagaaccctgcaggcattcgtgactctcacccggtagctttgagcacaaaaccccacagcctttggtgtaaagcataccagttccggtggtgaggagacctttccaaatataagaggaataaagaagtcacctccccagctgtcatcatcttccatcagattgagcaagaatattttgagcactacaggaaagacagtccatcaaacccgagatgatgatcagccacgtgattttttcaagaagaggaatagggtgaatgaatctcatcagaaaagcagcaatatgaatgctggcccatcttggaataaagtgcaacattcaaagaattcttcaggaaaaaggcagagtaaatcccaagtaccccacgcttcttcccagccgagaagcagcctcacagctgtcacccagcctactgaagaaaaacttatagaaagcatttccccggaagcaagacgcaaaaggaatccactcggtttcaggtgtcagggggcctcaaggaataaactgtttcttgattttcagtcaatgaaaattattaaagagaatgctgatgaggacagtgcaagtgatctctctgattcggaaagaattcccattcctccttctcccctcacacctccagatctcaatcttcgagctgaagaaattggatccagtttactttgatcttcaccctggtcagggccatacaaaacctgaatactattaatcctaatttccttccatccccttttcagctcctgggacctacgagatatggccctgcttctgaacgcaagagaacaaaacggaagccgtgccccgagtgggaggacttcttgggaaagtatatcgatagacttattcagcttgagtggctgcaagtccaggactgtacagtgtgaaaaagcaaaggggggcaaagcaaggccccccacttgcccctgggacctcaggggcactgaaaagccctgggagaagtaagctaattgctagtgctctgtccaagccactacctcaccaggaaggggcttcaaagtcaggcccttcccgaaagaaagcttttcaccatgaagaaatccacccatcacattatgcatttgagacttcccctagacccattgatgtgcttggtggtaccaggttttgttctcagaggcaaacccttgaaatgaggacagaagaaaagaaaaagaaatcaagtaagagtacgaagctgcagcgctgggatctgtccggcagtggaagcagctctaaggtggaaaccagcggtcacattcgagttcccaaacaggcagctgtgattctggactcagcagattcctgtaaggcctccaaaacacaagcacatgcacatcctaggaaaaagggaaaggcagagagctgtggtcatgccactgtatcgagtgagaaaaaactgaaaacaaacggagtaaagcaaaacacatataaactaaaataa

SEQ ID NO: 8490 - DNA, 1351 bp, Homo sapiens
  SIMILAR (213)..(962): 241254mologous to Leishmania major proteophosphoglycan,accession number AJ243459,Smith-Waterman Score= 123.
tttcgtacgaggttgtcatggtgccgcggggccgtgttcgcgcatgcgccacctgacccacaggccgggggtggagctgcgaccccggccctagggcagtccagatgaaaagagtaccaatgaatctgcctcacacctgaataatccatggagaggaaaaacccatctcagagagagccccagaagacatctctgtcaaagtaggcaaaggcacagagatgaagaaagtggctcgtcagcttgggatggctgctgctgagtcagacaaggactctggcttttcagatgggagctcggaatgtctgagctctgcagagcagatggagtccgaggacatgctgagcgccttatgctggagcagagaagacaggccgaggcagaactccaaaactgcaaagaatgccttccctaccctgtctcccatggtcgtcatgaagaatgtgcttgtcaaacagggcagcagctcatcccagctccagtcgtggactgtccagccctcctttgaagtgatctcagcacagccacagctcttattccttcatccacctgtaccatctcctgtcagtccatgtcacactggtgagaaaaagtccgactccaggaactacttgcccattctgaattcttacaccaaaatagccccacatccaggcaaaaggggcctttcccttggcccagaagaaaaaggaacaagtggagtgcagaagaaaatctgtactgagagacttgggcctagcttgtcttccagtgagccaaccaaggctggtgctgtcccatccagtccctcgacgccagcaccacccagcgccaaacttgccgaggactcagctctgcagggtgtgccctctctggtggcaggtggaagtccacagactcttcagccggtatccagcagtcacgtggctaaagctcccagtctgaccttcgcttcccccgccagtcctgtctgcgcatcagacagcactctccatggggtaagagagcaactctcccctttcaccactgtccgttaatttatagctcacctttatgggctgcagagcacctctgccgcagcccagatatcttttcagagcagcggcagagcaaacataggcgctttcagaataccctagtagtcctacataaatctggtttgctggagatcactttgaaaaccaaggagttgattcgtcagaatcaggcaactcaggtagaactagaccagctaaaggagcaaacccagctgtttatagaagccaccaagagcagggcccctcaggcttgggccaagctgcaggcatctttaacacctgggtccagtaatacaggcagtgacctagaagcattctctgatcacccagcgtgtatt

SEQ ID NO: 8491 - DNA, 686 bp, Homo sapiens
  SIMILAR (163)..(468): 561254mologous to Homo sapiens hypothetical protein,accession number AL080092,Smith-Waterman Score=211.
  misc_feature (1)...(686): n = a,t,c or g
gggggaagcgggggtgggatctgaacatggcggcggtggtagctgctacggcgctgaagggccggggggcgagaaatgcccgcgtcctccgggggattttcgcaggagccacagcttaacaaggcttcttcataacaggacccgggcccttcaaaacccacagcttccccagagggcaaggaggaaccctgaaccccttatccccggaactggaaaatacattccccagaaaagaggggcaaaaaacccccatgaaaactgtgggaacttgccctgggccatcggcttcccttgtggtatcctcctcttcgatccctcacccaagcgggaaagttggacaaggaccgtgtgaagcagatgaaggctcggcagaacatgcggttgtccaaacacggggcgagtatagaagcaagagggttcagggcttcctcccagagtgccccgtcccctgatgttgggtctggggtgtctggggngtgcagacctgaggagcgnctgcgaccctccttaggctattgactgttaagtcctcaggtttggcccagattcccagttcgtgcctctgaaggtccaccagagggggcatgaaggcccaggctgtttgccaaaaccctaccctgccccacaccaaggaagccagccaaaagggaaaataaagttattgagtgtttagtagaaagaaaaaa

SEQ ID NO: 8492 - DNA, 1028 bp, Homo sapiens
  SIMILAR (1011)..(943): 391254mologous to Homo sapiens putative p150,accession number U93574,Smith-Waterman Score=47.
ttattcccctaaatatgctgttgactgatatgtttctctgctctgctttcttcctctgggaatatagatgaggtcttgtccgaaaactttctggactataaaaaccgtggagtcaatggttctcatcggggccagatcatctggaagatcgatgccagctcgtactttgtggaacgtgagtacctttaccattcttgtggcttggcagacatggatgaagcagaattcaactgtttcattatttgttcccgttgcactgcctccactaagaaatgggccctctcccgggtcagtcttaggctcggcctgtcttgcccctcgtttcctcgtgtggaaacctggctggatgcacacccagattgctgcacgctgtggtctcatcattcccattctaaaggctgggaagtccatgatcacagtgccaacagattctgcttctgctgagggcctgctcagcttcaaagacagtgccctcttgctgtttctccctggtatgataggcaaggaaatgtggggggcatcagagaatacagacatcactagactatcacattctaccaaaatggaggtattgctgttgccagctgtgttacgagtgagaacatgcagtgtttggttttctgtccttgcaatagtttgctgagaatgatgttttccagcttcatccatgtcccatgctgttttggtgactatggccttatagtatagcttgaaatcaggtagtatgatgcctccagatttgttctttttgcttaatcttgcattggctatgtgggctcttttctggttccatatgaattttagaattgtgtcttctaatgctgtgaagaatgatggtggtattctgaaggggattgcattgaatttgtagattgcttttggcagtgtggtcattttcacaatgttgattctacccatccatgagcttgggatgtgtttccatttgtttgtgtcatctgtgatttctttcagtagtgttttgcacttttctttgtagaggtctttcaactccttggttaggtatattc

SEQ ID NO: 8493 - DNA, 2651 bp, Homo sapiens
  SIMILAR (118)..(417): 541254mologous to Homo sapiens DRAK1,accession number AB011420,Smith-Waterman Score=206.
  misc_feature (1)...(2651): n = a,t,c or g
ggggagagcgggtgtttgaaggctccgcggaccggcactaggagccgggggcgggtccgtgaccctccggctgctcggagtgaacaggcggccaggaaagaagcgggcctgaacaccatgatccctttggagaagccaggcagcggcggctccgtccccaggcgccacctcaggctcgggccgggcagcggnggctcctgagcgggccgtgcgcgcangccgccgccgccccaggcccgcgggctgctgacagagatacgcgccgtggtgcgcaccgagcccttccaggaacggctacagcctgtgccccgggccggaagctgggcaggggggaaattttcaagtggtgagaaaatgtataaagaaaagattctgggaaagaatttgcttcaaagttcatgagaaaaaagaagaaaaaggccaagattgtcggatggaaataattcatgagattgctgtacttgaactagcacaagacaatccttgggtcattaatttacatgaagtttatgagactgcatcagaaatgatcttagttctggaatatgctgctgggggtgaaatctttgaccagtgtgttgcagacagagaagaagcctttaaagaaaaagatgttcaaagacttatgcgacagattttagaaggtgttcactttttacacactcgtgatgtagttcatcttgatttgaagcctcagaatattctgttgacaagtgaatctccattgggtgacattaagattgttgattttggcctttcaagaatattgaagaacagtgaagagctccgagaaattatgggtacccctgaatatgtggctcctgaaattcttagttatgatcctataagcatggcaacagatatgtggagcattggagtgttaacatatgtcatgcttacaggaatatcacctttcttaggcaatgataaacaagaaacattcttaaacatctcacagatgaatttaagttattctgaggaagaatttgatgttttgtctgagtcggctgttgatttcatcaggacacttttagttaagaaacctgaagatcgagccactgctgaagaatgtctaaagcacccctggttgacacagagcagtattcaagagccttctttcaggatggaaaaggcactagaagaagcaaatgccctccaagaaggtcattctgtgcctgaaattaattcggataccgacaaatcagaaaccgaggaatccattgtaaccgaagagttaattgtagttacttcatatactctaggacaatgcagacagtctgaaaaagagaaaatggagcaaaaggccatttccaaacgatttaaatttgaggaacctttgctacaagaaattccaggagaatttatctactgagcaatatttccctttagaacttcaagatttctacactgaaaatgttaatattatttatggacctctggccaaatggtacatgtactggaagtggataaccagtatcacttacacaaacaaaaataactttgtcaaatttgtggagttaggtggaagccagattttaaaagttgccaaccaggatatttaacaggtacagttacccgtttcaatgttatttttaagaagggagatgttggcacctttgaattctacatcctgtttctccagaatgagaatttgtgtacaaagatatttgtattcactttctttaaaaaatccaagtaaaagtgccaaaactacatttctgtaaatctcttgcattattcatatgtgtatctatatctgcataatgtttgttaatgtctactaaaattgctactttttcactttggatttgtttttggcaaaattttagtctaaacagacatctaaattttcgagacttagaataacattcactaaagtttgataatgtcttttttaaatattttcttactgctttatagtgacttgatttggtttctgttgtgtttttgcctaaatactagtaacatatcagtgaaaaaccctaattttttttctcttcaatgtcactagtaagagaggtggtaatttttcacctctgaaattattctgggtttaggtgtcagcttttgagctgcttccctcatcacaccacactcacatgcatctgttctctctcacactctatacccctgccacttcctggcacctccccccatgcttgtcatttaattttggccacttgtaggtatcagtgtgatctgatcaacactctggttaccttggtcagtgaaaagatgctactatattgcttttgtcccaaagtgagtaaaatcccctagagcagagagagagagagagagagagtgtcttcatgccaaccacagcctgtttctgctgagtttcttatcagccctcaagctatgctaggaaaagttataaaatgccaaaatatttataaacatttactttgtccataaaaaatttacattggatactctgtaagtaggaggtactttgtcccaaaaagatgtataagaatgtactaatagttttatttgattaggattgaacagttcagttgtatctatgccccacagtgaccagtaaagtccaattaaaatatggaaatgtaaaagtgtatgccgaataccttaaagtaactaattatccttacacacaaaaggctcagtgcattaaatatttgcctatc

SEQ ID NO: 8494 - DNA, 1278 bp, Homo sapiens
  SIMILAR (823)..(1128): 951254mologous to Homo sapiens NEDD4-like ubiquitin ligase 1,accession number AB048365,Smith-Waterman Score=521.
atggggccttcttctggcttgatgggtgatctggaaaagcagtgtgaagtttctaaggtgaacaaaacctccgtggccccccactctccaatggagaaggtcttatttcttggtgtgccatgggagacccctttcacacacttccagctgcccccaacactgtctggcagacagctaagaggagctctgctgaatctggaagctcagcatgcttctatattgtgggttggcttttggagactggactgtagccaagcaggtggtggtgccctggttacgggaagaggcacagtgaccccactcagcacagcacaagccctgctgggctcaggatggagtgaggctgaggtcatcatgggggctcctcacaaatgcccgggctcctggagctgggcgccttgggcccctggagccgcactgtggttctgggaggtgaacacatatccttttcctctgcaggtatcagtagggattcccggtgcttctgctggtcctgcatccggacacctgacccatcccagtgcagtccaggaaccaggaactcaattcgagcaattctgggcaccaagcctagtgcttacaagaattcctgagctcaaggagcagagccccatgtccaggggaatgggattcctgtgcatcatggagcagaaagttccactcttgggaatgggaaggaggcaaggagcggttacagcagagttggtgctggagcataattctgatgcagaagtgcagatcctgcctgcaagtaggaatggggaggatgtgtgcaaagacagggtgaatctgtaccagaacaggtttttaggcctggccgccatggcgtctccttctagaaactcccagagccgacgccggtgcaaggagccgctccgatacagctacaaccccgaccagttccacaacatggacctcaggggcggcccccacgatggcgtcaccattccccgctccaccagcgacactgacctggtcacctcggacagccgctccacgctcatggtcagcagctcctactattccatcgggcactctcaggacctggtcatccactgggacataaaggaggaagtggacgctggggactggattggcatgtacctcattgaatcagctgtcatggaaattgatgtgtttacccaaaagtcgagttataattgctggaaggccacaagagtcaacagattcaacaccgggtcatccgaggccaggccttctgccttcagtctgtgctctgcaacatttgcacattcagacacacaacaccggatttaa

SEQ ID NO: 8495 - DNA, 4176 bp, Homo sapiens
  SIMILAR (277)..(1662): 981254mologous to Homo sapiens NEDD4-like ubiquitin ligase 1,accession number AB048365,Smith-Waterman Score=2343.
caattcagttttgtgtccttgcccactgacgtgctggaaattgaggtgaaggacaagtttgccaagagccgccccatcatcaagcgcttcttgggaaagctgtcgatgcccgttcaaagactcctggagagacacgccataggggatagggtggtcagctacacacttggccgcaggcttccaacagatcatgtgagtggacagctgcaattccgatttgagatcacttcctccatccacccagggtatcctaacaccacaatgctctcttctgggagaaatgacatatttttcttcttaccagcagatgatgaggagatttccctgagtaccgagcctgagtcagcccaaattcaggacagccccatgaacaacctgatggaaagcggcagtggggaacctcggtctgaggcaccagagtcctctgagagctggaagccagagcagctgggtgagggcagtgtccccgatggtccagggaaccaaagcatagagctttccagaccagctgaggaagcagcagtcatcacggaggcaggagaccagggcatggtctctgtgggacctgaaggggctggggagctcctggcccaggtgcaaaaggacatccagcctgcccccagtgcagaagagctggccgagcagctggacctgggtgaggaggcatcagcactgctgctggaagacggtgaagccccagccagcaccaaggaggagcccttggaggaggaagcaacgacccagagccgggctggaagggaagaagaggagaaggagcaggaggaggagggagatgtgtctaccctggagcagggagagggcaggctgcagctgcgggcctcggtgaagagaaaaagcaggccctgctccttgcctgtgtccgagctggagacggtgatcgcgtcagcctgcggggaccccgagaccccgcggacacactacatccgcatccacaccctgctgcacagcatgccctccgcccagggcggcagcgcggcagaggaggaggacggcgcggaggaggagtccaccctcaaggactcctcggagaaggatgggctcagcgaggtggacacggtggccgctgacccgtctgccctggaagaggacagagaagagcccgagggggctactccaggcacggcgcaccctggccactccgggggccacttccccagcctggccaatggcgcggcccaggatggcgacacgcaccccagcaccgggagcgagagcgactccagccccaggcaaggcggggaccacagttgcgagggctgtgacgcgtcctgctgcagcccctcgtgctacagctcctcgtgctacagcacgtcctgctacagcagctcgtgctacagcgcctcgtgctacagcccctcctgctacaacggcaacaggttcgccagccacacgcgcttctcctccgtggacagcgccaagatctccgagagcacggtcttctcctcgcaagacgacgaggaggaggagaacagcgcgttcgagtcggtacccgactccatgcagagccctgagctggacccggagtccacgaacggcgctgggccgtggcaagacgagctggccgcccctagcgggcacgtggaaagaagcccggaaggtctggaatcccccgtggcaggtccaagcaatcggagagaaggcttcacaacagcagatgcttcaagaaagcagggctttaacatgacctgcctgatacgtgattgtgtgggtgacctctgcttccataaaaatccctattgctccttcgccttgacttctaagattgcaaattcctttactgtagaaactgcattagacggctgggaatttactttcttggctcgccagctccttgacctgtcttggtaccatctaagagttcattcccctcaaaaatctgaaaaacagcctttcggcagccctgtgatgaaacctatccaatgcttagttttacagtcatgcttttttgatgatgttgccacggcagtgaatgaatctgaatgtattgactatcttgtccgtgaatgtcctatactccataattcccagccagtaagccagcttccttccctgaggcctgaacatcatcactacccaacaatcgatgagcctcttccaccaaactgggaagctcgaattgacagccacgggcgggtcttttatgtggaccacgtgaaccgcacaaccacctggcagcgtccgacggcagcagccaccccggatggcatgcggagatcggggtccatccagcagatggagcaactcaacaggcggtatcaaaacattcagcgaaccattgcaacagagaggtccgaagaagattctggcagccaaagctgcgagcaagccccagcaggaggaggcggaggtggagggagtgactcagaagccgaatcttcccagtccagcttaggtattggaggaggggtccccacaacctgtgatggctttcaggggctgtgtgacagagggctacaagcctcccaccctgcctcatggggagcaatgtgccccagggtgaagagagtggaagtccagggtggaggacagaggcatgcctggtgcccgcaagggaaagcagacagaatgagcttcccaccaggaaacttaggagaagtgatcacagtgaaggaaacaccaccaccctggcatggggatctggagacaggaaagcagatgaattctggggatggagctgagtttgctacagtgcttgtggagcaaggcaactttagtgcctaccgagtcttcaccagtagcacctgcttaaagcacatgattctgaaagtccgacgggatgctcgcaattttgaacgctaccagcacaaccgggacttggtgaatttcatcaacatgttcgcagacactcggctggaactgccccggggctgggagatcaaaacggaccagcagggaaagtcttttttcgtggaccacaacagtcgagctaccactttcattgacccccgaatccctcttcagaacggtcgtcttcccaatcatctaactcaccgacagcacctccagaggctccgaagttacagcgctggagagctgtgtgattctcagagtctgtggggcttgattccacgtcttcaggaccgcataactaagagacccattaactacatagagctaagaggagcaggaaaggcaggacggaaggatggcagaatggagctctctcctccctttctggttctggttctgagtgaggaccaccccattctcacaccattctttgatcaattaaactctgcctcagaagtttctagaaacagaggagcctctttactggccaggccaggacacagcttagtagctgctattcgaagccaacatcaacatgagtcattgccactggcatataatgacaagattgtggcatttcttcgccagccaaacatttttgaaatgctgcaagagcgtcagccaagcttagcaagaaaccacacactcagggagaaaatccattacattcggactgagggtaatcacgggcttgagaagttgtcctgtgatgcggatctggtcattttgctgagtctctttgaagaagagattatgtcctacgtccccctgcaggctgccttccaccctgggtatagcttctctccccgatgttcaccctgttcttcacctcagaactccccagcaaatgacgtcctgttttacctcactgagaagttgaagccatccagcagaaacttcttcaaaggcctgcccacaaggctagcaaacctgtacacatcttctctgtcatctctggaggtcacgaaaggaggtttacagagagccagtgcaagagccccttccccctaccgaagagactttgaggccaagctccgcaatttctacagaaaactggaagccaaaggatttggtcagggtccggggaaaattaagctcattattcgccgggatcatttgttggagggaaccttcaatcaggtgatggcctattcgcggaaagagctccagcgaaacaagctctacgtcacctttgttggagaggagggcctggactacagtggcccctcgcgggagttcttcttccttctgtctcaggagctcttcaacccttactatggactctttgagtactcggcaaatgatacttacacggtgcagatcagccccatgtccgcatttgtagaaaaccatcttgagtggtaa

SEQ ID NO: 8496 - DNA, 5118 bp, Homo sapiens
  SIMILAR (3915)..(4202): 461254mologous to Homo sapiens NEDD4-like ubiquitin ligase 1,accession number AB048365,Smith-Waterman Score=133.
ccccgaccagttccacaacatggacctcaggggcggcccccacgatggcgtcaccattccccgctccaccagcgacactgacctggtcacctcggacagccgctccacgctcatggtcagcagctcctactattccatcgggcactctcaggacctggtcatccactgggacataaaggaggaagtggacgctggggactggattggcatgtacctcattgatgaggtcttgtccgaaaactttctggactataaaaaccgtggagtcaatggttctcatcggggccagatcatctggaagatcgatgccagctcgtactttgtggaacctgaaactaagatctgcttcaaatactaccatggagtgagtggggccctgcgagcaaccacccccagtgtcacggtcaaaaactcggcagctcctatttttaaaagcattggtgctgatgagaccgtccaaggacaaggaagtcggaggctgatcagcttctctctctcagatttccaagccatggggttgaagaaagggatgtttttcaacccagacccttatctgaagatttccattcagcctgggaaacacagcatcttccccgccctccctcaccatggacaggagaggagatccaagatcataggcaacaccgtgaaccccatctggcaggccgagcaattcagttttgtgtccttgcccactgacgtgctggaaattgaggtgaaggacaagtttgccaagagccgccccatcatcaagcgcttcttgggaaagctgtcgatgcccgttcaaagactcctggagagacacgccataggggatagggtggtcagctacacacttggccgcaggcttccaacagatcatgtgagtggacagctgcaattccgatttgagatcacttcctccatccacccagatgatgaggagatttccctgagtaccgagcctgagtcagcccaaattcaggacagccccatgaacaacctgatggaaagcggcagtggggaacctcggtctgaggcaccagagtcctctgagagctggaagccagagcagctgggtgagggcagtgtccccgatcgtccagggaaccaaagcatagagctttccagaccagctgaggaagcagcagtcatcacggaggcaggagaccagggcatggtctctgtgggacctgaaggggctggggagctcctggcccaggtgcaaaaggacatccagcctgcccccagtgcagaagagctggccgagcagctggacctgggtgaggaggcatcagcactgctgctggaagacggtgaagccccagccagcaccaaggaggagcccttggaggaggaagcaacgacccagagccgggctggaagggaagaagaggagaaggagcaggaggaggagggagatgtgtccaccctggagcagggagagggcaggctgcagctgcgggcctcggtgaagagaaaaagcaggccctgctccttgcctgtgtccgagctggagacggtgatcgcgtcagcctgcggggaccccgagaccccgcggacacactacatccgcatccacaccctgctgcacagcatgccctccgcccagggcggcagcgcggcagaggaggaggacggcgcggaggaggagtccaccctcaaggactcctcggagaaggatgggctcagcgaggtggacacggtggccgctgacccgtctgccctggaagaggacagagaagagcccgagggggctactccaggcacggcgcaccctggccactccgggggccacttccccagcctggccaatggcgcggcccaggatggcgacacgcaccccagcaccgggagcgagagcgactccagccccaggcaaggcggggaccacagttgcgagggctgtgacgcgtcctgctgcagcccctcgtgctacagctcctcgtgctacagcacgtcctgctacagcagctcgtgctacagcgcctcgtgctacagcccctcctgctacaacggcaacaggttcgccagccacacgcgcttctcctccgtggacagcgccaagatctccgagagcacggtcttctcctcgcaagacgacgaggaggaggagaacagcgcgttcgagtcggtacccgactccatgcagagccctgagctggacccggagtccacgaacggcgctgggccgtggcaagacgagctggccgcccctagcgggcacgtggaaagaagcccggaaggtctggaatcccccgtggcaggtccaagcaatcggagagaaggtgaatgtcctatactccataattcccagccagtaagccagcttccttccctgaggcctgaacatcatcactacccaacaatcgatgagcctcttccaccaaactgggaagctcgaattgacagccacgggcgggtcttttatgtggaccacgtgaaccgcacaaccacctggcagcgtccgacggcagcagccaccccggatggcatgcggagatcggggtccatccagcagatggagcaactcaacaggcggtatcaaaacattcagcgaaccattgcaacagagaggtccgaagaagattctggcagccaaagctgcgagcaagccccagcaggaggaggcggaggtggagggagtgactcagaagccgaatcttcccagtccagcttagatctaaggagagaggggtcactttctccagtgaactcacaaaaaatcaccttgctgctgcagtccccagcggtcaagttcatcaccaaccccgagttcttcactgtgctacatgccaattatagtgcctaccgagtcttcaccagtagcacctgcttaaagcacatgattctgaaagtccgacgggatgctcgcaattttgaacgctaccagcacaaccgggacttggtgaatttcatcaacatgttcgcagacactcggctggaactgccccggggctgggagatcaaaacggaccagcagggaaagtcttttttcgtggaccacaacagtcgagctaccactttcattgacccccgaatccctcttcagaacggtcgtcttcccaatcatctaactcaccgacagcacctccagaggctccgaagttacagcgctggagaggcctcagaagtttctagaaacagaggagcctctttactggccaggccaggacacagcttagtagctgctattcgaagccaacatcaacatgagtcattgccactggcatataatgacaagattgtggcatttcttcgccagccaaacatttttgaaatgctgcaagagcgtcagccaagcttagcaagaaaccacacactcagggagaaaatccattacattcggactgagggtaatcacgggcttgagaagttgtcctgtgatgcggatctggtcattttgctgagtctctttgaagaagagattatgtcctacgtccccctgcaggctgccttccaccctgggtatagcttctctccccgctgttcaccctgttcttcacctcagaactccccaggtttacagagagccagtgcaagagccccttccccctaccgaagagactttgaggccaagctccgcaatttctacagaaaactggaagccaaaggatttggtcagggtccggggaaaattaagctcattattcgccgggatcatttgttggagggaaccttcaatcaggtgatggcctattcgcggaaagagctccagcgaaacaagctctacgtcacctttgttggagaggagggcctggactacagtggcccctcgcgggagttcttcttccttctgtctcaggagctcttcaacccttactatggactctttgagtactcggcaaatgatacttacacggtgcagatcagccccatgtccgcatttgtagaaaaccatcttgagtggttcaggtttagcggtcgcatcctggggtctggctctgatccatcagtaccttcttgacgctttcttcacggaggcccttctacaaggcactcctggagactgccctgtggattttgagtgacctgggaatatttggatgaggaattccaccagagtttgcagtggatgaaggacaacaacatcacagacatcttaggacctcactttcactgttaatgaagaggtttttgggacaggtcacggaaagggagtttgaagtctgggaggagccaacacacaggtgacgggagaaaaacaagaaggagtacatcgagcgcatggtgaagtggcgggtggagcgcggcgtggtacagcagaccgaggcgctggtgcgcggcttctacgaggttgtagactcgaggctggtgtccgtgtttgatgccagggagctggagctggtgatagctggcaccgcggaaatcgacctaaatgactggcggaataacactgagtaccggggaggttaccacgatgggcatcttgtgatccgctggttctgggctgcggtggagcgcttcaataatgagcagaggctgagattactgcagtttgtcacgggaacatccagcgtgccctacgaaggcttcgcagccctccgtgggagcaatgggcttcggcgcttctgcatagagaaatgggggaaaattacttctctccccagcgtgtggggcagtgagcaatttccacccatgagaactggagatgggacactaggacccggaggcagcatctggaaagagcttaaggaggtggcaaagtttctttactttgaacaagagctcaaaggaggacagaggaaaggctcagaaggaaagagaagggcagaagctagggcacacacatgcttcaaccgactggatcttccaccgtatccctcgtactccatgttgtatgaaaagctgttaacagcagtagaggaaaccagcacctttggacttgaggatcatggtgttcaggcccgcttctttcctggccgcctgttcactccgagcagccggagggtcacggaccgcccccggctcctagtgccggtccgcggagccttcaaacacccgctctccccagcgcggcgctcggactgcggcaggcagactaccgctcagggggagaaggtgcagctttcgggacggcccggaggctggaggcgactcacagcaccaccctttggccaggacagcctactgcgttag

SEQ ID NO: 8497 - DNA, 432 bp, Homo sapiens
  SIMILAR (297)..(121): 901254mologous to Homo sapiens My016 protein,accession number AF060511,Smith-Waterman Score=275.
  misc_feature (1)...(432): n = a,t,c or g
aaacgttgcaagcacgggtaaacttgggcccccccaaggatcctttaaaacggcccccccnnnnnnnnnnnnnnnnnnccagatttataatttaatggctgtgcagatcccagtccctcattcctgccgctcacgtgcccactggtctggggtcagggttttctgttcaaaggcatggatgtgcgggagctcttctgctaggcacgcgttcaccagcctgtgtctctgaagcagcggtttcccctcgaacttggccgacaccaccaggactcggaagcacatgctccgcctccaggtcccgctgcagcttctcgcggaggtattcggcgctgagttccatggcggcagtccagctggaacggcagcccagcagggacacaaccccagctcggggcgccggccacgctacctagatgccttacaggagccact

SEQ ID NO: 8498 - DNA, 578 bp, Homo sapiens
  SIMILAR (514)..(576): 1001254mologous to Homo sapiens DC49,accession number AF271775,Smith-Waterman Score=105.
gcggaagtactgcgttgacgtacgccttagtaaggcggaagtgagttttccagcggaagtggctcctgtaaggcagcaaaggtagcgtggccggcgcccgagcttgggttgtgtccctgctgggctgccgttccaggtggactgccgccatggaacttcagcgccgaatacctccgcgagaagctgcagcgggaccttggaggcggagcatgtggaggtggaggacacgaccctcaaccgttgctcctgtagcttccgagtcctggtggtgtcggccaagttcgaggggaaaccgctgctttcagagacacagcttggatcctagcatgactatacattgtgacatggtcattacatatggattagaccaactggagaattgccagacttgtggtaccaattatatcatctcagtcttgaatttactcacgctgattgttgaacagataaatacgaaactgccatcatcatttgtagaaaaactgtttataccatcatctaaactactattctttgcgttatcataaagaaaaagaggttgttgctgtagcccatgctgtttatcaagcaatgctcag

SEQ ID NO: 8499 - DNA, 1359 bp, Homo sapiens
  SIMILAR (506)..(571): 1001254mologous to Homo sapiens DC49,accession number AF271775,Smith-Waterman Score=120.
  misc_feature (1)...(1359): n = a,t,c or g
ggagtcccagagtccccccaactgaggancctaagttatcctagcacangcgnggaattcgccggcgcccgagctggggttgtgtccctgctgggctgccgttctagctggactgccgccatggaactcagcgccgaatacctccgcgagaagctgcagcgggacctggaggcggagcatgtggtgagttgagccgccggacaaggggaaaagagctcggggggcgggttcggcaccattcatattcttccgctcggtaggaggtggaggacacgaccctcaaccgttgctcctgtagcttccgagtcctggtggagtcggccaagttcgaggggaaaccgctgcttcagagacacaggttctgtacagagcaatgagacgtgtgacggctgcgaaccaggcgtttttttctgaggctgaggtgacagctgctaaagagcgtggcatagtcttgcccctcaggtgtgtatcctagcacagactatacattgtgacatgggcatgtacatatggattagaccaactggagaattgccagacttgtggtaccaattatatcatctcagtcttgacatttactcacgctgattgttgaacagataaatacgaaactgccatcatcatttgtagaaaaactggttataccatcatctaaactactattctggcgttatcataaggaaaaagaggttgttgctgtagccccatgctgttttatcaaggccaatgcttcagcttggaaggaatattccctgttttgggaggactgcctattaagtttaatattgggggaggaaatggacttgtggccccttaaacaaccttcctggcacagtctgcaacttccctgaggcctgttctgaaataaaacatgaggcttttaagaatcatgtgttcaatgtagacaatgcaaaatttgtagttaaatttgacctcaattgactacaaaatttgtagttaaatttgactacaattggaaatgccaaaaactcactaataggggtgagtctttaattgtaatgactttgttttatccacgagttaagcctttttctcattcacatatttatgtatttcactgtcatgtcaagatgtctgcagaatcactgtgtgtaacaaacacgccatatttaaagacatgcctggataaataaaattgggtaggaatgttttcttggcattatatttaacttttcttcgtctttttccttggacaaatcttgataagtttttttatattagttttattttctagaaaatgtcttatgaatttctcctatttgctctagcatggcttatagaaaatggtcagtggtttcctacagctcaaatttggtggtagttggtttaaaatgcggg

SEQ ID NO: 8500 - DNA, 3472 bp, Homo sapiens
  SIMILAR (606)..(827): 471254mologous to Homo sapiens synaptojanin 2B,accession number AF039945,Smith-Waterman Score=99.
tcatgtttttgccagtgggtcaaacacctgcagtgctgtcctcttttcttggtcactgattgtcacccagtgacctaaggttttgtgttcatgatctggtggcagctctgccttggcagctgaagcgccagctgacactgggtctatgggatctcttttggggctcctggttcctgagtccaaagggtctgagctcttagaaagccaagtgttattcaacagtttagggtggtgaagaaggttccagaaggggtcctgataatcaccaagaagtggggctgcctctggcttcatcgctttggtgccatcgctgtcggggcttgtagcagatgaagtgctgagaaagtccccttgtgggaagacggtgcccgcggcaggtgggtgcccagaggggctgtcactgctattgtaagtgaggccctggagaagctggctgttgctctgcaggacctgcaggtggaaggctgcggggggctgacttcttcctcctcgggggtacgatgggtttattgggatgtaaccccattttaagtcgaggagcatctttcctgtccttctcaaggttggcttcttgatggcaggaactctgggtgggggccgacggggaaggagtgggggcgcctgtggggtctctggtttggctgcccccggtgtgggctctggttcagaggatgcttcaaggtcccttggggccacggcacttagggcttcttcggaggcacctgtgcccgtgcccagcatcacgcccaccccgctgcctttgcaggcacatggtgcttctgaaggagcagtacgggcagcaggtggtcgtgaaccttctgcagagccacatgcatacctgcagagccgcaggcatacctgcagagccatgtccccacctgcagagctgcgtgcataccagcagaggcatgtcgacacctgcagagccgtgtccccacctggcagacgctcagtgaatgtttgggatgaataaatggcttcatctggggttactgatttacgatgagtctgaagccctggctgttcccagaacagcggaacggagcctctgatctggacaaaagatgacactccatcgtccatgtaaatcatcacagggagccagtctgctcctggtccggtcccatcatttgtttgccagacgatgaccgcacagccgcctgtgtgcacgctccacttccaaatggtcagcgggcctggctggtggatcctgtttcctctgcaggggccccaggccagtgtgacctgctctgtctccacgaagttggacacatggccgtcgtcgttcacgccacgggtgtggaagcgagtgcctgtgcgctcacagctaacgcgagagacgaggcaggccttggcctgcttgtgggaggcatacacggtgcggatggtgaccaccccgcagatgatcttcagcagccagtcacagcagctcacctggtgctgcctcaagggcacgtgcaacagctggttccagaagaaggagttcccccattcagagctgtcatccccctgcttctgcgtgcggacagtcaggtcaaagcgagacccatcgtttggccatgagaaatagaacacccccgagctgaggattttcttcaaagctatgaggcgttcctcctccttggcctcttcctgaagagggtaaaagtcagtggcagtgattttgtagatttcagcatctggaattctgcccacagatgtgcagcctgtcaccaacaccaggaagctcagagacgtgccaccgtccacatccaggacactgagagccgagtgactgtctgcaaaagttaccagcatctgcccttggttgatcctgacaagaacaattgtcccataactccccaaggtctgcatgagctcagtacgcaggtcctctggaaactcgtttttctcttctaaggtcggtgattgaaggtttactacaacagtggcatccagggggccctggaaggaggacacttcctggaaaaccctctcccgagcacccacatcgacttcctgaacttccacctccacgatcgccagcacaggtctgtgatcagacgcttgtagctccgcacgaccataatactgcagggcaccaggagaccaggtgtgtctgactttggtgtcaacatctagatcactgtctgttttatcaaagggatgtttcttcctccaccacagcaccctgtctgtccaggcgggggtgcggcatttgtcgcttgtatcgtaggcggctgagccaacgtcatacttgtaggtgggtccaaagttaatggctccttcgtgaaagtccttaaaaatcaggacgcggaagcccagggcagatgactctccaggcaccagcagatatagctctgcacacaccaggacgcggaagcccagggcagatgactctccaggcaccagcagatacagcattgcacacaccaggatgtggaagcccagggcagatgactccaggcaccagcaggtacagcacaggatgcagaagcccagggcagatgactctccatgcacccgcagatacagcattgcacacaccaggacgcggaagcccagggcagatgactctccaggcaccagcagatatagcactgcacacaccaggacgcggaagcccagggcagatgactctccaggcaccagcagatacagcactgcacacaccaggacgcagaagcccagggcagatgactctacaggcaccagcaggtacagcactcctctggcttccaggagacaccggattgctgcttctgcctcctgggcattggtggttttgatctgcttgacattataaggtttacttattccagtccgagccttgggaggttgctgaggtgctcctggtagaagtcttgccgtctgcaaaattgaatactgcccatgggtgccggaggagatggacgcatctgaagccgactttttcaccattaaaccggttggaggggggggtctctgcgggggttgaggtggccgaggccggttggggaccgacagagacctgctcggagaacggtggcggaactccccgacggcttccagctcccgcttgagctccaccaggtccgcgtcatctttgtacgttggatgctgcttctttttggtgagagcaggtgacttgctgggaggagccagtgctgtggggccggggacatcagagaggtcgtctcccccgagttcactgtccgagaccccaggctgattgaattcatccaccaagtagtcttcatcgtcttcaagaatatccccttctgactcatagtccaaacttgtgaagtcaaagttttcctccagcaaacaggagttggcagtgggagacacgggggccatgctgtctcgtttccgaatgatctcctctcgcaaacctttcagccagtccttggtcttcggtctaatcttcactgctctgcctttcacctggaacagagcccagcccttgcggacagttgatccacagcagctgctgtcattgtcttccccattc

SEQ ID NO: 8501 - DNA, 2432 bp, Homo sapiens
  SIMILAR (421)..(1719): 271254mologous to Trypanosoma cruzi neuraminidase,accession number M61732,Smith-Waterman Score=223.
ctattgggtgaagatctgagatgttgctaaacctctcataatccacatggcagtctcacaagtaattatcctgaaatgtctacaggtgtagccgttgaggaacaccggtctatgccgcgggaaagggcaccccgggctcgagtcgtcgggcagccgacgccggcgagacggcagggcgtcggagcggaggcaaacccagcgcgaacgagggaagacgttaccttgttcatcccattccccatggtggctgaaggcgaacgctagcgccccggccgtgtggtcgcaggcgcacaggacgcagaagcccagggcagatgactctccaggcaccagcagatacagcactgcacacaccaggacgcggaagcccagggcagatgactctccaggcacccgcagatacagcattgcagacaccaggacgcagaagcccagggcagatgactccaggcaccagcagatacagcacaggacgcggaagcccagggcagatgactccaggcaccagcagatacagcacagaacgcagaagcccagggcagatgactctccagacaccagcagatacagcacaggacgcagaagcccagggaagatgactccaggcaccagcagatacagcattgcacacaccaggacgcagaagcccagggcagatgactctccaggcaccagcagatacagcactgcacacaccaggacacagaagccgagggaagatgactctccaggcaccagcagatacagcattgcacacaccaggacggggaagcccagggcagatgactctccaggcaccagcagatacagcactgcacacaccagaacgcagcgagccagggcagatgactctccaggcgaccagcagatacagcattgcacacaccaggacgcggaagcccagcgcagatgactctccaggcaccagcagatacagcactgcacacaccaggacgcagaagcccagggaagatgactccaggcaccagcagatacagcattgcacacaccaggacgcggaagcccagggcagatgactctccaggcaccagcagatacagcactgcacacaccagaacgcagaagcccagggcagatgactctccaggcaccagcaggtacagcactgcacacacgaggatgcggaagcccagggcagatgactccaggcaccagcaggtacagcacaggatgcagaagcccagggcagatgactctccaggcacccgcagatacagcattgcacacaccaggacgcggaagcccagggcagatgactctccaggcaccagcagatatagcactgcacacaccaggacgcggaagcccagggcagatgactctccaggcaccagcagatacagcactgcacacaccaggatacggaagcccagggcagatgactctccaggcaccagcaggtacagcactgcacacaccaggacgcagaagcccagggcagatgactccaggcaccagcagatacagcacaggatgcagaagcccagggcagatgactctccaggcacccgcagatacagcattgcacacaccaggacgcggaagcccagggcagatgactctccaggcaccagcagatatagcactgcacacaccaggacgcggaagcccagggcagatgactctccaggcaccagcagatacagcactgcacacaccaggacgcagaagcccagggcagatgactctccaggcaccagcaggtacagcaccagagcagggtgctgccctccagggctggccagttctgcatgggcagggctgaggctcaagacacgcaaaggctggacgtggtgagtgccacgggagctcagggcagaaagaacgtccacggggtgggagagtggagagaaatgagaacagcggctcttctgtttctcctcaacaccaggagggacacccctttcgttcccacgcccagaactttcaccatgcatttcatttgctttcccatgggaaaagaaggccagagctagctggcgatgcccctgctcagtgatgaatgctgaaacttgacgctggcagtagctgcggtgataactaccccctttaacttcccattcaaacttcctattgcagactcgaaggccccccccccccaccaagcagccataacccacggaatctccctggactagatgtcctcttccatcaccaccaccaccatgatgcttaagctttctgctagtcagccagccacacacggtgctgtcccgacccggaacaagaaacactctttccctccgtggatgctctccacggatattctccttggttgtttctaccaacctaagcctgtcttctctttcaaacgccttacagaattgcatctcctctgaaagcatttcagacttgctattcacgtcacctagtctcccctttccagtgtccacagcacctgtcatctccat

SEQ ID NO: 8502 - DNA, 523 bp, Homo sapiens
  SIMILAR (245)..(385): 631254mologous to Homo sapiens Human secreted protein, SEQ ID NO: 6613,accession number G02532,Smith-Waterman Score=165.
ctgatacggtgagagaaaggacaggatatactccaaaacctcttctggcagctccgacatggacctattatgtctagtctcctcagcctccaatactgggtggggctcctcatcttgatccattgtcccttccagcacagtttcttcctggtccacagccatgaaactgtcatcttcactgtccgaggagctggccatgacattccactcaacagaaaatatagtagttcttggttgggtgcagtggctcacacctgtagtcccagcactttgggattctgaggccggcagatcaccttaggtcaggagttcgagaccagcgtgggcaacatggcgaaaccccatctctggcccagcccgctccacgctctcgggttcgctccgctggcgacggtaatgagggagccagggacagggccagagcagaggcgctctgcctcaggccgcgacagccgtgctcggggctcctcacagctggcgggaccccgagccgcccggagccgccatcttcctccacacgaaa

SEQ ID NO: 8503 - DNA, 3110 bp, Homo sapiens
  SIMILAR (546)..(1061): 311254mologous to Physarum polycephalum actin-fragmin kinase,accession number U64722,Smith-Waterman Score=212.
  misc_feature (1)...(3110): n = a,t,c or g
ggcggcggcgtttgagtggaggaagatggcggctccgggcggctcggggtcccgccagctgtgaggagccccgagcacggctgtcgcggcctgaggcagagcgcctctgctctggccctgtccctggctccctcattaccgtcgccagcggagcgaacccgagagcgtggagcgggctgggccagctgttgagtggaatgtcatggccagctcctcggacagtgaagatgacagtttcatggctgtggaccaggaagaaactgtgctggaagggacaatggatcaagatgaggagccccacccagtattggaggctgaggagactagacataataggtccatgtcggagctgccagaagaggttttggagtatatcctgtcctttctctcaccgtatcaggaacacaaaactgcggcccttgtctgcaaacagtggtatcgacttatcaaagggtgtagcccatcagtgttatcatggtttcatgaaggctgtccaggaaggaaacattcagtgggagagccgtacctatccttatcctggaaccccaatcactcagcgcttctcgcacagtgcatgctattatgatgctaatcagtctatgtatgtgtttggaggctgtacccagagcagctgcaatgctgctttcaatgacctctggagacttgacctaaacagcaaagagtggatccgacctttggcttcagggtcctatccttcccccaaagctggagcaactctggtcgtgtacaaggacttgctagtgctgtttggtggctggacgcggccaagcccttatcccctacaccagccagagagattctttgatgaaatacacacttactcaccctctaaaaattggtggaactgcattgtgacaacccatgggccacctcccatggctggccactcctcctgtgtgatagatgataaaatgattgtctttggtggctctttaggatcccggcaaatgagcaatgatgtctgggtccttgaccttgagcagtgggcgtggtccaagccgaacatctctggccccagtcctcatcctcgaggtggccaatctcagctattcaaggatgcttggttgttgcacatgcattctggtccttgggcctggcagccactcaaggtagaaaatgaagagcatggggccccagaactgtggtgccatccagcttgccgggtgggacagtgtgtggtggtcttcagccaggctcctagtgggagagccccactcagccccagtttgaactctcgcccatcacctatcagtgccactcctccagctctcgttcctgaaacccgagagtaccgctctcagtctccagtaagaagcatggatgaagctccttgtgttaacggccgctggggaacactgagacccagggctcaaaggcagactccttcaggttcccgggaagggagcctttccccagccagaggagacggctctcctatcctcaatggtgggagtttgtctccaggaacggcagctgtgggtggctcttctttggacagtcctgtacaggccatatctccaagtactccatctgctcctgaaggatacgacctgaaaataggactttctttggccccccgacgaggatcactaccagatcagaaagatctgagattaggatccatagatctgaattgggatctgaaacccgcttccagtagtaatcccatggatggcatggacaataggacagttgggggaagtatgagacaccctcctgaacagacaaatggtgtgcataccccacctcacgtggccagtgcccttgcaggggccgtctccccaggtgccctgcgtcggagtctggaagccatcaaagcgatgtcctccaaaggcccctcggcttctggcaggcactaagtcctcctcttgggtcttctccagggctctcctgggggagccaggagttttnaggcagttggagaaacagtggcccattcccttcgcccaggggcctgcccaaggagatggacattccttacctcccattgctcgccgcctggggccaccaccctccacagtccctaaatgttgggcaaacccctattaccagagtatggaactgcaagcccatggcagatgttacgtgcttggacatttaaaggacaccaaggagaaggggcgggtcaaatggaaagtatttaatagcagttctgtggttggacctcctgaaaccagccctgcatacccgtggtacaaggcaggggtgaaccccatccatatttggaggacctccatggaccaagaaaccagaatgtgaagtacctatcccaaaaaccaaaccgcccttgtactttgtacgagccaaagagataatgtgttctaaacccctttccttttctgtggcttttaatttggaattttccagtgtgtaagcatttggactgagaattgggaaaacaaaattactcccagaagccaaaactctttaattcccaaccgaagtcactccaggctgggatcaaatctccattaagaaaaaaaattatatataaatatatatatatatattatatagccaactctgttgacaaaaaaagggagagatttccatcctggttcagataaagttgtgtgctgtgttttaacaggggctgggctgcctttttctaccttgctggtaactagaccaagaagttagagaatagacttaacatccagtaacttcccaaaagaaactgaaagagccccctgtaaatctttatgtggccttcttggagttaaaaaatgaaagggcatatgtaagttgcaaaggtggagggttttagaactctcatgcttcaggtgctgtcggggtaaaagtaactgtttttccccttctcttaaaaccacagaggacctgtgacagctctgcagaaatgccagtgcctggccccctcttgccttttatggctgaggaaagttacccaacaaaggattttattccacatttgtgtgccgggtcattgtcaaataatgtttaggcatccaacatctgaccgcctagtagtgtccattggtctttggagtgcttcctgtgtgtcccagccaactttttgtgtctgattgtgtaaatttctgccaatcaatcatatttggtggctagtggcc

SEQ ID NO: 8504 - DNA, 397 bp, Homo sapiens
  SIMILAR (88)..(285): 1001254mologous to Homo sapiens Membrane-bound protein PRO1310,accession number Y66645,Smith-Waterman Score=347.
tttcgtccccccaacacaatgtgacaagcaccgtttggccctaagtgtttcaacgtgaacctgtgcttctctctgtctttgagtaaaggtgagcccgagttccactacatcgcgggggcccacggcaatgaggtgctgggccgggagctgctgctgctgctggtgcagttcgtgtgtcaggagtacttggctcggaatgcgcgcatcgtccacctggtggaggagacgcggattcacgtcctcccctccctcaaccccgatggctacgagaaggcctacgaaggggtaatggccctggcccatctcacccaataggacatgggcagcgaggccccagctccagagtatgtctggccctggggctatgcaaaattccaccttccgagcatgtattgcg

SEQ ID NO: 8505 - DNA, 2552 bp, Homo sapiens
  SIMILAR (97)..(1407): 861254mologous to Homo sapiens Membrane-bound protein PRO1310,accession number Y66645,Smith-Waterman Score=1962.
atgatagagcgggtgctggaaggaaagtgggcattatccagggcagagggattgcatcgtcatcaatgcttagagtttttgattcaccttgtttttcagttgatgaaagttgtgaatgaaatgtgtcccaatatcaccagaatttacaacattggaaaaagccaccagggcctgaagctgtatgctgtggagatctcagatcaccctggggagcatgaagtcggtgagcccgagttccactacatcgcgggggcccacggcaatgaggtgctgggccgggagctgctgctgctgctggtgcagttcgtgtgtcaggagtacttggcccggaatgcgcgcatcgtccacctggtggaggagacgcggattcacgtcctcccctccctcaaccccgatggctacgagaaggcctacgaagggggctcggagctgggaggctggtccctgggacgctggacccacgatggaattgacatcaacaacaactttcctgatttaaacacgctgctctgggaggcagaggatcgacagaatgtccccaggaaagttcccaatcactatattgcaatccctgagtggtttctgtcggaaaatgccacggtggctgccgagaccagagcagtcatagcctggatggaaaaaatcccttttgtgctgggcggcaacctgcagggcggcgagctggtggtggcgtacccctacgacctggtgcggtccccctggaagacgcaggaacacacccccacccccgacgaccacgtgttccgctggctggcctactcctatgcctccacacaccgcctcatgacagacgcccggaggagggtgtgccacacggaggacttccaaaaggaggagggcactgtcaatggggcctcctggcacaccgtcgctggaagtctgaacgatttcagctaccttcatacaaactgcttcgaactgtccatctacgtgggctgtgataaatacccacatgagagccagctgcccgaggagtgggagaataaccgggaatctctgatcgtgttcatggagcaggttcatcgtggcattaaaggcttggtgagagattcacatggaaaaggaatcccaaacgccattatctccgtagaaggcattaaccatgacatccgaacagccaactgatggggattactggcgcctcctgaacccctggagagtatgtggtcacagcaaaggccggaaggtttcactgcatccacccaagaacctgtatggttggctatgacatgggggcccacaaggtttgaacttcacacttagcaaaaccaacattggccaggatccggagagatcattggagaagttttgggaaagcagccccgtcagccttgcccagcccaggcggctgaaagctgcgggggccggaagagacgacagcgtgggtgaccctccctgggcccttgagactcgtctggggacccatgcaaattaaaccaacctgggtagtagctccatagtggactcactcactgtttgtttcctctgtaattcaagaagttgcctgggaagagagggtgcattgtgaaggcaggtcccaaaagggaaggctggaggctgaggctgttttcttttctttgttcccatttatccaaataacttggacagagcagcagagaaaagctgatgggagtgagagaactcagcaagccaacctgggaatcagagagagaaggagaaggaggggagcctgtccgttcagagcctctggctgcatagaaaaggattctggtgcttcccctgtttgcgtggcagcaagggttccacgtgcatttgcaatttgcacagctaaaattgcagcatttccccagctgggctgtcccaaatgttaccatttgagatgctcccaggcgtcctaagagaatccaccctctctggccctgggacattgcaagctgctacaaataaattctgtgttcttttgacaatagcgtcattgccaagtgcacatcagtgaggcctcttgaatctgtttagtctccttttttcaacaaagggagtgtgttcagaaaaggagagagaggctgagatcattcaggagtttgttgggccagcaagcatggagcttcttgcacaaattctggggtccataaacaacccccaaagtcccctgctgatccagtaggccctggaaggttccccaggtagggaagagccagaggtgcaagccttcctgaagggccagaaaatttagcctggatctcctcttttacctgctaggactggaaagagccagaagtggggtggcctgaagccctctctctgctttgaggtatttgccccttgtgtggaatttgagttgctcatggggttggcctcatatcagcctggggagttatttttgatatgtagaatgccagatcttccagattaggctaaatgtaatgaaaacctcttaggattatctgtggagcatcagtttgggaagaattattgaattatcttgcaagaaaaaagtatgtctcactttttgttaatgttgctgcctcattgacctgggaaaaatgaaaaaaaaaaataaagcaaatggt

SEQ ID NO: 8506 - DNA, 1306 bp, Homo sapiens
  SIMILAR (3)..(293): 601254mologous to Rattus norvegicus open reading frame 2,accession number X61296,Smith-Waterman Score=254.
caaagacagaccacatattaggtcacaaaacatgtcttaaaacattcagaaaaattgaaataatatcaggaatcctctctgaccacagtggaataaaactacaaatcaataacaaggggaattttggaaaccatacaagcacatggaagttaaacaatatgctcctaaatgaccaatgagtcaatgaagaaattaagaaggaaatttaaaaccatcctgaaacaaatgataatggaaacgcaacatatcaaaacctgtgagatacagggaaagaagtactaagaggaaagttgtacctataagcacctacatcaagtaagtagaaaaacttcaaataaataacctaacaatgcatcttaaagaactagaaaagccagagcaaaccaaacgcaaaattactagaagaaaagaaataataaagatcagagcagaaataaatgaaattgaagcaaagaaaacaataccaaagttcaatgaaacaaacagttggtttcttgaaaatatacacaaaactaacgaacatttagccagactaagaaaaaaagatccaaataaaatcagagaagaaaaagaagacattataaccgataccgtagaaattcaaaggatcattagaagctactatgccaagaaatgggaaaacctggaagaaacggataaattcctcgacacatacaatcttccaagattgaacaatgaagaagtccaaaacctgagcagaccaataacaaccactgttcccatcccctgaccccatctttgtcggtttggaaattcgggtccagtcctaaaatccagaaccgtcctacggtcctgacagttaataattaagtccaggctgcccacttccccagaagccctacataattatttgcctcctatgaagacgttcctgaggatgtatgaagttaccagaactggcagtctattcaagatggataaatcagtgaaactacttaacacagctaatttttttctctgaaaaatcatcgagacaaaagagcccacagagtacaagtttttatgattttatagtcaaaagatgattattgattgtgagataggttaggttttggggggtccagtagttcagtgagaatgtttatgtttacaactagccttcccagtaaaaaaaaaaaaaaaaaaaaaaaaaaattgtaaacatcacttatattactttattgcagcttcatcaccagtacattatatgttgtaatatttatttacctgatccattttggtccattttctgctttattttgctaataaactgtgatgttacttctagtgctaaacatgggaaaaa

SEQ ID NO: 8507 - DNA, 842 bp, Homo sapiens
  SIMILAR (612)..(686): 841254mologous to Rattus norvegicus alpha4 phosphoprotein,accession number AF000577,Smith-Waterman Score=132.
atggctgctgaagatgagttactgttgccgcggctccccatgctgctcgaaacaggcaaacagcttctggacgaagtagaattagcagctgaaaccaccggttaccagatagtccaggagaagcgggctcgagaacattttataaactacttaactcagtgccattactatcacattgcaaagtttgagctgctcaaaaccaagaacaactcagctgaaaatcacactgctaattcctccatggcttatcctagtctcgttgctatggcatctcaaaggcaggctaaaatagagagatacaagcagaagaaggagttggaccataggttgtctgcaatgaaatctgctgtggaaagtggtcaagcagatgatgagcatgagaggcctccagtgaaatccttcattctcacgcggaacacagcccaagccaaattatttggagctagttatccaagtctggcaactatgacagtgagtgactggtatgaacaacatcggaaatatggagcattgccagatcagggaatagccactgcaacaccagagaaattcagaaaagcagctcagcaacagaagtatcaagaagtgaaggagggagaggatgatgaacactctacagagttcgggagtgggataactggaaggacacccatcctgggggctatggcaaccgacagaacatgggctgatcttcccccaacacgacaggactgcagggtgcacacctcccccaccaaggaaaaccatgcagtgttcccctccctgggctcccgctcagctgtgtacaacgaaggcaaagatgctaaatatgctttgcattcaatgaagtgtcaagtgattaa

SEQ ID NO: 8508 - DNA, 1388 bp, Homo sapiens
  SIMILAR (634)..(963): 401254mologous to Rattus norvegicus alpha4 phosphoprotein,accession number AF000577,Smith-Waterman Score=144.
  misc_feature (1)...(1388): n = a,t,c or g
gtccccgagctgttcggaaactgtagacagttactggaggaagtagaagtggcgacttgaccccgccgtttccgggatagtcccggaggaagtgttcaagggctttggacctccttgaggagggctgccgaaatgttattcccagtccaccttgttcggccgcgaatgtagattttggaaagatttgtcccccacgcacttgattaccttttggggtccaggcttttcaaggagcccctcccattgaaacaagtcaaccccagcaggagtctagatcatttgcagcggggctcgagaacactttataaactacttaactcagtgccattgctatcatgtggcagagtttgagctgcccaaaaccatgaacaactctgctgaaaatcacactgccaattcctccatggcttatcctagtctcgttgctatggcatctcaaagacaggctaaaatacagagatacaagcagaagaaggagttggagcataggttgtctgcaatgaaatctgctgtggaaagtggtcaagcagatgatgagcgtgttcgtggatattatcttcttcaccttcagaggtggggttgatatcagcttagaagagattgagagcattgaccaggaaataaagatcctgagagaaagagactcttcaagagaggcatcaacttctaactgcatctcgccaggagaggcctccagtgaaaccctttcattctcacttcggaacatggcttcatagccaaagtanctttggagctggttattccaagggctggccaacttatngtacggtgagtgagctggtatgaagcaacatcggaaattatggagcacttatccggatcagggaatatgccaaggcagcaccagaggaattcagaaaagcagctcagcaacaggaagatcaagaagaaaaggaggaagaggatgatgaaccaaacaacttccacagagcccgggagtggggatgactggaagtgacacccatccttaggggcctatgggaaccgacagaacatgggctgatcttcccacaacaccacaggactgcaggggtgcacaactcccctgccaaggaaaaccatgcagtcctcccctccgccggtctcctggcttcagctctgtacaaccgagggcaaagatgctaaatcttgctttgcattcagtaaagtgtcaagtgatttaagtgtgtatttgtacccctagatgatatgaaccagcagtcttgttttggcatcatccctcatcatgttgtattccagcttcttcgagtggaaggaaaagagtgctgagaaatggctctgtataatctatggctatccgaattctctgaaaaaataataaaagtcccctctattatatgagcctgtccagaaaaaaaaaaaaaaaa

SEQ ID NO: 8509 - DNA, 1212 bp, Homo sapiens
  SIMILAR (540)..(992): 901254mologous to Homo sapiens Human p56-2 protein,accession number W69250,Smith-Waterman Score=688.
ggcacgaaggaactgcttcttacttaactggggggaagcccccttttgttaacatgaaccaaacctttgggggtggatcccttggttgaaggggggcgtaacccaagggtttaatgagaaggccgtttttgctgccctgcggccaagctatggccagccagcagggaagcccgcctttgcaggagccatgtcactagccggggcccaaggcagcctgtggtctgtggaaggaggcaataagctggtttgttccggtttgctgaagctcaccaaggccaatgtgatccatgccacagtgacctctgtgaccctgcacagcacagaggggaaagccctgtaccaggtggcgtatgagaatgaggtaggcaacagctctgacttctatgacatcgtggtcatcgccacccccctgcacctggacaacagcagcagcaacttaacctttgcaggcttccacccgcccattgatgacgtgcagggctctttccaacccaccgtcgtctccttggtccacggctacctcaactcgtcctacttccggtttcccagaccctaagcttttcccctttgccaacatccttaccacagatttccccagcttcttctgcactctggacaacatctgccctgtcaacatctctgccagcttccggcgaaagcagccccaggacgcagctgtttggcgagtccagtccaccaagcccctctttcggacccagctaaagaccctgttccgttcctattactcagtgcagacagctggagtgggaagggccaatcccctctatggcttccggccccacggcttcccgaggtttgcactccatgaccagctcttctacctcaatgccctggagtgggcggccagctccgtggaggtgatggccgtggctgccaagaatgtggcctttgcttggctttacaaccgctggtaccaggacctagacaagattgatcaaaaagatttgatgcacaaggtcaagactgaactgtgagggctctagggagagcctgggaactttcatcccccactgaagatggatcatcccacagcagcccaggactgaataagccatgctcgcccaccaggcttctttctgacccctcatgtatcaagcatctccaggtgacctactgtctgcctatattaagggtccacacggcggctgctgcttttttttaagggggaaagtaagaaaagagaaggaaatc

SEQ ID NO: 8510 - DNA, 375 bp, Homo sapiens
  SIMILAR (142)..(315): 821254mologous to Homo sapiens Similar to CGI-05 protein,accession number BC001215,Smith-Waterman Score=249.
cctgatgttctgaaaaacatcatcactgagatcatccactccatcctgctgccgaaccagaatggcaaattaagatctggggtcccagtgtcattggtgaaggccttgggattcgaggcagctgagtcctcactgaccaagctcagtaaacgctctgccactgacctgtgtggcaggaatgatggaaaccttaaggtgatcttccctgatgcagagatggaggatgtcaataaccctgggctcagggtcagagcccagcctggggactatgtgctggtgaagctgtgtcccgtgatcgaggcttccttcaatggcatgtatgcagacctcctgcagctggtgaaggacgcgcagacagaaattcgccacgactag

SEQ ID NO: 8511 - DNA, 2121 bp, Homo sapiens
  SIMILAR (1626)..(2042): 971254mologous to Homo sapiens Human neurotransmission- associated protein (NTAP) 2799056,accession number Y77126,Smith- Waterman Score=677.
atgcatgctaagtccataaaaacccaggcattggcagatatggagaagctaaaggtagttgtcagggacaaaaactgggtagcaaggataattccccagatgacatcaaaaggccatgttggtgtcaccaccacctccagtgctaaattgaagtctcaggggaaggacagtgtggcggttaagagggtccggtctggactgatgatcgggttcaggttcatggtcatccctccttattcttttggtccacaagtgctcatggagattcctaaagatgcagacaagttgctctgtcccagctgtgctgcggtggtgctgggacaaaagaagcatgagacgcagactctgtccctcaaagaactcccagtgcaggacaatgtggtgcccaaggaagacccagggacatgggagtggaggacagtcaaagaagggatcctggaagaggtgatgtgttggttgcaaagccgagtagaaggcgattgggcaaaggaggagagaaagatattccacgaaggggaactagcagaagcaaaggctgggagaggaggtctggcatcctgcacttgctgccctctgacacctgggaagatggccggcccgtggaccttcacccttctctgtggtttgctggcagccaccttgatccaagccaccctcagtcccactgcagttctcatcctcggcccaaaatgtcatcaaagaaaagctgacacaggagctgaaggaccacaacgccaccagcatcctgcagcagctgccgctgctcattgccatgcgggaaaagccagccggaggcatccctgtgctgggcagcctggtgaacaccgtcctgaagcacatcatctggctgaaggtcatcacagctaacatcctccagctgcaggtgaagccctcggccaatgaccaggagctgctagtcaagatccccctggacatggtggctggattcaacacgcccctggtcaagaccatcgtggagttccacatgacgactgaggcccaagccaccatccgcatggacaccagtgcaagtggccccacccgcctggtcctcagtgactgtgccaccagccatgggagcctgcgcatccaactgctgcataagctctccttcctggtgaacgccttagctaagcaggtcatgaacctcctagtgccatccctgcccaatctagtgaaaaaccagctgtgtcccgtgatcgaggcttccttcaatggcatgtatgcagacctcctgcagctggtgaaggtgcccatttccctcagcattgaccgtctggagtttgaccttctgtatcctgccatcaagggtgacaccattcagctctacctgggggccaagttgttggactcacagggaaaggtgaccaagtggttcaataactctgcagcttccctgacaatgcccaccctggacaacatcccgttcagcctcatcgtgagtcaggacgtggtgaaagctgcagtggctgctgtgctctctccagaagaattcatggtcctgttggactctgtgcttcctgagagtgcccatcggctgaagtcaagcatcgggctgatcaatgaaaaggctgcagataagctgggatctacccagatcgtgaagatcctaactcaggacactcccgagtttttttatagaccaaggccatgccaaggtggcccaactgatcgtgctggaagtgtttccctccagtgaagccctccgccctttgttcaccctgggcatcgaagccagctcggaagctcagttttacaccaaaggtgaccaacttatactcaacttgaataacatcagctctgatcggatccagctgatgaactctgggattggctggttccaacctgatgttctgtaaaacatcatcactgagatcatccactccatcctgctgccgaaccagaatggcaaattaagatctggggtcccagtgtcattggtgaaggccttgggattcgaggcagctgagtcctcactgaccaaggatgcccttgtgcttactccagcctccttgtggaaacccacctctcctgtctcccagtgaagacttggatggcagccatcagggaaggctgggtcccatctgggagtatgggtgtgagctctatagaccatccctt

SEQ ID NO: 8512 - DNA, 1209 bp, Homo sapiens
  SIMILAR (352)..(534): 1001254mologous to Homo sapiens putative dienoyl-CoA isomerase,accession number AF030249,Smith-Waterman Score=325.
atggggctgcccgcgcagggtgtgggggggaacaccttagcgaagctattggcaagtgacgatatcgccaaaggggggaaaagaaataaaagcgaagctagcgtcgtgagaaacgcggcggacgccccaaaagtgctccaggacctttctgcccggctgatgggggatttcgagttgagaaactgcaacagtccctgtaccctgctgatcggaatagttgtgctcatcaacgcagcagcagaaacactagttttcctctcagaccacatggaggaccaaggaagctcccagctgaatgtggccgtcttatcttattttcagcagcaagaccccgaaggccagaaggaagaaacggcaggtattgacctgatggacatggcttcggacatcctgcagcccaaaggagatgatgtggcccggatcagctggtacctccgtgacatcatcactcgataccaggagaccttcaacgtcatcgagaggtgccccaagcccgtgattgctgccgtccatgggggctgcattggcggaggtggggctgctgctccgatgccgcggccactggcatccagcctcagctctgtcatgggccagactgtgtcccaagaggcagccccacctcccgggagccagggttggttctggtggtcattcagcatccctggcctctacctcctaggtgtggaccttgtcaccgcctgtgacatccggtactgtgcccaggatgctttcttccaggtgaaggaggtggacgtgggtttggctgccgatgtaggaacactgcagcgcctgcccaaggtcatcgggaaccagagcctggtcaacgagctggccttcaccgcccgcaagatgatggctgacgagatttccagcaagagccccgtggcgctgcagagacaaggtcaacctgctgtattcccgcgaccattcggtggccgagagcctcaactacgtggcgtcctggaacatgagcatgctgcagacccaagacctcgtgaagtcggtccaggccacgactgagaacaaggaactgaaaaccgtcaccttctccaagctctgagagccctcgcgtcccaggccccagcaagggctcctctttgtcccgcctcatccacagaaagggaggatgggcgatgacagttgtttctatgccttctgacccagtttcccagtttataactttatgacaatgagtttctcaagcccaag

SEQ ID NO: 8513 - DNA, 1402 bp, Homo sapiens
  SIMILAR (346)..(957): 441254mologous to Homo sapiens putative dienoyl-CoA isomerase,accession number AF030249,Smith-Waterman Score=271.
ctacccgcctggagttacgggaacgacgacttcgtcatcggtgccctcgctcaacatggcggccttctgtgtccgccccctccgctaacgggcacgttactccgtccgaacgcagtagacgaaggcggcggcgatggcggcgggbgatagtggcttctcgcagactccgcgacctactgacccggggactgacaggctccaactacccgggactcagtattagccttcgcctcactggctcctctgcacaagaggaggcttccggagtagccctcggtgaagccccagaccacagctatgagtcccttcgtgtgacgtctgcgcagaaacatgttctgcatgtccaagctcaaccggcccaacaagaggaatgccatgaacaaggtcttctggagagaagatggtagagtgctttcaacaagatttcggagagacgcttgactgttcgggcggtgggtgatctttggttgcaggaaaaatgtttcaattgcaagtattgacctgatggacatggcttcggacatcctgcagcccaaaggagatgatgttggcccggatcagctgggaccttccgtgacattataactcgataccagggagacctttcaacgtcatcgagaggttgccccaagcccgtgattgcttccggtccatgggggctgcatttggcgggaggtgtgggaccttgtcaccgcctgtgaacatccggtacttgtgcccagggatgcttttcttccagggtgaaggaggtgggacgtggggtttggcttgccgatgtagggaacactgtcagacgcctgcccccaaggttcatcggggaacccagagccctggtcaaacgagcctggccttcacccgcccgcaaagatgatggctgacgaggccctgggcaagtgggctggtcagcccgggttttccccagacaaagaggttcatgctggattgttgcctttagcgctggcggccagagatttcccagccaaagagcccccttgggccgtgcagagccaccaaaggtcaaacctggctggtaattccccgcggaaccatttgggtggccgaagagccttaaactacgtggtaaggcgtcctgggaacatggagcatgctggcagacccaagaccatcgtgaaagtcggtcccaggccgacgactgatgaacaaggaactgaaaacccgtcaccttctcccaagctctgagagccctcgcgtcccctagccccagccagggggcctggccttgtcccgcctcatccacgagaaagggaggatgggcgatgacagttgtttcctatggcttctgaccccagttttcccagtttaaaactttatgacaatgagtttctgcaagcccaaggccttatcttcaccccacaaacacataaagcaaagtaaagaaaaa

SEQ ID NO: 8514 - DNA, 548 bp, Homo sapiens
  SIMILAR (546)..(1): 1001254mologous to Homo sapiens N-acetylgalactosamine 6- sulfate sulfatase (GALNS),accession number D17629,Smith-Waterman Score=996.
acacttccctaacttttcacagcccggaggtgcccagttcatgaccgcccagttgcacacgttgagctggggctgcgcggggaccaaggcctcctggtgctgctggacgaccgaggtgatcctgctgagggcctcctggtactcggcgctggcaaagctgagggggaacctctcccctgggtcccgtcccaggtggaagatcaggggcagcttcgtgtggtcttccagattgtgagttgtgacccctgaaacgttctgcccagggcagaaatcaatgccctgtctgaagttctcccaggagttggtccaggtccagaagtgagccttgtgctgcccgagggtggccgccatcagcgtgtcgccacggtaatagaagataggcctgtccatcagccggccctgcaggagggtggggaggaggttgaggccatcaatggccctgtcgctgggcggcgtcaggcccgcaagggccaggctggtggtgaagaggtccatgatgctgcccagctggtggctcacctggcctgcagtgacgtgccctggccacc

SEQ ID NO: 8515 - DNA, 1881 bp, Homo sapiens
  SIMILAR (551)..(1561): 311254mologous to Mycoplasma pulmonis VsaC1,accession number U23947,Smith-Waterman Score=380.
ttatttttccaagtggtttgatgacttattcacctccgtgtgtctggacggggccgtcttgcggctggagcggggagcagggtcagcaagtggtcttggggacgaggggatgcggccaggcctcttcctgtgtggttcgcagccgtgggctggtagcccacggggcctccgagcctcgaagtgggtctgattggccaggtgctgctgcctggttaacatgcctgccaggccacacagcttgtggctccctggctgttcagagccaccaccttccttcccacggcacggcgggcacccagcggctcccacgctgcagccgggtctggccctggaaagaggcttcagctgggccttttcgcccgcacagcaggagcccaggctgaagtctgcagctgccgaggggccttcttcccgaatcctgcgcggcagatccaggggcatgaccgcccagttgcacacgttgagctggggctgcgcggggaccaaggcctcctggtgctgctggacgaccgaggtgatcctgctgagggcctcctggtactcggcgctggcaaagcctccaagctgccctgtggtcacgtcagctgcccccacacaggcgagacccatgatcaagccccagggagctgcatggtccacgcaaaagctaccaatacccacatctgcatcacccacgcaaaagtcaccaatacccacatctgcatcatccacgcaaaaactaccaatacccacagctgcgtggtccacgcaaaaactaccaatacccacagctgcgtggtccacgcaaaagctaccaatacccacagctgcatggtccacgcaaaagctaccaatacccacagctgcatggtccacacaaaagctaccaatacccacagctgcatcatccacgcaaaagctacccatgcccacagctgcatcatccacgcaaaagtcaccaatacccacagctgcatcgtccacgcaaaagctaccaatacccacagctgcatggtccacgtaaaagctaccaataaccagagccgcatggtccacacaaaagctaccaatacccacagctgcatcatccacgcaaaagtacacaatagccacagctgcatcgtaccacgcaaaagccacagatgcatggtccacgtaaaagctaccaatacccagagctgcatggtccacgtaaaagctaccaatacccacagctgcatggtccacgcaaaagctaccaatacccacagctgcatcatccacgcaaaagtcaccaatacccacagctgcatcgtccacgcaaaagctacccatgcccacagctgcgtggtccacgcaaaagctaccaatacccacagctgcatggtccacgcaaaagctaccaatacccacagctgcatcgtccacgcaaaagctacccatgcccacagctgcatcgtccacgcaaaagctacccatgcccacagctgcatggtccaccataacaacaatgggggcaacaacccacgcgtccatcaacggacacacaaaacgtggtctttcttcatccgcggtgtccagaacaggcaagttcacagagatcaggagcgggggcagactgagggctttccaacccgaaggtctcctcggcagaagccccttcatgtgccaaggacgagccagaggtggagaagggccgtgggccggccccgtggacgagccagaggtggagaagggccgtgggccggccccgtggatgagccagaggtggagaagggccgtgggccggccccgtggacgagccagaggtggagaagggccgtgggctggccccatggtgcagagtgagcaggtgctgggggcactggcctgcagctcaggcctctgcttgtccctctggtcaccccagtcctggggcagcat

SEQ ID NO: 8516 - DNA, 543 bp, Homo sapiens
  SIMILAR (543)..(469): 681254mologous to Homo sapiens Human secreted protein sequence encoded by gene 4 SEQ ID NO:51,accession number B08894,Smith-Waterman Score=85.
atgaagatcaacatgtccctttctctgatcctaacactgaatttgactgtcaccttgtccctggctggcaccatgaacctaactgaagatgaccagcagggggcgtgcgagccgccttgtcggacccctgagaagcccccaccgcctccgtgctcctactgcggccgccagcgccgggcccgcagtgaggaggagaacctcattttcctcaacacagatctaaggggacaccgcctcactttgagacaacttgaggctgcgtcagtgtggtccacagaatgtaggaccaactacggcataaaagctccacctcggatggggcaagactcctggctgacactggggtctttattgaaatcttcccagattaaatggtcccaattcactaatgcccagtctgaggagagtcaggaggaacaaagcaaggcaagttacttctatagcaggctgcgccttacagatggagcaatggatgcatggtatgacacggcacccaacaagaataagtacacctattacggctgcgagggaagtaagaattga

SEQ ID NO: 8517 - DNA, 396 bp, Homo sapiens
  SIMILAR (329)..(102): 601254mologous to Homo sapiens Human secreted protein sequence encoded by gene 4 SEQ ID NO:51,accession number B08894,Smith-Waterman Score=214.
taagtttaaaagtagaaggcaaagaattgaacatactgacatattctttcaaaagaaatttagaactcatatataacaaccccttcccttgtatttctttacagctttcttttcaaaagtttttttaacatgtcctggcttagttgttttgcttgattttccaaaagaagaagcttctctggataaggtggaggatagttaagggaggttttagcaagtgccgtttctacgagcctctgcaccaacccacggatgcatggtatgacacggcacccaacaagaataagtacacctattacggctgcgagggaagtaagaattgaggctattattcctttccatttactgaactacttttctagccatcctgtaaaggggtcatttacccctgagttg

SEQ ID NO: 8518 - DNA, 1753 bp, Homo sapiens
  SIMILAR (917)..(1066): 561254mologous to Homo sapiens Amino acid sequence of a human secreted protein,accession number Y19566,Smith-Waterman Score=148.
tcactgcacttcgtttgcgggagggcttctgttggcgaagcagcaggtccgggggcggcctgcggagcctcgcggggctcggatctcctgggcccgcaatgccggaggagaggaggcccaaatgctgggaaagctgttcggagtggctgcttgggccttgaacccgaggtgggcgcacgtctgccgtatctgggccctagatcctgtttcgatttcttctctcatcgtgccaggggcgatgaggttcagttgtgcttctggaaggatccagggttgagggttctccaatcgcagcaaagggcccgggctgggtgttgccgagcggtcctcggctccccggtggaccatgcccctccagaggtctggcccagcgtcgctctgctctgcaaaaaagtggctctccgctgatctcgaatgcaccagcgagcctccagattctgggtgaagccgattttggaaatccatatgccgcccttgtgctgctaaccatcgagactgctgttcgtacagcggaaagggatggacacatgacacctgagtcaagcaagtgccattatcctcagaatcatgggccattgttcctgggtcaagccctaccaaattaaagctaaggaaagcttagtctatctatcttttcctttcctttcctaacccagtgcttaaatccattactattcctaccaccagcaactctaaccccactgtagggcacttctgtggtttaggagcagaagtcactggaaaggatcctataggcttctttaaggtgcactttgttctccctcctctacctcctacaactgcccctttcccaaacctacaaaatcaaactatgactcgcctcatgccaaatgacaaaagcaaggtctcagtagtagaaataggagacctatggcaaaccatagctattgacaggagcagtagttatgctctagttcaattggctatcccttttactctggcatttcatcaaccagaggaaggaaaaataagacatcataaagtgagagaagctccttataggtcattcaactctcatgtctatttagatgcaattggagtcccacggggaataccagatcaatttaaagcccgaaatcaaatagctgcaggatttgagtcaatattttggtgggtcacaattaataaaaacatagattggataaactacatctattataaccaacagcaatttatgaactacactagagatgctgttaaaggaatagctgagcaattagggactaactgccagatggcttgggaaaataggatagccttagacatgatattagcagaaagaggaggagtttgcatcatgattaaaactgaatgttgtgccttcatcccaaacaacactgcccctaatggaagtataacaaaggcattgcaaggtctgactgctctgtccaatgagttagccagcagctcaggggtaaatgacccctttacaggatggctagaaaagtggttcggtaaatggaaaggaataacagcctcaattcttacttccctcacagctgtaatgggtgtacttattcttgtcgggtgctgtgtcataccatgcatctgtgggttggtgcagagacaccggggaccgccccttgtggtcatagagacgaagccgctcggcctagagcgcctcgccggcctcccggtcggccacgcactaaaactgggctcaggaatccaagctacaccccaaaatggggagaacgcggatcgaagggaggccttcccggccgcgtcctag

SEQ ID NO: 8519 - DNA, 1368 bp, Homo sapiens
  SIMILAR (1)..(492): 851254mologous to Homo sapiens Protein encoded by the endogenetic fragment of HERV-W,accession number B07702,Smith- Waterman Score=719.
atgttactgctaaatcagacactaaccccaaatgagagaagtgccaccataactgcagcccgagagtttggcgatctctggtatctcagtcaggtcaatgacaggatgacaacagaggaaagagaacgattgcccacaggccagcaggaagttcccagtgtacaccctcactgggacacagaatcaaaacacggagattggtgccgcagacatttgctaacttgcatgctagaaggactaaggaaaactaggaaaaagcccatgaattattcaatgatgtccactataacacagggtaaggaagaaaatcctaccgcctttctggagagactaagggaggccttgagaaagcatacctctctgtcacctgactctattgaaggccaactaatcttaaaggataagtttatcactcagtcagctacagacatcagaaaaaacttcaaaaacttagaaaccctattgaacttggcaaccttggtttttcataatagagataaggagaagcaggcagaacaagacaaacgggatttaaaaaaggctaccgctttagttatggccctcaggcaagcagactttggaggctctggaacacggaaaggctgggcaaatccaatgcctaatagggcttgcttccagtgtggtctacaaggacactttaaaaagattgtccaaatacaaataagccaccccctcatccatgccccttatgtcaaaggaatcaatggaaggcccactgccccaggggacaaaggtttccaaaccaaagctcaactctgctcagaacaggctaaatacttagggctaaaattatccaaaggcaccagggccctcagtgaggaacgtatccagcccatactggcttatcctcatcccaaaaccctaaagcaactaagagggttctttggcataccaggcttctgccgaatatggattcccagaatcaaagctgtaaaactacacatcgttcttcaaatggatccccagaggcagtccatgactaagatctaccatggacccctggactggcctgctagcccatgctctgatgttaatgacaccaaaggcaaccctcctgaggaaatctcaactgcaccacccctactatgccccaattcagcaggaagcagttggagcggggataacacagaaagaaggcctttaccagatgcaggccccttgaccttggacttcctaggctccaaacctagagtacaaaacaacagtgatgccagcagagaaaaacacagccatgaaacaaaacacccagaccagagacacagaactgcttcatatagccattttcaggcaaagcagggagccagtgttttgccatgcatattagagaaaagggaagcctcctactga

SEQ ID NO: 8520 - DNA, 421 bp, Homo sapiens
  SIMILAR (279)..(419): 851254mologous to multiple sclerosis associated retrovirus polyprotein,accession number AF009668,Smith-Waterman Score=217.
gccaactaattttaaaggataagtttatcactcagtcagctgcagacattaaagaaaaacttcaaaagtccaccttaggcccagagcgaaacttaaaaaccctattgaacttggcaacctctgttttttataatagagatcaggaggagcaggcggaacgggacaaacgaggtaagaaaaaggccaccactttagtcatggccctcgggcaagcggactttggaggctctggaacgcggaaagcctgggcaaatcgaatgcctaatagggcttgcttccagcagtacccccttagacctgaggcccaacaaggactccaaaagattgttaaggacctaaaagcccaaggcctagtaaaaccatgcagtagcccctctgatactccaattttaggagtacagaaacctaatggacagtggag

SEQ ID NO: 8521 - DNA, 470 bp, Homo sapiens
  SIMILAR (465)..(361): 511254mologous to Homo sapiens Human secreted protein, SEQ ID NO: 6606,accession number G02525,Smith-Waterman Score=66.
gcagttgtaagatttaatagaatgaaaacagagctcccatacaacaggaggggacccaaagggggttgcctttgccggctcaaatgcctgggtttatatcccaatcattgtccctccccctgtgctctcaggcaatagatgattggctatttctttacctcctgttttagcctaattagcattttagtgagctctctttactacctgattggtcaggtgtgagctaagttgcaagccccgtgtttaaaggcggatgtggtcaccttcccagctaggcttatggattcttagtcagcctaggaaatccagctagtcctgtctctcagtgggggtggttactctcatgctgttctcatgatagtgagttctcacaagatctgatagttttataaagggcttttccccaccttcgctctgcacttctccttgctgctaccatgtgaagaaggatgtatttgcttccccttctg

SEQ ID NO: 8522 - DNA, 1281 bp, Homo sapiens
  SIMILAR (1)..(1011): 991254mologous to Homo sapiens G protein coupled receptor OGR1,accession number U48405,Smith-Waterman Score=1775.
atggggaacatcactgcagacaactcctcgatgagctgtaccatcgaccataccatccaccagacgctggccccggtggtctatgttaccgtgctggtggtgggcttcccggccaactgcctgtccctctacttcggctacctgcagatcaaggcccggaacgagctgggcgtgtacctgtgcaacctgacggtggccgacctcttctacatctgctcgctgcccttctggctgcagtacgtgctgcagcacgacaactggtctcacggcgacctgtcctgccaggtgtgcggcatcctcctgtacgagaacatctacatcagcgtgggcttcctctgctgcatctccgtggaccgctacctggctgtggcccatcccttccgcttccaccagttccggaccctgaaggcggccgtcggcgtcagcgtggtcatctgggccaaggagctgctgaccagcatctacttcctgatgcacgaggaggtcatcgaggacgagaaccagcaccgcgtgtgctttgagcactaccccatccaggcatggcagcgcgccatcaactactaccgcttcctggtgggcttcctcttccccatctgcctgctgctggcgtcctaccagggcatcctgcgcgccgtgcgccggagccacggcacccagaagagccgcaaggaccagatccagcggctggtgctcagcaccgtggtcatcttcctggcctgcttcctgccctaccacgtgttgctgctggtgcgcaggtactgggaggccagctgcgacttcgccaagggcgttttcaacgcctaccacttctccctcctgctcaccagcttcaactgcgtcgccgaccccgtgctctactgcttcgtcagcgagaccacccaccgggacctggcccgcctccgcggggcctgcctggccttcctcacctgctccaggaccggccgggccagggaggcctacccgctgggtgcccccgaggcctccgggaaaagcggggcccaggaggaggaagtgaccaagtttgaaggcggcagaaatggccacacagccaagaagagcccatgcaactcagtccaggattttactggaatcaaagctgtaaaactacaaatagttcttcaaatggagccccagatgcagtccatgactaagatctaccatggacccctggaccggcctgctagcccatgctccgatgttgatgacatcgaaggcacccctcccgaggaaatctcaactgcacaacccctactacgccccaattcagcaggaagcagttag

SEQ ID NO: 8523 - DNA, 658 bp, Homo sapiens
  SIMILAR (356)..(655): 851254mologous to Homo sapiens Protein encoded by the endogenetic fragment of HERV-W,accession number B07702,Smith- Waterman Score=452.
atggcttctaatagagctataacactcactgtatggcccaagatttcattccttggaatccatgaggccaagaaccccaggtcagagaacaagaggcttgccgccatcttggaagcggcccaccaccatcttgggagctctaagaacaaggaccacccgatgggaaacgttcccccccaaggcaaaaacacccctaagatgtattctggagaattcggcccagccagagtgtacgtaccttttttcctgtcagacttgaagcaaattaaaatagacctaggtaaattctcagataaccctgatggctatattgatgtttcacaagggttaagacagtcctttgatctgacatgggagagatataatgttactgctaaatcagacactagctccaaatgagagaagtgccaccataactgcagcccgagagtttggtgatctctggtatatcagtcaggtcaatgataggatgacaacagaggaaagagaacaactccccacaggccagcaggcagttcccagtgtagaccatcattgggacacagaatcagaacaaggagattggtgctgcagacatttactaacttgcgtggtagaaggactaaggaaaactaggaagaagcctataaattattcaatgatgtcccctataacatag

SEQ ID NO: 8524 - DNA, 1812 bp, Homo sapiens
  SIMILAR (799)..(1545): 831254mologous to multiple sclerosis associated retrovirus polyprotein,accession number AF009668,Smith-Waterman Score=1098.
atgtcttctaatagagctataacactcaccgcatggcccaagattccattccttggaatccgtgaggccaagaaccccagaattggaggaaaatactgggcacctgtcagccagttaaaaacgattagcgtggccgccggacttaagactcaggtgttacgctatctgcggaagggctttctaacaacccccaacccttctgggttggggacgttggtactaatggttcacactttcatttcctctagcaagttgtatctccaaagggatctagggaggctctgcgttgtgtccttaggcacctgggctgtaacccagggagtcttatccctggtgtccctcctgattcagcccgaagagtttggtgatctctggtatctcagtcaggtcaatgataggatgacaacagaggaaagagaacaattccccacaggccagcaggcagttcccagtgtagaccctcattgggacacagaatcagaacatggaaattggtgccgcagacatttgctaacttgtgtgctaggactaaggaaaactaggaagaagcctatgaattatgcaatgatgtccactataacacagggaaaggaagaaaatcctactgcctttctgatcaggagaagcaggcggaatgggacaaacgggataaaaaaaaaggccactgctttagtcatggccctcaggcaagcggactttggagtctctggaaaagggaaaagctgggcaaatcgaatgcctaatatggcttgcttccagtgtggtctacaaggacactttaaaaaagattgtccaagtagaagcagtacccttagacctgaggcccaacaaggactccaaaagattgttaaggacttaaaagcccaaggcctagtaaaaccatgcaatagcccctgcaatactccagttttaggagtacagaaacctaatggacagtggaggttagtgcaagatctcaggattatcaatgaggctgttcttcctctataccctgctatacctaacccttgtactctgctttcccaaaaaccacagaaagcagagtggtttacagtcctggaccttaaggatgcctttttctgcatccctgtacaccctgactctcaattcttgtttgcctttgaagatcctttgaacccaatgtctcaactcacctggactgttttaccccaagggttcaagcatagcgcccatctatttggccaggcattagcccaagacttgagccaattctcatacctggacactcttgtccttcagtacggggatgatttaattttagccacccgatcagaaacctggtgccatcaagccacccaagcactcttaaatttccttgctacctgtggctacaaggtttccaaacaaaatgctcagctctgctcacagcaggttaaaaacttagggctaaaattatccaaaggcacaagggccctcagtgaggaacgtatccagcctatactggcttatcctcatcccaaaaccctaaagcaactaagagggttccttggcataacaagcttctgccgaatatggattcccagaatcaaagctgtaaaactacacatcgttcttcaaatggatccccagaggcagtccatgactaagatctaccatggacccctggactggcctgctagcccatgctctgatgttaatgacaccaaaggcaaccctcctgaggaaatctcaactgcaccacccctactatgccccaattcagcaggaagcagttggagcggggataacacagaaagaaggcctttaccagatgcaggccccttgaccttggacttcctaggctccaaacct

SEQ ID NO: 8525 - DNA, 1165 bp, Homo sapiens
  SIMILAR (660)..(695): 911254mologous to Homo sapiens envelope protein,accession number AF072508,Smith-Waterman Score=56.
tcactctattaaatattgcaactgcacactcttctggtctgtgtttgttacggctcgagctgagctttcactcgctgtccacccctgctgtttgccactgtcgcagacctgccactgacttccacccctccggatccagcagggtctctgctgtgctcctgatccagcaagacacccattgccacactggatcgggctagaggctcgccattgttcctgcatggctaagggcccagggttcgtcctaattgagctgaacactagttgcttggttccacagttctcttccatgacccacagcttctaatagagctataccactcatcgcatggccccaaggttccattccttggaatccgtgaggccaagaactccaggtcagagaatacgaggcttgccaccatcttgggagccggcctgctaccatcttggaagtggttcaccaccatcttgggagctctgtgagcaaggaccccccggtaacattttggcaaccacgaacggacatccaaagtgaatcgaagctgtaaaactacaaatggagcccaagatgcagtccaagactaagatctaccgcagacccctggaccggcctgctagcccacgatctgatgttaatgacatcaaaggcacccctcgtgaggaaatctcagctgcaaaaacctctactacgccccaattcagcaggaagcagttagagcggtcgtcggccaacctccccaacagcacttaggttttcctgttgagatgggggactgagagacaggaccagctggatgtcctaggctgactaagaatccctaagcctagctgggaaggtgactgcatccacctttaaacacagggcttgcaacttagctcacacccgaccaatcaggtagtaaagagagctcactaaaacgctcattaggcaaaaacaggaggtaaagaaatagccaatcatctattgtctgagagcacagcgggagggacaatgaccgggatttaaacccaggcattcgagctggcaacggctaccctctctgggtcacctccctttgtatgggagctctgttttcactctattaaatcttgcaactgcacactcttctggtccgtgtttgttacggcttgagctgagctttcgctcactgtccaccactgctgtttgctgctgtcgcaaacc

SEQ ID NO: 8526 - DNA, 642 bp, Homo sapiens
  SIMILAR (333)..(4): 701254mologous to Homo sapiens putative p150,accession number U93570,Smith-Waterman Score=387.
ttatttatttgcagttattgtaaaaggggttgagttcttgattttgttctctgcttggtcgctgttggtgtatagaagagctaccaatttgtgtagattaatcttgtatctgaaaactttgctgaactcttttatcagttctaggagctttctgggggaggctttagggttttcaaggtaaatgatcatatcgtcagcaaacagtgccagtttgacttcctctttaccaatttggatgccctttatttctttctcttgtctgattgctccggctaggacttccagtactatgttgaagaggagtggtgagagtgggcatccttgtcttgttcctcccagggttgtattacattgaggtatatcccttgtatgccgattttgccgacttttaatcatagagggatgctggattttgtcagatgtttttcctgtatttttggggtccgtttgcatgaaatgcctttttttgccccttactttaagtttatgtgggtccttaggggttacgtgagtctcctgaaggcagcagagagttggttgctgagttcttatccattctgcagttctgtatcttttaagtatagcatttaggccatttacattcaatgttactattgagatgtgaggtaccattccattcat

SEQ ID NO: 8527 - DNA, 630 bp, Homo sapiens
  SIMILAR (483)..(70): 691254mologous to Homo sapiens NAG13,accession number AF194537,Smith-Waterman Score=473.
ctattgaaaaagtggttgagttcttggtttgattctctgcatggtcgctgttggtacacaagctactactgacttgtgtatcttagtcttgtatctggaaactttgctgaattcttttatcagttctaggagctttctggagtctttagggttttcaaggtaaatggtcctatcatcagcaaacagtgacagtatgacttcctctttacctatttggatgccctttatttctttctcttgtctgattgctctggctaggacttccagtactatgttgaagaggagtggtaagagtgtgcattcttgtctctttccatttcttagatggcatggtttcagcttttccccattcagtgttatgttggctgtgggtttgtcataaatgacttttattatattgaggtaggtaccttgtatgtcgattttgctgagagttttaatcataaagggatgctggattttgtcaaatgctttttctgcatctgacacttggtagaaatctttaggatgaacttgaaaatgatagagcagaacaggtatcctctctagggagctcatcgggtactttttcaatacaaccacaagctgaaagccttcctccttatacaaataactaggagtataagccat

SEQ ID NO: 8528 - DNA, 900 bp, Homo sapiens; identical to SEQ ID NO: 4530
  SIMILAR (421)..(876): 611254mologous to Mus musculus domesticus ORF2,accession number AF081110,Smith-Waterman Score=446.

SEQ ID NO: 8529 - DNA, 471 bp, Homo sapiens
  SIMILAR (166)..(309): 691254mologous to Homo sapiens PRO1546,accession number AF116638,Smith-Waterman Score=178.
atgcctgattgcaattaccaacataatatcactgaatgtggacttgagaaaaagatacccatatggagttatgtgaacatacagattaggcaggtgaccatacagattagaaacttggaagagcagattcttcggaagacaccaactggggagtcctcagcttggacatggatgaagcctgaaaccatcattctcagcaaactaacacaggaacagaaaaccaaaccacattctctcactcgtaagtgggagtccaacaatgagaacacatggaaacagggaggggaacaccacaaaccagggcctgttggcagcatagtactgaaagtcctagccagagcaatcagacaagagaaagaaagaaagggcactcgaatcggtaaagaggaagtcaaactggtgctgtttgctgatggtatgactgtatacctagaaaacactaaagactcatccaaaaagcttctagaactg

SEQ ID NO: 8530 - DNA, 516 bp, Homo sapiens
  SIMILAR (91)..(435): 521254mologous to Homo sapiens putative p150,accession number U93564,Smith-Waterman Score=290.
gatacagcaaaagtggtgctaagaggaaaggtcatagcattaaatgcctacatcaaaaagtctgaaagagcacaaatagacaatacacagaaaaagcatttgacaaaattgagcatccctttgattaaaaccctcagcaaaatcggcatagaagggacataccttaaggtaataaaagccatctatgataaatccagagccaacattacactgaatggggaaaagttgaaagcattccccctgagaactagaacaagacaaggatgcccatttattcgatgcagtactggaagtcctggccagagcaatcagacaagagaaagaaataaagggcaccaaatcagtaaagaggaagtcaaactgtcactgtttgctgatgggattatcatatacctagaaaaccctaaagactcatccaaaaagctcctagaactggcctacaagaggaagacagaagcagcaaagaaggaatatctgaaggccctggcagcctaccgggctagcctcgtctccaag

SEQ ID NO: 8531 - DNA, 493 bp, Homo sapiens
  SIMILAR (2)..(475): 661254mologous to Homo sapiens NAG13,accession number AF194537,Smith-Waterman Score=518.
caaaatctggcatccctttacgattaaaactcttagcaaagtcggcatacaaggaacatacctcaatataataaaagccatctacgacaaacccacaaccagcataataatgaatgaggaaaagttgcaagcattccctctgagaactggaacaagacaaggatgcccaatctcaccacccctcttcagcatagtactggaagtcctagccagagcaatcagacaagagaaagaaataaagggcatccaaatcagtaaagagaaagtcaaactgtccctgtttgctgttgatatcatttaccttgaaaaccccaaagacgactccagaaagctcctagaactgatagaagaatttggcaaagtttctggatacaatattaaggtatagaaatcagtagctcttctatacttcaacagtgaccaagcagagaatcaaatcaagaattcaaccccttttacaatagctgcaaacaaacaaacaaacaaaaaaaaa

SEQ ID NO: 8532 - DNA, 1249 bp, Homo sapiens
  SIMILAR (103)..(252): 281254mologous to Homo sapiens p40,accession number U93570,Smith-Waterman Score=64.
atgggctatttcatatggaaaaagagtaactcaacggacaaagtcaagatagcttgggcactgctgctaggaagcaagaggttccaatcaaaggctacccaaatgggaaggaaccagaaaaccaaccctggtaatatgacaaaacaaggcttgtcaacatcccccaaaaatcacacgagttcaccaacaatggatccaaaccaagaagaaatcctcgatttacctgaaaaaagaattcaggaggttagttattaagctaatcagggaggcaccagaggaaggcaaagcccaatgcaaggaagtccaaaaactgatacaaaaagtgcaaggagaaattatcgacgaaatagataccataaataagaaacaaccaaaacttcaggaaacaatggacacacttacaaaaatgcaaaatgctcaggaaagtctcagcaatagaattgaacaagaagaagagcattctaaaagcttggaaaatatatttgggagtataatggaggaaaacttccccagccttgctagagacttagacagccaaatacaagaagcacaaagaacacctgggaaattcatcacaaaaagatcatcccctagacacattgtcatcaggttatccaaagttaagacaaaggaaagaatcttaagagttgtgagacagaagcgcaagcatagtactgaagtcctagccagagcaatcagacaagagaaggaaataaagggcacccaaatcgataaagaggaagtcaaaaaaataaagggcagatacttcctgtcaataaacagatcttttccaagtttacttcttaaatctttacaactgtgcccatataaggctaaggtgtttagcctctggggacgagtatcattatggataatgccaagtactgaaaggaacgcatttaatcagacaaagaggtcctccatgcatcactgctgtcagagagattccagctcctctccaatgctcatcaaagatatgagagagatgaatgcatataacagaaggagtgtggataacagatacctaagagagaatgagaattggaaaagaccgactgaacagacaagggagctaaatacaggaagaaattatacttatgctgatgatacttcagctgtcaatagtattcattctaagtcctcattaataaagacagacaatgaagattctacaatatataaggaaaccaatggatgcaatgtaaatatccagttaaaagaacagaagaatgaacccttgaagaagtag

SEQ ID NO: 8533 - DNA, 1078 bp, Homo sapiens
  SIMILAR (929)..(534): 721254mologous to Homo sapiens NAG13,accession number AF194537,Smith-Waterman Score=468.
ttattttatttttattttttgttttgcagctattgtaaaagggtttgtgttcttgattcgattctctgcttggctgctgttggtgtagagaagagctattgatctgtgtacattaatcttgtatctagaaactttgctgacttcttttgtgagttctaggagctttctggtggaaactttgaggttttcaaggtaaacgatcatattgtcagcaaacagagacagtttgacttcctctttactgatttggatgccctttctttctttctcttgtctgattgctctggctaggacttctagtactatgctgaatagaattggtgaaagtgtgcatcccccttgtcttgttccggttcttggaggggatgctttcgacttttccccattcagtataatgttggcttgtgggtttgtcatagatggtttttactaccttaaggtatgtcccttctgtgccaattttgctaagatttttaattataaagggatgctggattttgtcacatgcttttaatacatctactgagatgatcatgtgattcttgtttttaattctgtttatgtggtgtatcacatttattgactttatgtatgttaaaccttctctgcatccctggtatgaaacccacttgatcgtggtggattatctttttgatacgctgttggatttggttagctagtattttgttgaggatttttgcatctatgttcatcagggatattggcctgtagttttcttttttagttgttatgttctttcctggttttggtattagggtgatgctggcttcatagaatgaattagggagggttccttctttctctgtcttgtataatagtgtcaaaaggataggtaccaattcttctttgaatgtctggtaaaattctgctgtgaatccatctggtcctggattttttttgttggtaattttttaagggagaggatggtctccctttcccacttccacagttggggcactcacagtgtttggggtgtctcctgggtcctgcaggagcagtccgcttccttcagagcgtctgtgggtcatctcgggattgctggtttgttattgcagtt

SEQ ID NO: 8534 - DNA, 633 bp, Homo sapiens
  SIMILAR (110)..(460): 981254mologous to Homo sapiens Human secreted protein, SEQ ID NO: 7144,accession number G03063,Smith-Waterman Score=590.
cccacgcgtccgcggacgcgtgggtgaccttggtgctcaccctgatgtgcaagaccgaatgggctgtactcccacaatgagggctgcagaactgggccatgaattgtcaatggaaatattagcaaaggcaaaggctgatatgactatagttgataatgaaggaaaaggtgttttgttttactgcattttaccgactaagcggcattatcgctgtgctctgatcgcccttgaacatggtgcagatgtcaacaattctacctatgaaggaaagccaatattccttagagcttgtgaagatgcacatgatgttaaagatgtgtgcctgacatttttggaaaaaggagccaatcctaatgcaatcaactcatccacaggccgcacagctttaatggaagcgtcaagagaaggggtagtggaaatagttcgaggcatattggaaagaggaggtgaagtgaatgcatttgacaacgacaggcatcacgctgctcattttgctgctaaaggaggctttttcgatatattgaagcttctttttgcctacaatggagacgtggggctgatttcgataaatgggaacacaccacttcattatgctgccatgggtggttttgcagactgctgtaaatatataga

SEQ ID NO: 8535 - DNA, 2936 bp, Homo sapiens
  SIMILAR (1495)..(2007): 951254mologous to Homo sapiens dJ839B4.4 (novel protein with ankyrin repeats),accession number AL109754,Smith-Waterman Score= 857.
tgtcagcgtgctggaattcctctattttgctggtgtgaaaccatgtagatagatggtgggaactcaaacccttaccatggcaatttagttaacctcagcttcttcatggtaaaatggtaaagtgtgatgaggagggaaggttaaatggataataagaaaaccacctggcaaactatttttaattatgatggaagatttgtttgaactgttttaactttatgcccactcaatatttttgatatttatgtataaatcctactttctgaacatttcttaaaaaacaatctctgttcttaaggaagttccaaaatattgttatttaatcaaaatgaagatgataaaattaactttgagttatttttcttttttgttgcttcagctttagttctggtccagaaagcattttcaaggagctggtcaagcatggctttagcagataagagacttgagaacttacagatctacaaagttcttcaatgtgtgcggaacaaagacaagaagcagatagagaagctgaccaagcttggataccctgaactaatcaattatacagaacccattaatggacttagtgctttgcacttagcctcagtttccaatgatattgatatggtcagctttctccttgaccttggtgctcaccctgatgtgcaagaccgaatgggctgtactcccacaatgagggctgcagaactgggccatgaattgtcaatggaaatattagcaaaggcaaaggctgatatgactatagttgataatgaaggaaaagttttagaggggaccgggggacttaccagtagccctttggcacacatagctgtagcccttcacattccaagaagggacactcagggtgttttgttttactgcattttaccgactaagcggcattatcgctgtgctctgatcgcccttgaacatggtgcagatgtcaacaattctacctatgaaggaaagccaatattccttagagcttgtgaagatgcacatgatgttaaagatgtgtgcctgacatttttggaaaaaggagccaatcctaatgcaatcaactcaatattgaagcttctttttgcctacaatggagacgtggggctgatttcgataaatgggaacacaccacttcattatgctgccatgggtggttttgcagactgctgtaaatatatagctcagcgaggatgtgacctgaaatggaagaatttagatcataaaacgcccagggctgtggctaaggaaggcggcttcaaagcagcaagcaaagaaatacgccgagcagagagaatcgctaataaactagccaggccaggagccaaaaatcccaaatcccactgtgggcccttagactgcacgattggtccgtagaacgtgaggctttcctccgggaagcctttgcggttttagacaggggtgatggaagcatcagcaagaacgacttcgtgatggtgttggaggaaaggcaggattatgcaagctcagaacagctggctgccattcgctcaccttcatgagaaaacccggggaggaggggtcaatattaattgaattcttttaaaggaaccagatattttaaacaagtcttttgtcttaggatcgtatggacctaagaaaaaggaaaaagggatgggcaaaaaaggaaagaaagggaaatttgtcttaccccttccaatctgtgtcattcctgagtacgcgtttccacgccggcaggatggtgggccaccgtattacatgattgagacctacaagaatgtcactgatagcagccggtttaatagagatcatcccccagaacatcccattcaggatgactctgtttggtacattgatgattcagagaaggtattttcaaacattaatattatcaccaaagcaggggatctggcttctctgaaaaaggcctttgaatcaggaatacctgtggatatgaaggataattattacaaaactccgctaatgacggcgtgtgcaagtggaaacatagatgtggtcaagtttcttcttgaaaaagggtacgcgtctccgtcgggccaacaagacattgttgagcttcttgttgaatctggagctttaatagatgcagcttcaatcaacaactcaactcctttaaatagagccattgaaagctgcagactggatacagtaaaatacctacttgatattggtgctaaattccagctggaaaatagaaaagggcatagtgccatggacgttgcaaaggcatatgctgattatagaataattgatctgattaaagaaaagctagataacttgccgaaaccagcagaaaatcaaaaactaaaaggcaagacacctcctatactgaagactgaaggccctgaaattaagaaagaagaggaactgctgtcatcaatttatggtgtaccaaccacatcagagggaaagaaagtacagaagggtaatgtggttcatctgaattcattgattaccagtggttatactaagaaagtggatatcacatttattccacggaggatttggagtcctgaagccacaacagcagagctgatcaggaagagggaactacggcgagagaggtttacacatgaggtggacttcgacgattttatgatgccttttcagaagaacatcacagagaaagctcgagcactggaagctgccttgaagacctaagtcatagcagttatttcttggggtaaatgctttgaggcccagggaccaatctttggagaaagtagatatttccatcaaagccaaagcaatccatacaccaagaacttgttaccaagaatttctttttgctttaacaactataaatattcttagctgtctagagaaaagatgtatgttattttgaaatgaatggtatgtcattctggataaatccccaagcccctttatgaatgtagtaacacacccggcatgtgggttataaacgttacatagtcaaaagatttaaa

SEQ ID NO: 8536 - DNA, 838 bp, Homo sapiens
  SIMILAR (616)..(293): 441254mologous to Mus musculus contains transmembrane (TM) region,accession number AB030198,Smith-Waterman Score=199.
ggatggggcgcggctggacgcaggcagtcggtccccggtggtccggcggctcctcatgcactctgtacagcgtgggggcggatgggcgggggcaggggcatcagtctagaggctgcaggcctcctggtccaccgagcgcttcctcagctccttgcctggcttggggggcggcggggcgggcgcggcgggaggggcttcggcaaaatgcagaacggagttctcccctgactgcacccgcaggtaggccttgaccttgtggtgccgggccttgccgtcgctgaagtcgatgacggcgcactcgtagggtgccttcgtccgtgggcttcacccgggacaggcgcagcttgtgggagatgttgctgcccaccaccttgaccacatagcctaatccatggcactttacagtttccaaagcgttttcatatatgccttcaacaacagctaactggttcgaggcccacgcctgcttgtcggtccagtcccggtggctccgtacataccaccactggatctccagcgagtaggagggggagccgctgccgcggaaggagcaggccatctccacgtcctcgcccgtccgtgctgtcatgtcatggggtgtctctgtgaacagggccctctttgcccggctggctccttcagatctggcaaagatcagctcaaatgtcaccccccgaaaggtcctccttgaggatcccgagaaggtcccccacctcctgccctgccctgttgcctgcggcagctccaggaggacagggacacagagctcctgccgctggcagttgcgggcgcagagcagctgctcggcggatggaatgggtacggaattctccaccat

SEQ ID NO: 8537 - DNA, 2700 bp, Homo sapiens
  SIMILAR (1564)..(2679): 391254mologous to Arabidopsis thaliana polynucleotide phosphorylase,accession number Y14685,Smith-Waterman Score=663.
atgcttggtaagagcttggatctgttggatgacagtttggctgaaacaggaagcaaggagagcatccctcaaactgaggtaatagcaataagaggcagaagacaaacttttcagggacttaagagctgtgataaagagtttggggtttatgctgagtgtgatagggaaccagcaaatgtttttcatcgggcaagtggcaaggagggaaagactggcggaaagagaaatacacaaacctcagaagggagcagacaattcacacatttctacagtttaaccttcagtgccagtaagtgtcaggtagtagagcttcagagagaaacagaagtggctggttatgaaaaccggcagcacagctttttccctccctgtggtgtcttcccagataagaaagcaggcctgaatcccgggtgctgttcttccagaccacatgaaaggttggactggctaatagaaagaccaaaaggtggcaggagagcagagttgagcattcgttccctggctctccccctgcctcagcactgtggctctgacaatgactggatccctctacaacttcgactcttatctagagcctccttccacagtggacctaagctaacagagcatttccagttgccatggcagaaggaaaatggggcaaaggcaaataattcaatagctctcacagcttttactggagaaagtgatgaaatgccctcttactccacagcagggagctcatgccaaaatatttgctggatggcactaatgaccaccaccacaacagactgcgtaggagaaaacactgagaaattgaaatgggagaattccctgacaccccttgctgaacctctggaggctaacaagtccaagatcaaggcaccagaaaatctggtatctgtcctgagaaggagtacgcttcagccatattttaatgaacaagtgctaaatttctttgctcagataatttcttcaagctgtgtcatttggaaggaaaataaaacagcatgggacacagcaaaaagtggaaatcgaccctcaggcttcccagatagtatcaaggaaactgaaactcaccagatcggtagcctgctatggtctgaatgtttgtgtaaaccccagattcatacatcgaatcctaatcctcaatgtggtggtattggaagagagagaaaggaaatgtccttgggttccaaatgtggaaagttgtgcagagactctcaaggagaaagaagttttccgctttccaaagctgcatttgtcactcgctgttgtatcgtaactgaaagtaatgaactttccgatgctactgtccagaaggaactggcagggtgggatcgggcactcatccagttgcaggtgcgagcactattgagtagcacagggtctcaagctgtggccatggacttgggcaacaggaaattagaaatatcctctggaaagctggccagatttgcaaatggctctgctgtaatacagtcaggtgacactgcggtaatggccacagccgtcagtaaaacaaaaccttccccttcccagtttatgcctttggtggttgactacagacaaaaggctgctgcagtaggaatgactgatggagaatgtgttgttaacccaacaagaaaagaaatgtcttctagtactttaaatgtagtggttgctggagcacctaaaagtcagactgtcatgttggaagcctctgcagagaacattttacagcaggacttttgccacgctatcaaagtgggagtgaaatatacccagcaaataattcagggcatccagcagctggtaaaagaaattggtgttaccaagaggacacctcagaagttatttaccccttcacaagagattgtgaaacatgctcataaactcactatggagagactctatgcagtttttacagattatgaacatgataaaatttccagagatgaagctgttaacaaaataagattagatacagaggaacaactaaaagaaatatttccagaggtcgatctatatgagataatagaatccttcaatactgttgcaaaggaagtttttagaagtattattttgaatgaatacaaaagatgcgatggtcgggatttgactttacttcggaatataagttgtgaggtagatatgtttaaaacccttcatggatcagaattatttcaaagaggacaaacacagctgctttgtgctgttacatttgattcattagaatccagtattaagttggatcgagttataacaactataaatgggataaaagataaaaatttcatgctgcactatgagtttcctccttatgcaactaatgaaattgtcaaagtcaccggtataaatagaagagaacttgggcctggtgctcttgctgagaaagctttgtatcctgttattcccaaagattttccttttgccataagagttacatctgaagtcctagagtcaaatgggtcatcttctatggcatctgcatgtggtgtagcaatgggattggccaccaaaaccgatcttgagaagggtgaaatagaagattatcatttgctaacagatattctgggaattgaagcttacaatggtgacatggacttcaaaatagctggcactaataaaggaataactgcattacaggcagatattaaattacctggaataacaatgaaaattgtaatggaggctattcaacaagcttcagtggcaaaaaggagattttacagatcatga

SEQ ID NO: 8538 - DNA, 2397 bp, Homo sapiens
  SIMILAR (142)..(570): 401254mologous to Thermus thermophilus polynucleotide phosphorylase,accession number Z84207,Smith-Waterman Score=251.
  misc_feature (1)...(2397): n = a,t,c or g
tttcctccttatgcaactaatgaaattggcaaagtcactggtttaaatagaagagaacttgggcatggtgctcttgctgagaaagctttgtatcctgttattccccgagattttcctttcaccataagagttacatctgaagtcctagagtcaaatggtatgaggaggataggtcagccccccgccagcagccgccccgtccggagggtgagggcgcctctcccgccgcccctactggaagtgagagcccctctgcccgccagccgcccgtctggagaggtgctttgtaccgttacatttgattcattagaatctggtattaagtcagatcaagttataacagctataaatgggataaaagataaaaatttcatgctgcactacgagtttcctccttatgcaactaatgaaattggcaaagtcactggtttaaatagaagagaacttgggcatggtgctcttgctgagaaagctttgtatcctgttattcccagagattttcctttcaccataagagttacatctgaagtcctagagtcaaatgggtcatcttctatggcatctgcatgttggcggaagtttagcattaatggattcaggggttccaatttcatctgctgttgcaggccgtacaaattaggattggtcaccaaaacccgatcctgagaagggtgaaattagaaagattatcgtttgctgacagatatttttgggaattgaagattacaatggtgacatggacttcaaaatagctggcactaataaaggaataactgcattacaggctgatattaaattacctggaataccaataaaaattgtgatggaggctattcaacaagcttcagtggcaaaaaaggagatattacagatcatgaacaaaactatttcaaaacctcgagcatctagaaaagaaaatggacctgttgtagaaactgttcaggttccattatcaaaacgagcaaaatttgttggacctggtggctataacttaaaaaaacttcaggctgaaacaggtgtaactattagtcaggtggatgaagaaaccgttttctgtaatttgcaccaacacccagtgctaatgcttgagggcaagagactttcatttactgaaatctgcaaggatgatcaggagcaggcaattaggaatttgggagcagttatattacccgcccacaataactggaaatcagagatactgggtgtaatgggtaaaattatatcccaaatatggactggnggtactgcttcataacacacaacttgatcaacgaaagattaaacatcctactgccctaggattagaagttggcccaagaaattcaggtgaaatactttggacgtgaccccagccgatggaagaatgaggctttctcggaaaagtgcttcagtcgccagctacaaccgtggtcagaactttgaatgacagaagtagtattgtaatgggagaacctatttcacagtcatcatctaattctcagtgatttttttttttttaaagagaattcctagaattcctattttgtcctagggtgatgtgctgtagagcaacattttagtagtatcttccattggtggtaggatttctatataatataaatacattttaattatttgtactaaaatgctcatttacatgtgccatttttttaattcgggtaacccatatttgtttaattgtatttacattataaatcaagaaatatttattattaaaagtaagtcatttatacatcttagaaaaaattacatagttttgtttttacaattctgaaatatatgaaaaacttagatagaatatgtcatatgttattataacagatctcttcctacatcttatttttcttctttgtatacagtagtgacagtttaccttcagtcatcctacaggtcacctctgtgcccaacaactttacttgcctacaacggttcacaaactggaacaggccatattcaaagccagtgcctatttcttcagaactgttaacagatatagtgagttgagggagctaatctgatacacttttgataatataatgcctttcaaattagttaccaaatcataaacagagtggaataaatataaattagattctaactaggatgaatgtggtagtaatgatgtatatttttcaaatttacctaaacagaaagattattggctaaggcaggcggatcatgagatcaggagatcgagaccatcctggctaacacggtgaaaccccgtctctactaaaagtgcaaaaattagccgggcgtggtggcgcatgcctgtaatcctagctactcaggaggctgaggcagaagaatcacttcaacccaggaggtggaggttgtagtgagccgagattgcgccattgcactccagctcaggcaacaagagcaaaactccgtctc

SEQ ID NO: 8539 - DNA, 343 bp, Homo sapiens
  misc_feature (1)...(343): n = a,t,c or g
gtttaaataaatatgttagatacacgtgtatacatacacccatataactgaaatttagtagaagagggaaaaggagttaatgtaacaaattattttagctacaaaccccggtaatagagcacttgggggatgggatggggtgggttggtgagacaatcagaatggtaaattgattaaatgctcctaaccctgtaattttgtgcatagagcaccctatgctgtggaaataactgttcttagatttcattgtaactggactgttcaggttgcccagagggaaagaacattcctaattctaataaaataaacttttattttgttnnnnnnnnnnnnnnnnnnnnnn

SEQ ID NO: 8540 - DNA, 791 bp, Homo sapiens
  SIMILAR (172)..(38): 911254mologous to Homo sapiens putative RING finger protein,accession number AJ009771,Smith-Waterman Score=233.
  misc_feature (1)...(791): n = a,t,c or g
catgagtgtggcacgacactggcagggacaccaactgccttcttaagnactgcacctcaacccaggacatgttgtgctgctgcatctcctccattttctgtttcacctgagcatatagtttgtgctcaaagcgcaggctctgcatgtggttcatatagcgattacagtagaaccaggtacctctgcagggctgccctagatcgctgtcccattaagaaaaattgggtgatataattataacacataaactgtacataaaagctgattatcaaattaaaaccataatgaagtctcacttcacacctgttagaatggtttttatcaaaaagatgaaagataagtcttggcaaagataaagaaagaaggagactcttgatacactgttgatgggaatgtaaattagtatagccattatggaaaatggtatggggaggttccttaaaaaactgaaaacaaaaccaccacagaatccagcaatcccactactgtgtatatatgaaaaggaattgaaatcagtatgtcaaaggtatctctgtactctcacattcactacagcattattcacaatagccaagacatggaatccatgtaaagtgtccatcaatggatgaacacagaaagaaaacgtcatgtatgtacacacacacacgagtactcagcctcaaaaaaggaattctgttgtgacaacatggatgaacctggaggacattacactaagtgaaataagccaggcacagaaaagaaatactacatgatctcgcttatatgtagaaactaaaaaagttgaactc

SEQ ID NO: 8541 - DNA, 504 bp, Homo sapiens
  SIMILAR (3)..(134): 841254mologous to Homo sapiens Human nucleic acid-binding protein, NuABP-38,accession number B21034,Smith-Waterman Score=220.
atgttgttaaagtccaatatcctgatgctaaacctgttcgctgcaaatgtgggcgccaattttgctttaactgtggagaaaattggcatgatcctgttaaatgtaagaatctgccacgctgtcttccattttgtggctgtaccattttgcgttcccacgagaaatgatgagagttcctaccgctccacatcctggtccacatttggtagtcagtattttgattttggccattctaataggtactttgatggaaacctggagaagctctttgctgagtgtcatgtaattaatccaagtaaaaagtctcgaacacgccagatgaatacaaggtcatcagcacaggatatgccttgtcagatctgctacttgaactaccctaactcgaataagatatgtgaagtaggtaaaggcagagttgaaattgtgaggaagggtggtccaccatcccgtcccccattcctgaagcccctctgtggaatcttggtgctgctggaaactgcttga

SEQ ID NO: 8542 - DNA, 5122 bp, Homo sapiens
  SIMILAR (1)..(321): 991254mologous to Homo sapiens Human RingC1, an ubiquitin- protein ligase,accession number Y98059,Smith-Waterman Score=587.
  misc_feature (1)...(5122): n = a,t,c or g
atggactcggacgagggctacaactacgagttcgacgaggacgaggagtgcagtgaggaggacagcggcgccgaggaggaggaggacgaagacgacgacgagccggacgatgataccctggatctgggcgaggtggagctggtggagcccgggctgggcgtcggcggggagcgggacggactgctgtgcggggagacgggcggtggcggcggcagcgctctggggcccggcggtggcggcggcggcggcggcggcggtggtggtggcgggccggggcatgagcaggaggaggattaccgctacgaggtgctcacgtccgagtatgattctacaacacatggtggaatgtatccgggaggtcaacgaggtcatccagaatccagcaactatcacaagaatactccttagccacttcaattgggataaagagaagctaatggaaaggtactttgatggaaacctggagaagctctttgctgagtgtcatgtaattaatccaagtaaaaagtctcgaacacgccagatggaatacaaggtcatcagcacaggatatgccttgtcagatctgctacttgaactaccctaactcgtatttcactggccttgaatgtggacataagttttgtatgcagtgctggagtgaatatttaactaccaaaataatggaagaaggcatgggtcagactatttcgtgtcctgctcatggttgtgatatcttagtggatgacaacacagttatgcgcctgatcacagattcaaaagttaaattaaagtatcagcatttaataacaaatagctttgtagagtgcaatcgactgttaaagtggtgtcctgccccagattgccaccatgttgttaaagtccaatatcctgatgctaaacctgttcgctgcaaatgtgggcgccaattttgctttaactgtggagaaaattggcatgatcctgttccaatgtaagtggttaaagaaatgtattaaaaagtgtgatgatgacagtgaaacctccaattggattgcagccaacacaaaggaatgtcccaaatgccatgtcacaattgagaaggatggtggttgtaatcacatggtctgtcgtaaccagaattgtaaagcagagttttgctgggtgtgtcttggcccatgggaaccacatggaatctgcttgggacactgtacccgtataaaatgaggatgatgcaaaggcagcaagagatgcacaggagcgatctagggcagccctgcagagttacctgtttctactgtgaatcgctatatgaaccacatgcagagcctgcgcttttgagcacagactatatgctcaggctgacacagacaatggaggagatgcagcagcacaacatgtcctggattgaggtgcagttcctgaagaaggcagttgatgtcctctgccagtgtcgtgccacactcatgtacacttatgtcttccgctttctaccctcaaaaagaataaacccagtttccatatctttgagaataacccaaaggccagatttaangaaaatgccacagaggggctctcggggctaccttggaacgagaaaatttcccaaagattcctctgcaggatataaagcagaaagtaccaagaccaagtacaagatactgtgagagtcgacggaagggttttgttacaagcatgtgccatgaaggctatgaaaaagatctgtgggagtacattgaggactgagaaatggcccctgcattaaaatgaactctgaaaacttttaccatcctagaagtgctcatgcaattaaaacaaacaaaacaaagcaaacacaaacaaggagggcactaaggcctattctgacaccactgggtctggtagtaccagaattgttttgttaatgggaaagtttaagtaaattatattggtaataaaaagggtagataaacccattgtacaccagtattctaggccgccaaccaaaagtgtgacagaccacactaaaagccctccaactttaacttgtaacgtagcttcattctcaaagctgactcctttttttttcttttttcctttttcctgagtgtagtacagttaaaatttcaaaccagctcccttgacaactgcttttccatgttcaaaacccagcccattttggttggtacctttgggtaaaagggaccctccttccccccttccctcccccctacaccataccagatacacccccacacacagacctgacctcctcctttcctcctcatacccccaaggtcatgagtgaatgatgccttagttcccttgtaaagaaaatccttgggatggggaaaggggtaggcagcaagaggattcaacaaacgaaaaacataaaaactttgtatatgacttttaaaacaagaggacaacacagtatttttcaaaattgtatatagcgcatatgcatggacaaagcaagcgtggcacgtgtttgcataatgtttaattacaaaaaaatatttattctttaaaaatcttcaagattatgtctatttgctgtgcattttctttcagtttgcttatctttcccgggttggggttgggataaaggtgtgtcggtttagcacctctggaagacctatctagagctctttcactttcctgaggttattttgccctttctggtgttggtatgtctgttgccggccatgggcttcatgccttgaattcctgctcttgatcaggggacagggaggtcaagctctggactaatgccatgacctggatttaagggggtacagcagggagttttgtttgctacagcttcatggaatttaacctggtcccaacctaaatccccctccatgggcatccaggcctctacccaagcctttgtgtggcccatggttatggcacacagctgtaggcattcttaagtcccctgtcgcatccagtggaagcattttaaaatttcttttactttttggttttcccttaattgctgcttttcagattttagttatggctcgtctgctcaccccttctctacattagggtgtcaaagagaatgttttgctttaaatataaatagccattcatttagtctcagattgtgaatttaaaatggtggataccgaaattgcttgtgtgtgttgctgtgggtttggtttgaaggcaaacacccctagaacatgatattcccatctagtgcatttaaatagaaatcactgagtttgctgcttttttattgtcagcagataggagaattaataatgcattttagctgtgatgtccatttttatgaaattcctactaagagctatgttaaaagtaaaggatggtggtggttgtattaactatatacctgtttaggccattctggctgtggtatttttcaataggtcagcatctgtaaatcatgtcagttttatacaggagtgcagagtgaactaggcaactagattaagaggtctaaatatgaaataccagttgaggctgaggacctcttcgtcttcctttaaatgtcttttgcctagggagtgtttaccatttgtgaggcagctttgtctgctcgttacactgtacatcctattactccattgggaagtaggttcactttcctctggccttttgcctaagttagggctttgctgaatcaaccctacttttccttttagaaaaggttgttacagggagatttactgggcaactgttccttttccccatcaaaaatcaagtgaatgtttggctgagtataaatgcctgcttcccttaaacgcactgtgtcgctttagggggtccaactttaacctgtaccttttctcctttcctcccttgcccacctcaggtgccaaatctgaactcagtgtctgcttcttccattttccccgtctctctccccctcttcccccattatcccatatgacattattttacttcaaatgacagcatcaatcttaaaaagatatacattaaaactaaggagttttttttaaagaaagcgtgaataagttcctttccctggtaactttgaaaagcagtcagagttgctatatagatatatgtggctcctttaaaatgctttgtgtatgtgtggtgtttaaaaaaaaaaaaatcttaccagttaactttgcagtgtctaggtttgagtgtcataaatccacgtgttcctgttgcaacaaatacccaaaaattgtgtgtgcacttcctaataccagtcttcacccatggaggaacagtgctttttagagatgctttctatttcaatgttggcatactgcctgaggggtattgcagtttgtgggtgcattccctaatttgtatgatcaagatgaactggcccttttctacttccaagcttttaacagataccaccatatttgacagaattcccagagtgaattgcttgtgttattagtagattcagtgcccccagcatgggataggcaagccatgacagcttccctgtttcacctacagaagtcttatctgagggatctattcacagtaagcaccaaggtctccatgtcttgaggtcagtttcattgtcttttgaaaagtgcatgcttcatttgaacaattcattcagcagcagatggactttcagtgatttaaaaataaaattttgatccaaagctcagggacacaaaccacagtgggtaaaattgagtagcctattatattcagacttaaattatctgtaattttccacaacccagattgtatgtgttttatgtgtgttttaaataaatatggttagatacacggtgtatacatacacccatatacaacagatccaagactggctggacttcatttgaaatggttgaatctgctgtgtaataaagtggttccaccccatgattaggaactgaaatttcagtagaagagggaaaaggagttaatgtacacaaattattttagcctacaaaccccggtaatagaagcactttgggggatgggatggggtcggttggtgagacaatcagaatggtaaactcgattaaatgctcctaaccctgtaattttgtgcatagagcaccctatgctgtggaaataactgttcttagatttcattgtaactggactgttcaggttgcccagagggaaagaacattcctaattctaatacacataaacttttattttgttattccattaaaaaaaaaaaaaaagggcggccgct

SEQ ID NO: 8543 - DNA, 376 bp, Homo sapiens
  SIMILAR (292)..(215): 461254mologous to Saccharomyces cerevisiae unknown protein,accession number J02603,Smith-Waterman Score=57.
  misc_feature (1)...(376): n = a,t,c or g
cccacgcgtccgaaagaatnnnnnnnnnnnnnnnnnnnnnnnnnnnnnnnnnnnnnnnnnnacattctaaatactagagataactttacttaaattcttcattttagcagtgatgatatgcataagtgctgtaaggcttgtaactggggaaatattccacctgataatagcccagattctactgtattcccaaaaggcaatattaaggtagatagatgattagtagtatattgttacacactattttggaattagagaacatacagaaggaatttaggggcttaaacattacgactgaatgcactttagtataaagggcacagtttgtatatttttaaatgaataccaatttaattttttagtatttacctgttan

SEQ ID NO: 8544 - DNA, 408 bp, Homo sapiens
  SIMILAR (406)..(368): 1001254mologous to Homo sapiens epithelial protein lost in neoplasm beta,accession number BC001247,Smith-Waterman Score=61.
  misc_feature (1)...(408): n = a,t,c or g
aatacatggcttgggatggacaggctgttgaacctcactcttaacctgggagtcacgggagtcatcttcggcaggggtggaacggactgccaggctattctcatttgcagaaatcttttccccttcctgatgggtgatgcagacctcaggacctgggggcacattctccttttgctccattttatgaattttgatttcgccaccactggctttcagctcattcatacatatataaatnnnnnnnnnnnnnnnnnnnnnnnnnnnnnnnnnnnnnnnnnnnnnnnnnnnnnnnnnnnnnnnnnnnnnnnnnnnnnnnnnnnnnnnnnnnnnnnnnnnnnnnnnnnnnnnnnnnnnnnnnnnnnnnnnnngtatagttggttgagctgctttgtttggacacagctgcct

SEQ ID NO: 8545 - DNA, 996 bp, Homo sapiens
  SIMILAR (55)..(189): 971254mologous to Homo sapiens sterol regulatory element binding protein 3,accession number AF157325,Smith-Waterman Score= 246.
atggggagaacatatgcagccagcaaggtgaagacaatagatgggggagttttccagaagtttcaggcacctgcaagagagacctgcgtggaatgtcagaagacagtctatccaatggagcgtctcttggccaaccagcaggtgtttcacatcagctgcttccgttgctcctattgcaacaacaaactcaggcatgtgaagtgcaatggtttttccagtgagggcacctgtgactttcagcgtattcgaagtgactgtggtgattggtctttgatgtgcagctctgtggccctcgacgagcttgagcgagacaccaactgtgttttgcgagccgtggatgtcatggccccgggctgctttttcccagacccgacgcctgcgccccgctccgcctgtgcgtcaggtgctgtcgcgtgcgcagggctcgatgctgtgatgtgcgctcgcactgcccgtggccgctcgggtggcagacaggcgagcgcgcccccgcggcggagggcggggaccggggcggggccgctggtgctgatggagaatgctgcaaggacgcgtctggagcgcatggatgtgcgccgggtccagagtctgggcaggatgctgcgctgtggtttggcggcaaaatgcctggattgggccaacacacacctcttccggtgtgagcgggttgtccccggcaacacacctctcccacaaacaccaacgtcaaaaggggcggggggtgagcttggtgagagtgacccacccccacgtgtattggggacgtgggtcgcagtaccaccgaacaaaccactcaacaggggccagcgcagggaggggggaaggtgcatcttggaagggcctgtgtctgcctgcatgttattgctggtggcatgcacgtgtgtgggccagaaggcattaaaagataaaaatgatgtgtcggggaaacacctcgaaggactggcaggacaagttcacccgtccactggagtaccgccctccacggccaccctgtga

SEQ ID NO: 8546 - DNA, 1302 bp, Homo sapiens
  SIMILAR (631)..(951): 991254mologous to Homo sapiens Protein sequence encoded by clone p199-7 (PL mutet.rsT4),accession number P90826,Smith-Waterman Score=578.
atggccccagctgagatcccagatgacagcatcaaccgcctgacttgtcccggcgctctacctagcgcacctgtcgcgaccaagctgctaacacctactgctcctgcggccccgccccggaccccgcccaccgccgcgggggcgcgcacgccagacagcctcccgtgcggcctcgggctgagcgtgcgcgccaccggctacgtgcccagcgctcgcgtctgctccagtcgctctggcggtgcggggcgctggcgacgggacagggtttttgctgcccggggcctagtctacctcggcacgcttttctctgaaggagacacgcacttgcacgacgacaggtgccggcagcgctctgtggtcattttcggcgaggaccgctttcgctggagcgcgacgatgatcggcctgtcgcttgcggtattcggaatcttgcacgccctcgctcaagccttcgtcactggtcccgccaccaaacgtttcggcgagaagcaggccattatcgccggcatggcggccgacgcgctgggctacgtcttgctggcgttcgcgacgcgaggctggatggccttccccattatgattcttctcgcttccggcggcatcgggatgcccgcgttgcaggccatgctgtccaggcagcctaacttcgatcattggaccgctgatcgtcacggcgatttatgccgcctcggcgagcacatggaacgggttggcatggattgtaggcgccgccctataccttgtctgcctccccgcgttgcgtcgcggtgcatggagccgggccacctcgacctgaatggaagccggcggcacctcgctaacggattcaccactccaagaattggagccaatcaattcttgcggagaactgtgaatgcgcaaaccaacccttggcagaacatatccatcgcgtccgccatctccagcagccgcacgcggcgcatctcgggcagcgttgggtcctggccacgggtgcgcatgatcgtgctcctgtcgttgaggacccggctaggctggcggggttgccttactgcgaacgtgaagcgactgctgctgcaaaacgtctgcgacctgagcaacaacatgaatggtcttcggtttccgtgtttcgtaaagtctggaaacgcggaagtcagcgccctgcaccattatgttccggatctgcatcgcaggatgctgctggctaccctgtggaacacctacatctgtattaacgaagcgctggcattgaccctgagtgatttttctctggtcccgccgcatccataccgccagttgtttaccctcacaacgttccagtaa

SEQ ID NO: 8547 - DNA, 2130 bp, Homo sapiens
  SIMILAR (112)..(732): 991254mologous to unidentified cloning vector 29kD protein essential for the replication of mini F plasmid,accession number AB015619,Smith-Waterman Score=1079.
atggacgatatcccgcaagaggcccggcagtaccggcataaccaagcctatgcctacagcatccagggtgacggtgccgaggatgacgatgagcgcattgttagatttcatacacgcgttatcaatcacaagaaacgtaaaaatagcccgcgaatcgtccagtcaaacgacctcactgaggcggcatatagtctctcccgggatcaaaaacgtatgctgtatctgttcgttgaccagatcagaaaatctgatggcaccctacaggaacatgacggtatctgcgagatccatgttgctaaatatgctgaaatattcggattgacctctgcggaagccagtaaggatatacggcaggcattgaagagtttcgcggggaaggaagtggttttttatcgccctgaagaggatgccggcgatgaaaaaggctatgaatcttttccttggtttatcaaacgtgcgcacagtccatccagagggctttacagtgtacatatcaacccatatctcattcccttctttatcgggttacagaaccggtttacgcagtttcggcttagtgaaacaaaagaaatcaccaatccgtatgccatgcgtttatacgaatccctgtgtcagtatcgtaagccggatggctcaggcatcgtctctctgaaaatcgactggatcatagagcgttaccagctgcctcaaagttaccagcgtatgcctgacttccgccgccgcttcctgcagcacatatttgttcttcgggagcgccctgaaaccgtgttaatagatctcattcagaggacaaaggatgcagtaagagagctggacaatctgcagtatcgaaagatgaagaaactccttttccaggaggcacataatggaccagcagtagaagcacaggaagaagaagaggaatatggctggaatctggaccgagcctatgactatgtgaaagaaagacgaacggtaaccaagcccaacccaagcttcatgagacaactggaagagtatcaggggatcttgctggcaagacccaagagaactgcttacatttatggctccgtgtatcggcgttgtggttatgcagaccacaaggtagaaataaaacaccctggctgggcatccatcagcaggggtgtgctggtgtgtgacgagtgctgcagcgtgcaccggagcctgggacgccacatctccattgtcaagcaccttcgccacagcgcctggcctcccacgctgctgcagtcaggcttccccggcccctcgcgcagagccgctccacgggcagcccggggccccaccccacgcactgaagaggccgcctgggctgccatggccctgaccttcctgctggtgctgctcaccctggccacgctctgcacacggctgcacagaaacttccgacgcggggagagcatctactgggggcccacagcggacagccaggacacagtggctggaagccctgatcatggtcttctggcttttgcctaccataggcttgtccggtttctcctctgggtcctctgccctggttgggccttcttcctagtgaactcttctaggggtggggtcttcaaccccatcctccacccctgcccccgccacggccaagccagatttgcaggggtggggagggctgaggatgtcaccttcctctaccacccctgtgcccatccctggctgaagctccagcttgccctcctggcctatgcttgtatggctaacccttccctcacccctgacttcagcctcacgcaggatcgggtggacatcgagcagctggatccccgcggccggactcccctgcacctggccaccacgctggggcaccttgagtgtgcccgtgtgctcctggcgcacggcgagacgtgggcacgggagaatcgcagcggctggacagtgctccaggaggctgtgagtacccaggacctggagctggtgcagctggtgcttcggtaccgggactaccagcgggtggtgaagcggctggcgagcattcccgtgctcctggagaagctgcgcaagcaaaggagctatctccctggtaggcccctggcacggctgcggaggtccgtgaactctagcggggctgtgggcatgattaagagtgagagtatggggcgctggtttgtgggcccataa

SEQ ID NO: 8548 - DNA, 737 bp, Homo sapiens
  SIMILAR (4)..(639): 931254mologous to Homo sapiens Human SULU3 protein,accession number Y55937,Smith-Waterman Score=987.
agaaaacaggagtggctttcaaagcagaaggagaatatacagcatttccaagcagaagaagaagctaaccttcttcgacgtcaaagacaatacctagagctggaatgccgtcgcttcaagagaagaatgttacttgggcgtcataacttagagcaggaccttgtcagggaggagttaaacaaaagacagactcagaaggacttagagcatgccatgctactccgacagcatgaatctatgcaagaactggagttccgccacctcaacacaattcagaagatgcgctgtgagttgatcagattacagcatcaaactgagctcactaaccagctggaatataataagcgaagagaacgagaactaagacgaaagcatgtcatggaagttcgacaacagcctaagggtttgaagtctaaagaacttccaaataaaaaaagcagttttcagggttacctgcaaaattcccaaaccagacagtacaaagcattaagaaatcacctgctggagactacaccaaagagtgagcacaaagctgttctgaaacggctcaaggaggaacagacccggaaattagctatcttggctgagcagtatgatcacagcattaatgaaatgctctccacacaagccgtgagtttgctttttttggggcaaaacaaatttagtgccccttttcttccaccacctgaatgaaatcacagcaattaaagtactagttggaaatgatagctctcctg

SEQ ID NO: 8549 - DNA, 2226 bp, Homo sapiens
  SIMILAR (1134)..(832): 221254mologous to Homo sapiens Human SULU3 protein,accession number Y55937,Smith-Waterman Score=76.
tcactctctaacccgttcttttcttgaattgactatcttggggaatgcgacaaccatcttttcatctgtcaagtaggcctgttctcttatgccttcatgctgtgcgtgtgctgcttcctccatcttaatattgcagttgtcatcgagcagtatattttccagcttcaagtcccggtggaccacaccgttcttctttacctctccaatcactcctttctgctccttgggcctcttgcccttagtttgagttggttcacctttctcaaacatcatcttaagcctgttcagcggaacattatatttctctattttgcccgaagcatctgtgttttcactgatttctgatttttctacttcatgcctggattctcctagacaattttccatttttttactttctggtgagtggtctttaagatcctcaccgtccttgatgtggggatatcgacctgtatagttggttgagctgctttgtttggacacagctgcctggtacttggccattcgatcctttatagaggtttctgagaggcgtggaagttccagatttcgtctactctcatttttctccgagtcaaatgtagaagatgacaactgaccgccagagcgactggagcagacgcgagcgctgggcacgtagccggtggcgcgcacgctcagcccgaggccgcacgggaggctgtctggcgtgcccgccccgcggcggtgggcggggtccggggcggggccgcaggagcagtaggtgttagcagcttggtcgcgacaggtgcgctcttcttcttcctgtgcttctactgctggtccattatgtgcctcctggaaaaggagtttcttcatctttcgatactgcagattgtccagctctcttactgcatcctttgtcctctgaatgagatctattaacacggtttcagggcgctcccgaagaacaaatatgtgcttcaaactcttaggctgctgtcgaacttccatgacatgctttcgtcttagttctcgttctcttcgcttattatattccagctggttagtgagctcagtttgatgctgtaatctgatcaactcacagcgcatcttctgaattgtgttgaggtggcggaactccagttcttgcatagattcatgcttagcttcatacccattcaccatctccgtcttttcactgcgccagcccaggatgccagtcttgttcctctcaaaggagatattcttggtgtcaagctgagtggtgacgacgggcgcggtaagccggctcagcacctgttcctcagtgggctgagcagcagccagcagcagctcccggtcctgcccagccagtgccagagtctctgtgtacaccacccggcggtcgtggtcaatctccatgaccacggcgcttgtgtttcctgcctgcctgaccttggcccctgaagacaaagctgcggttccctcgctgccaggtcatgtggtcaaagcccaggagtgtggtgtctaccctcaggttctggccgctcttccacactttgtaggtgtcactagggcagatcttggacaccaggggcacccagctagtgaactcccatttcatctccacgtagaagtcctgggccttgcgcagcttctccaggagcacggggatgcccgccagccgcttcaccacccgctggtagtcccggtaccgaagcaccagctgcaccagctccaggtcccgggtactcacagcctcctggagcactgtccagccgctgcgattctccctgcccacgtctgcgccgtgcgccaggagcacacgggcacactccaaggtgccccagcgtggtggccaggtgcaggggagtccggccgcggggatccagctgctcgatgtccacctccctgacaaggtcctgctctaagttatgacgcccaagtaacattcttctcttgaagcgacggcattccagctctaggtattgtctttgacgtcgaagaaggttagcttcttcttctgcttggaaatgctgtatattctccttctgctttgaaagccactcctgtttttcttttttgggggtactctggttttcatttagctcctctttaagctgctcttttcgaagtttatactctcttttctgggactcgagaaaactattcagttctttcttctgttgggcctgaatatgttgctgaaattttttctcttcattggacatcactttagcctctttctccatagcagcctggtgtttcttgataagtttcacgaaa

SEQ ID NO: 8550 - DNA, 3465 bp, Homo sapiens
  SIMILAR (1111)..(2148): 661254mologous to Homo sapiens epithelial protein lost in neoplasm beta,accession number AF198454,Smith-Waterman Score=1000.
atgaacaccgaaaatctctcccagcactttagaaaggggaccctgactgtgttaaagaagaagtgggagaacccagggctgggagcagagtctcacacagactctctacggaacagcagcactgagattaggcacagagcagaccatcctcctgctgaagtgacaagccacgctgcttctggagccaaagctgaccaagaagaacaaatccaccccagatctagactcaggtcacctcctgaagccctcgttcagggtcgatatccccacatcaaggacggtgaggatcttaaagaccactcaacagaaagtaaaaaaatggaaaattgtctaggagaatccaggcatgaagtagaaaaatcagaaatcagtgaaaacacagatgcttcgggcaaaatagagaaatataatgttccgctgaacaggcttaagatgatgtttgagaaaggtgaaccaactcaaactaagattctccgggcccaaagccgaagtgcaagtggaaggaagatctctgaaaacagctattctctagatgacctggaaataggcccaggtcagttgtcatcttctacattttgactcggagaaaaatgagagtagacgaaatctggaacttccacgcctctcagaaacctctataaaggatcgaatggccaagtaccaggcagctgtgtccaaacaaagcagctcaaccaactatacaaatgagctgaatgccagcggtggcgaaatcaaaattcataaaccggagcaaaaggagaatgtgcccccaggtcctgaggtctgcatcacccattcaggaaggggaaaagatttctgcaaatgagaatagcctggcagtccgttccacccctgccgaagatgactccccaggtgactcccaggttaagagtgaggttcaacagcctgtccatcccaagccactaagtccagattccagagcctccagtctttctgaaagttctcctcccaaagcaatgaagaagtttcaggcacctgcaagagagacctgcgtggaatgtcagaagacagtctatccaatggagcgtctcttggccaaccagcaggtgtttcacatcagctgcttccgttgctcctattgcaacaacaaaactcagtctaggaacatatgcatctttacatggaagaatctattgtaagcctcacttcaatcaactctttaaatcttaagggcaaactatgatgaaggctttgggcacagaccacacaaggatcttattgggcaagcaaaaatgaaaacggaggagattttggagagaccagccccagcttgcaaatgcaagggagacccctcacagcccaggggtagaagatgcccctattgctaaggtgggtgtcctggctgcaagtatggaagccaaggcctcctctcagcaggagaaggaagacaagccagctgaaaccaagaagctgaggatcgcctggccaccccccactgaacttggaagttcaggaagtgccttggaggaagggatcaaaatgtcaaagcccaaatggcctcctgaagacgaaatcagcaagcccgaagttcctgaggatgtcgatctagatctgaagaagctaagacgatcttcttcactgaaggaaagaagccgcccattcactgtagcagcttcatttcaaagcacctctgtcaagagcccaaaaactgtgtccccaccttatcagaaaaggctggagcatgtcagagcagagtgaagagtctgtgggtggaagagttgcagaaaggaaacaagtggaaaatgccaaggcttctaagaagaatgggaatgtgggaaaaacaacctggcaaaacaaagaatctaaaggagagacagggaagagaagtaagggaaggtccatagtttggagatggagaatgagaatctttgtaggaaaatggtgccagactcccgattgaagatgataaccagcttcctccaaaacaacaatcttccaccaagaacccaagtcttcttgaatttggtccgagttttgtagacaaccaccttttgctgaaggaattcactactccagaatcagaaatcccaggatgtggaactctgggagggagaagtggtcaaagagctctctgtggaagaacagataaagagaaatcggtattatgatgaggatgaggatgaagagtgacaaattgcaatgatgctggggccttaaattcatgttagtgttagcgagccactgccctttgtcaaaatgtgatgcacataagcaggtatcccagcatgaaatgtaatttacttggaagtaactttggaaaagaattccttcttaaaatcaaaaacaaaacacaagaaacacaaaagcacacattctaaatactagagataactttacttaaattcttcattttagcagtgatgatatgcataagtgctgtaaggcttgtaactggggaaatattccaccctgataatagcccagattctactgtattcccaaaaggcaatattaaggtaggcaggatgattagttagtatattgttacacactattttggaattagagaacatacagaaggaatttaggggcttaaacattacgactggaatgcactttagtataaaggggcacagtttggtatatttttaaatggaataccaatttaattttttagtatttacctgttaagagattatttagtcttttaaattttttaggttaattttcttgctgtgatatatatgaggaatttactactttatgtcctgctctcttaaactacatcctggaactcgacgtcctggaggtataatacaacagaggcactttttgaggggcaattggaaaaacccaaccctacactccttcgggtggcttaggaggagatctggctggtcctccccaaaattaaggcttttggtatctggccaggtggaatttactgtaactccaaatgatttgctttcttttctggtggatatctgtgcttctcataattactggaaagctgcaatattttagtaataccttcgggatcactgtcccccatcttccgtgttagagcaaagtgaagagtttaaaggaggaagaagaaagaactgtcttacaccacttgagctcagacctctaaaccctgtatttcccttatgatgtcccctttttgagacactaatttttaaatacttactagctctgaaatatattgatttttatcacagtattctcagggtgaaattaaaccaactataggcctttttcttgggatgattttctagtcttaaggtttggggacattataaacttgagtacatttgttgtacacagttgatattccaaattgtatggatgggagggagaggtgtcttaagctgtaggcttttctttgtactgcatttatagagatttagctttaatattttttagagatgtaaaacattctgctttcttagtcttacctagtctgaaacatttttattcaataaagattttaattaaaatttg

SEQ ID NO: 8551 - DNA, 4482 bp, Homo sapiens
  SIMILAR (1)..(4332): 831254mologous to Homo sapiens adlican,accession number AF245505,Smith-Waterman Score=6143.
atgtgcttcagtccaaagaagttgtacaaacatgagattcacaagctgaaggacctgacttgtctgaagccttccatagagtctcctctgagacagaacaggagcaggagtattgaggaggagcaaaaacaagaagagaatggtgacagccagctcatcctggagaaaatccaacttccccagtggagcatctctttgaatatgactgatgagcacgggaacctggtgaacttggtgtgtgacatcaagaaaccaatggatgtgtacaaaattcacttgaaccaaacagatcctccagatattgacataaatgcaatggttgccttggactttgagtatccaatgacccaggaaaactatgaaaatctatggaaattgatagcatactacagtgaagttcccatgaagctacacagagagctcatgctcagcaaacaccccagagtcagctaccagtacaggcaagatgccgatgaagaagctctttactacacaggtgtgagagcccagattcttgcagaaccagaatggatcatgcagccatccatagatatccagctgaaccgacctcagagtacggccaagaaggtgctactttcctactacaaccagtattctcaaacaatagccaccaaagatacaaggcaggctcggggcagaagctgggtaatgattgagcctagtagagctgtgcaaaaagatcagactgtcctggaagggggtcgatgccagttgagctgcaatgtgaaagcttctgagagtccatctatcttctgggtgcttccagatggctccatcctgaaagtgcctgtggatgacccagacagcaagttctccattctcagcagtggctggctgaggatcaagtccatggagccatctgactcgggcttgtaccagtgcattgctcaagtgagggatgaaatggaccgcatggtatatagggtacttgtgcagtctccctccactcagccagccgagaaagacacagtgacaattggcaagaacccaggggagccagtgatgttgccttgcaatgctttagctatacccgaagcccaccttagctggattcttccaaacagaaggataattaatgatttggctaacacatcacatgtatacatgctgccaaatggaactctttccatcccaaagatgtgtggctgtcaaccagcatggggcagaccatatcacggtgggaatcacagtgaccaagaaaggttctggctcgccatccaaaagaggcagatggccaggtccaaaggctctttccagatgagagaagacatcgtggaggatgaaggggtctcaggcacgggagatgaagagaacacttcaaggagacttctacatccaaagcaccaagaggcgttcctcaaaacaaaggatgatgccatcaatggagataagaaagccaagaaagggagaagaaagctgaaactctggaagcattcagaaaaagaaccagagaccagtgttgcagaagatctcagagtgtttgaatcaagacgaaggataaacgtggcaaacaaacagattaatccggagcactgggctgatattttagccaaagtctttgggaaaaatctccctacaggcacagaagtatccccaattattaaaaccacaagttctccattcttgagcctagtagtcacaccacctttgcctgctgtttctccccccttggcatctccaatacagacagcaacaagtgctgaagaatcctcagcagatgtacctctactcagcgaaggaaagcacattttgagtaccatttcctcagccagcatgggactagaacaccacaacaatggagttattcttgttgaacctgaagtaacaagcacacctctggaagaagttgttgatgagtattccaagaagactgaggagatgacttccactgaaggcgacctgaaggggactgcagcctctacacttatatctgagccttatgaacaatctcctactctacacaccttagacacagtctatgaagagcccacccatgaagagacggaaacagagggttggtctgcagcagatgttggatcctcaccagatcccacatccagtgagtatgagcttccattggttgttgtctccttggctgagtctaagcctgtgcaatactttgacccagatttggagactaattcacaaccacatgaggataacataaaagaatacagttttgcacaccttactccaaccgccatcatctggtttaatgactctagtacatcactgtcatttgaggattctactgtaggggaacaaggtgtcccaggcaaatcacatctacaaggaccgacagagaacatccagcttgtgaaaagtagttttagcactcaagacaccttattgattaaaaaaggtatgaaagagatgtctcagacactacagggaggaaatatgctagagggagaccctacacactccagaagttctgagaatgagggccaagagagcaaatccatcactttacctgactccacactgggtataacgagcagtacgtctccagttaagaagcctgcggaaaccacagttgtcaccctgctacacaaagacaccacaacagaaacaactccaaggcaaaaagtggcttcatcatccaccatgagcactcacccttctcgaaggagacccaatgggagaaaattacaccctcacaaattccaccaccggcacaagcaaaccccacccacaacttttgctccattagagactttttctactcaaccaactcaagcaactgacattaagatttcaaatcaaatggagagttctctggttcctacatcttgggagattaacacagttaatacccccaaacagctggaaatggagaagaatgtagagctcatatcaaagggaactccacggagaaaacacgggaagaggccaaacaaacatcgatataccccttctacagtgagttcaagagcatctgcatccaagcccagcccttctccagaaaataaacatagaaacattgttactcccagttcagaaactacacttttgcctagaaatgtttctctgaaaactgagggcgtttatgattccttagattacacgacaaccaccagaaaaatacattcatctcaccataaagtccaagacacacttccagtcatgtataaacccacatcagatggaaaagaaattcaggatgatgttgccacaaatgttgacaaacataaaagtgacattttagtccctggtgagtcaattacaaatgtcacacaaacttctcgctccttggtctccactatgggagaatttaaggaagaatcctctcctgtgggctttccaggaattccaacctggaatccctcaaggaaagctcagcctgggaggctacagacagacatacatgttaccacttctggggaaacccctacagaccctccccttgttaacgagcttgaggatgtggattttacttctgagtttttgtcctctgtgacagtctccacaccatttcaccaggaagaagctggtttttccacaattctctcaagcataaaagtggagatggcttcaagtcaggtagaaactaccacccttggtcaagatcatcatgaaaccactgtggctattctccactctgaaactagaccacagaatcacatccttactgctgcctggatgaaggagccagcatctttgtcccctcccatgattctcctgtctttgggacaaaccaccaccactaagccagaacttctcagtccaagaacatctcaaatatgtaaagattccaaggaaaatgttttcttgaattacatggggaatccagaaacagaagcaaccccagtgaaaaatgaaggaacacagcgtatgtcagggccaaatgaattatcaacaccatcttctgaccacgatgcatttaacttgtctacaaagctagaattggaaaagcaagtatttgatagtaggagtctaacacgtggcccagatagccaccaccaggatggaagagttcatgcttctcatcaactaaccagaatccctgccaaacccatcctaccaacaggaacagtgaggctgcctgaaatgtccacacaaagcacttccagatactttgtaactttccagccacctcatcacgggaccaacaaaccagaaataactacatatccttctagggctttgccagagagcaaacagtttacaactccaagagtagcaagtacaactcctctcctatcacacatgtccaaacccagcatttctagaagcatccaccaaagcggctcaaagttctttgcaggaggaccgcctgcatccaaattctggcctcttggggaaaagccccaaatcctcaccaagtccccacagactgtgtctgtcactgctgaaacggacgctgtgttcccgtgtgaggcaataggaaaaccaaagcctttcgttacttggacaaaagtttccacatggacaggaagtgaggaactagaatggatgtga

SEQ ID NO: 8552 - DNA, 9012 bp, Homo sapiens
  SIMILAR (1084)..(6930): 981254mologous to Homo sapiens adlican,accession number AF245505,Smith-Waterman Score=9997.
atggatgagtttgcccctggaaaacatttggcaacatctggagacctttttggtgaccacaactatggaaggagaacatatcacacccttgaagtaaaatgtgctgaggaacatccagctgtttctgacccatttcagagacagagcctcagagccctatctcctctgtctgaagatctgcctccttcttctgggctccgttcaggactgaccaagttggagctacttatgattcacggcaatgagatcccaagcatccccgatggagctttaagagacctcagctctcttcaggttttcaagttcagctacaacaagctgagagtgatcacaggacagaccctccagggtctctctaacttaatgaggctgcacattgaccacaacaagatcgagtttatccaccctcaagctttcaacggcttaacgtctctgaggctactccatttggaaggaaatctcctccaccagctgcaccccagcaccttctccacgttcacatttttggattatttcagactctccaccataaggcacctctacttagcagagaacatggttagaactcttcctgccagcatgcttcggaacatgccgcttctggagaatctttacttgcagggaaatccgtggacctgcgattgtgagatgagatggtttttggaatgggatgcaaaatccagagggcattcatgtagaggctgcgctcattcgctgagccatgaaattcagctggccaagggattttgtgaaatgctcctgcttgtgcttgctgccttgtctcacagcatgtatgtgtgtgggtatgagtgtgagtacatgtcaaagaggcaatggggtgtggaactcacggaatgtgtttggactagagaagcacatatggtagtcatcactggcgggtggatggtaattggaaccacacatatgcgagaggccattgacgctgaagccgaccagaaaggaaaggggcttaggctcaagtcaaggaggacccagtcagcaaagattcaggcagaggaggaggaggaagcagtgactgagacccagttgtggccagaaaggacggagaaaattccagaggatttcatatccaggagaccaagaggacaacgaattctgaagtgtaaaaaggacaaagcttatgaaggcggtcagttgtgtgcaatgtgcttcagtccaaagaagttgtacaaacatgagatacacaagctgaaggacatgacttgtctgaagccttcaatagagtcccctctgagacagaacaggagcaggagtattgaggaggagcaagaacaggaagaggatggtggcagccagctcatcctggagaaattccaactgccccagtggagcatctctttgaatatgaccgacgagcacgggaacatggtgaacttggtctgtgacatcaagaaaccaatggatgtgtacaagattcacttgaaccaaacggatcctccagatattgacataaatgcaacagttgccttggactttgagtgtccaatgacccgagaaaactatgaaaagctatggaaattgatagcatactacagtgaagttcccgtgaagctacacagagagctcatgctcagcaaagaccccagagtcagctaccagtacaggcaggatgctgatgaggaagctctttactacacaggtgtgagagcccagattcttgcagaaccagaatgggtcatgcagccatccatagatatccagctgaaccgacgtcagagtacggccaagaaggtgctactttcctactacacccagtattctcaaacaatatccaccaaagatacaaggcaggctcggggcagaagctgggtaatgattgagcctagtggagctgtgcaaagagatcagactgtcctggaagggggtccatgccagttgagctgcaacgtgaaagcttctgagagtccatctatcttctgggtgcttccagatggctccatcctgaaagcgcccatggatgacccagacagcaagttctccattctcagcagtggctggctgaggatcaagtccatggagccatctgactcaggcttgtaccagtgcattgctcaagtgagggatgaaatggaccgcatggtatatagggtacttgtgcagtctccctccactcagccagccgagaaagacacagtgacaattggcaagaacccaggggagtcggtgacattgccttgcaatgctttagcaatacccgaagcccaccttagctggattcttccaaacagaaggataattaatgatttggctaacacatcacatgtatacatgttgccaaatggaactctttccatcccaaaggtccaagtcagtgacagtggttactacagatgtgtggctgtcaaccagcaaggggcagaccattttacggtgggaatcacagtgaccaagaaagggtctggcttgccatccaaaagaggcagacgcccaggtgcaaaggctctttccagagtcagagaagacatcgtggaggatgaagggggctcgggcatgggagatgaagagaacacttcaaggagacttctgcatccaaaggaccaagaggtgttcctcaaaacaaaggatgatgccatcaatggagacaagaaagccaagaaagggagaagaaagctgaaactctggaagcattcggaaaaagaaccagagaccaatgttgcagaaggtcgcagagtgtttgaatctagacgaaggataaacatggcaaacaaacagattaatccggagcgctgggctgatattttagccaaagtccgtgggaaaaatctccctaagggcacagaagtacccccattgattaaaaccacaagtcctccatccttgagtctagaagtcacaccaccttttcctgctatttctcccccctcagcatctcctgtgcagacagtaaccagtgctgaagaatcctcagcagatgtacctctacttggtgaagaagagcacgttttgggtaccatttcctcagccagcatggggctagaacacaaccacaatggagttattcttgttgaacctgaagtaacaagcacacctctggaggaagttgttgatgacctttccgagaagactgaggagataacttccactgaaggagacctgaaggggacagcagcccctacacttatatctgagccttatgaaccatctcctactctgcacacattagacacagtctatgaaaagcccacccatgaagagacggcaacagagggttggtctgcagcagatgttggatcgtcaccagagcccacatccagtgagtatgagcctccattggatgctgtctccttggctgagtctgagcccatgcaatactttgacccagatttggagactaagtcacaaccagatgaggataagatgaaagaagacacctttgcacaccttactccaacccccaccatctgggttaatgactccagtacatcacagttatttgaggattctactataggggaaccaggtgtcccaggccaatcacatctacaaggactgacagacaacatccaccttgtgaaaagtagtctaagcactcaagacaccttactgattaaaaagggtatgaaagagatgtctcagacactacagggaggaaatatgctagagggagaccccacacactccagaagttctgagagtgagggccaagagagcaaatccatcactttgcctgactccacactgggtataatgagcagtatgtctccagttaagaagcctgcggaaaccacagttggtaccctcctagacaaagacaccacaacagcaacaacaacaccaaggcaaaaagttgctccgtcatccaccatgagcactcacccttctcgaaggagacccaacgggagaaggagattacgccccaacaaattccgccaccggcacaagcaaaccccacccacaacttttgccccatcagagactttttctactcaaccaactcaagcacctgacattaagatttcaagtcaagtggagagttctctggttcctacagcttgggtggataacacagttaatacccccaaacagttggaaatggagaagaatgcagaacccacatccaagggaacaccacggagaaaacacgggaagaggccaaacaaacatcgatataccccttctacagtgagctcaagagcgtccggatccaagcccagcccttctccagaaaataaacatagaaacattgttactcccagttcagaaactatacttttgcctagaactgtttctctgaaaactgagggcccttatgattccttagattacatgacaaccaccagaaaaatatattcatcttaccctaaagtccaagagacacttccagtcacatataaacccacatcagatggaaaagaaattaaggatgatgttgccacaaatgttgacaaacataaaagtgacattttagtcactggtgaatcaattactaatgccataccaacttctcgctccttggtctccactatgggagaatttaaggaagaatcctctcctgtaggctttccaggaactccaacctggaatccctcaaggacggcccagcctgggaggctacagacaggcatacctgttaccacttctggggaaaatcttacagaccctccccttcttaaagagcttgaggatgtggatttcacttccgagtttttgtcctctttgacagtctccacaccatttcaccaggaagaagctggttcttccacaactctctcaagcataaaagtggaggtggcttcaagtcaggcagaaaccaccacccttgatcaagatcatcttgaaaccactgtggctattctcctttctgaaactagaccacagaatcacacccctactgctgcccggatgaaggagccagcatcctcgtccccatccacaattctcatgtctttgggacaaaccaccaccactaagccagcacttcccagtccaagaatatctcaagcatctagagattccaaggaaaatgttttcttgaattatgtggggaatccagaaacagaagcaaccccagtgaacaatgaaggaacacagcatatgtcagggccaaatgaattatcaacaccctcttccgaccaggatgcatttaacttgtctacaaagctggaattggaaaagcaagtatttggtagtaggagtctaccacgtggcccagatagccaacgccaggatggaagagttcatgcttctcatcaactaaccagagtccctgccaaacccatcctaccaacagcaacagtgaggctgcctgaaatgtccacacaaagcgcttccagatactttgtaacttcccagtcacctcgtcactggaccaacaaaccggaaataactacatatccttctggggctttgccagagaacaaacagtttacaactccaagattatcaagtacaacaattcctctcccattgcacatgtccaaacccagcattcctagtaagtttactgaccgaagaactgaccaattcaatggctactccaaagtgtttggaaataacaacatccctgaggcaagaaacccagttggaaagcctcccagtccaagaattcctcattattccaatggaagactccctttctttaccaacaagactctttcttttccacagttgggagtcacccggagaccccagatacccacttctcctgccccagtaatgagagagagaaaagttattccaggttcctacaacaggatacattcccatagcaccttccatctggactttggccctccggcacctccgttgttgcacactccgcagaccacgggatcaccctcaactaacttacagaatatccctatggtctcttccacccagagttctatctcctttataacatcttctgtccagtcctcaggaagcttccaccagagcagctcaaagttctttgcaggaggacctcctgcatccaaattctggtctcttggggaaaagccacaaatcctcaccaagtccccacagactgtgtccgtcaccgctgagacagacactgtgttcccctgtgaggcaacaggaaaaccaaagcctttcgttacttggacaaaggtttccacaggagctcttatgactccgaataccaggatacaacggtttgaggttctcaagaacggtaccttagtgatacggaaggttcaagtacaagatcgaggccagtatatgtgcaccgccagcaacctgcacggcctggacaggatggtggtcttgctttcggtcaccgtgcagcaacctcaaatcctagcctcccactaccaggacgtcactgtctacctgggagacaccattgcaatggagtgtctggccaaagggaccccagccccccaaatttcctggatcttccctgacaggagggtgtggcaaactgtgtcccccgtggagggccgcatcaccctgcacgaaaaccggaccctttccatcaaggaggcgtccttctcagacagaggcgtctataagtgcgtggccagcaatgcagccggggcggacagcctggccatccgcctgcacgtggcggcactgccccccgttatccaccaggagaagctggagaacatctcgctgcccccggggctcagcattcacattcactgcactgccaaggctgcgcccctgcccagcgtgcgctgggtgctcggggacggtacccagatccgcccctcgcagttcctccacgggaacttgtttgttttccccaacgggacgctctacatccgcaacctcgcgcccaaggacagcgggcgctatgagtgcgtggccgccaacctggtaggctccgcgcgcaggacggtgcagctgaacgtgcagcgtgcagcagccaacgcgcgcatcacgggcacctccccgcggaggacggacgtcagatatacaggtttatggcagtgcttttcaaccaagggtgattttgccccaagacaacacttggcaatatctgaagacacctttgattatcacaaatggggcagtgggtgcttctggtatctggtgggtggaggccagggacggtgctcaacaccctgcagtgcacaggatggcccatcacagattgtcatccatcctaccttcaatgtccatagtgccaaggtcagttttgatagcagaatcaaggtgtttgccaatgggaccctggtggtgaaatcagtgacggacaaagatgccggagattacctgtgcgtagctcgaaataaggttggtgatgactacgtggtgctcaaagtggatgtggtgatgaaaccggccaagattgaacacaaggaggagaacgaccacaaagtcttctacgggggtgacctgaaagtggactgtgtggccaccgggcttcccaatcccgagatctcctggagcctcccagacgggagtctggtgaactccttcatgcagtcggatgacagcggtggacgcaccaagcgctatgtcgtcttcaacaatgggacactctactttaacgaagtggggatgagggaggaaggagactacacctgctttgctgaaaatcaggtcgggaaggacgagatgagagtcagagtcaaggtggtgacagcgcccgccaccatccggaacaagacttacttggcggttcaggtgccctatggagacgtggtcactgtagcctgtgaggccaaaggagaacccatgcccaaggtgacttggttgtccccaaccaacaaggtgatccccacctcctctgagaagtatcagatataccaagatggcactctccttattcagaaagcccagcgttctgacagcggcaactacacctgcttggtcaggaacagcgcgggagaggataggaagacggtgtggattcacgtcaacgtccagccacccaagatcaacggtaaccccaaccccatcaccactgtgcgggagatagcagccgggggcagtcggaaactgattgactgcaaagctgaaggcatccccaccccgagggtgttatgggcttttcccgagggtgtggttctgccagctccatactatggaaaccggatcactgtccatggcaacggttccctggacatcaggagtttgaggaagagcgactccgtccagctggtatgcatggcacgcaacgagggaggggaggccaggttgatcctgcagctcactgtcctggagcccatggagaaacccatcttccacgacccgatcagcgagaagatcacggccatggcgggccacaccatcagcctcaactgctctgccgcggggaccccgacacccagcctggtgtgggtccttcccaatggcaccgatctgcagagtggacagcagctgcagcgcttctaccacaaggctgacggcatgctacacattagcggtctctcctcggtggacgccggggcctaccgctgcgtggcccgcaatgccgctggccacacggagaggctggtctccctgaaggtgggactgaagccagaagcaaacaagcagtatcataacctggtcagcatcatcaatggtgagaccctgaagctcccctgcacccctcccggggctgggcagggacgtttctcctggacgctccccaatggcatgcatctggagggcccccaaaccctgggacgcgtttctcttctggacaatggcaccctcacggttcgtgaggcctcggtgtttgacaggggtacctatgtatgcaggatggagacggagtacggcccttcggtcaccagcatccccgtgattgtgatcgcctatcctccccggatcaccagcgagcccaccccggtcatctacacccggcccgggaacaccgtgaaactgaactgcatggctatggggattcccaaagctgacatcacgtgggagttaccggataagtcgcatctgaaggcaggggttcaggctcgtctgtatggaaacagatttcttcacccccagggatcactgaccatccagcatgccacacagagagatgccggcttctacaagtgcatggcaaaaaacattctcggcagtgactccaaaacaacttacatccacgtcttctga

SEQ ID NO: 8553 - DNA, 4974 bp, Homo sapiens
  SIMILAR (4)..(4941): 851254mologous to Homo sapiens adlican,accession number AF245505,Smith-Waterman Score=7191.
atgaaagcttcaggaattctgaagtgtaaaaaggacaaagcttatgaaggcggtcagttgtgtgcaatgtgcttcagtccaaagaagttgtacaaacatgagattcacaagctgaaggacctgacttgtctgaagccttccatagagtctcctctgagacagaacaggagcaggagtattgaggaggagcaaaaacaagaagagaatggtgacagccagctcatcctggagaaaatccaacttccccagtggagcatctctttgaatatgactgatgagcacgggaacctggtgaacttggtgtgtgacatcaagaaaccaatggatgtgtacaaaattcacttgaaccaaacagatcctccagatattgacataaatgcaatggttgccttggactttgagtatccaatgacccaggaaaactatgaaaatctatggaaattgatagcatactacagtgaagttcccatgaagctacacagagagctcatgctcagcaaacaccccagagtcagctaccagtacaggcaagatgccgatgaagaagctctttactacacaggtgtgagagcccagattcttgcagaaccagaatggatcatgcagccatccatagatatccagctgaaccgacctcagagtacggccaagaaggtgctactttcctactacaaccagtattctcaaacaatagccaccaaagatacaaggcaggctcggggcagaagctgggtaatgattgagcctagtagagctgtgcaaaaagatcagactgtcctggaagggggtcgatgccagttgagctgcaatgtgaaagcttctgagagtccatctatcttctgggtgcttccagatggctccatcctgaaagtgcctgtggatgacccagacagcaagttctccattctcagcagtggctggctgaggatcaagtccatggagccatctgactcgggcttgtaccagtgcattgctcaagtgagggatgaaatggaccgcatggtatatagggtacttgtgcagtctccctccactcagccagccgagaaagacacagtgacaattggcaagaacccaggggagccagtgatgttgccttgcaatgctttagctatacccgaagcccaccttagctggattcttccaaacagaaggataattaatgatttggctaacacatcacatgtatacatgctgccaaatggaactctttccatcccaaagatgtgtggctgtcaaccagcatggggcagaccatatcacggtgggaatcacagtgaccaagaaaggttctggctcgccatccaaaagaggcagatggccaggtccaaaggctctttccagatgagagaagacatcgtggaggatgaaggggtctcaggcacgggagatgaagagaacacttcaaggagacttctacatccaaagcaccaagaggcgttcctcaaaacaaaggatgatgccatcaatggagataagaaagccaagaaagggagaagaaagctgaaactctggaagcattcagaaaaagaaccagagaccagtgttgcagaagatctcagagtgtttgaatcaagacgaaggataaacgtggcaaacaaacagattaatccggagcactgggctgatattttagccaaagtctttgggaaaaatctccctacaggcacagaagtatccccaattattaaaaccacaagttctccattcttgagcctagtagtcacaccacctttgcctgctgtttctccccccttggcatctccaatacagacagcaacaagtgctgaagaatcctcagcagatgtacctctactcagcgaaggaaagcacattttgagtaccatttcctcagccagcatgggactagaacaccacaacaatggagttattcttgttgaacctgaagtaacaagcacacctctggaagaagttgttgatgagtattccaagaagactgaggagatgacttccactgaaggcgacctgaaggggactgcagcctctacacttatatctgagccttatgaacaatctcctactctacacaccttagacacagtctatgaagagcccacccatgaagagacggaaacagagggttggtctgcagcagatgttggatcctcaccagatcccacatccagtgagtatgagcttccattggttgttgtctccttggctgagtctaagcctgtgcaatactttgacccagatttggagactaattcacaaccacatgaggataacataaaagaatacagttttgcacaccttactccaaccgccatcatctggtttaatgactctagtacatcactgtcatttgaggattctactgtaggggaacaaggtgtcccaggcaaatcacatctacaaggaccgacagagaacatccagcttgtgaaaagtagttttagcactcaagacaccttattgattaaaaaaggtatgaaagagatgtctcagacactacagggaggaaatatgctagagggagaccctacacactccagaagttctgagaatgagggccaagagagcaaatccatcactttacctgactccacactgggtataacgagcagtacgtctccagttaagaagcctgcggaaaccacagttgtcaccctgctacacaaagacaccacaacagaaacaactccaaggcaaaaagtggcttcatcatccaccatgagcactcacccttctcgaaggagacccaatgggagaaaattacaccctcacaaattccaccaccggcacaagcaaaccccacccacaacttttgctccattagagactttttctactcaaccaactcaagcaactgacattaagatttcaaatcaaatggagagttctctggttcctacatcttgggagattaacacagttaatacccccaaacagctggaaatggagaagaatgtagagctcatatcaaagggaactccacggagaaaacacgggaagaggccaaacaaacatcgatataccccttctacagtgagttcaagagcatctgcatccaagcccagcccttctccagaaaataaacatagaaacattgttactcccagttcagaaactacacttttgcctagaaatgtttctctgaaaactgagggcgtttatgattccttagattacacgacaaccaccagaaaaatacattcatctcaccataaagtccaagacacacttccagtcatgtataaacccacatcagatggaaaagaaattcaggatgatgttgccacaaatgttgacaaacataaaagtgacattttagtccctggtgagtcaattacaaatgtcacacaaacttctcgctccttggtctccactatgggagaatttaaggaagaatcctctcctgtgggctttccaggaattccaacctggaatccctcaaggaaagctcagcctgggaggctacagacagacatacatgttaccacttctggggaaacccctacagaccctccccttgttaacgagcttgaggatgtggattttacttctgagtttttgtcctctgtgacagtctccacaccatttcaccaggaagaagctggtttttccacaattctctcaagcataaaagtggagatggcttcaagtcaggtagaaactaccacccttggtcaagatcatcatgaaaccactgtggctattctccactctgaaactagaccacagaatcacatccttactgctgcctggatgaaggagccagcatctttgtcccctcccatgattctcctgtctttgggacaaaccaccaccactaagccagaacttctcagtccaagaacatctcaaatatgtaaagattccaaggaaaatgttttcttgaattacatggggaatccagaaacagaagcaaccccagtgaaaaatgaaggaacacagcgtatgtcagggccaaatgaattatcaacaccatcttctgaccacgatgcatttaacttgtctacaaagctagaattggaaaagcaagtatttgatagtaggagtctaacacgtggcccagatagccaccaccaggatggaagagttcatgcttctcatcaactaaccagaatccctgccaaacccatcctaccaacaggaacagtgaggctgcctgaaatgtccacacaaagcacttccagatactttgtaactttccagccacctcatcacgggaccaacaaaccagaaataactacatatccttctagggctttgccagagagcaaacagtttacaactccaagagtagcaagtacaactcctctcctatcacacatgtccaaacccagcatttctagtaagtttgctgacctaagaactgaccaatccaatggctcctacaaagtgtttggaaatagcaacatccctgaggcaagaaactcagttggaaagcctctcagtccaagaatttatcattattccaatggaagactccctttctttaccaacaggactctttctttttcacagttgggagtcacccggagaccccagataccctcttctcctgtcccagtaatgagagagagaaaagttaatccaggttcctacaataggatatattcccatagcaccttccatctggactttggccttccagcacctccactgttgcacactccatggaccatggtatcacccccaactaacttacagaatatccctatggtctcatccacccagagttctgtctcctttataacatcttctgtccagtcctcaggaagcatccaccaaagcggctcaaagttctttgcaggaggaccgcctgcatccaaattctggcctcttggggaaaagccccaaatcctcaccaagtccccacagactgtgtctgtcactgctgaaacggacgctgtgttcccgtgtgaggcaataggaaaaccaaagcctttcgttacttggacaaaagtttccacatggacaggaagtgaggaactagaatggatgtga

SEQ ID NO: 8554 - DNA, 1285 bp, Homo sapiens
  SIMILAR (710)..(1282): 861254mologous to Homo sapiens cytokeratin 18,accession number X12881,Smith-Waterman Score=777.
ttgagcttcaccacttgctccacattctccaccaactaccgatccctgggccctgcccaggcgcccagctacggcaccggccggtcagcagtgtggccagcgtctatgcaggcactgggaactctggttccaggatctccgtgtcctgctccacgagcttccggggcagcatggagtccggaggcctggccgcggggatgactggggtctggcaggaatgggaggcatccagaacgaggagaccatgcaaagcctgaacgactgctggcctcctacccggacagagtgaggcacctggagaccaagaaccggaagctggagagcaaaatctgggagcacctggagaagaagggaccccaggtcagagactggagccattacttcaagaccatcaggaaccagagggctcagagcttggcaattactgtagacaatgcctgcattgttctgcagatcaacaacacccatcttgctgctgatgactttagagtcaagtatgagacagagctggccatgtgccagtctgtggagagcaacatccatggactctgtaaggtcaatgatgacaccaacgtcactcggctgcagctggagacagagatcaaggctctcaaggaggagctgctcttcatgaagaagaaccacgaagaggaagtaaaaggcctacaagcccagattgctagctctgggttgaccatggaggtagatccccaaatctcagcacctcgccaagatcatggcagccatccgggcccaatatgacgagctggcttggaagaacggagaggagctggacaagtacttgtctcagcagattgaggagagcaccacagtggtcaccacgcagtctgccaaggctggagctgctgagatgacgctcacagagctgagatgtacagtccagtccttggagatcaacctgaactccatgagaaatctgaaagccagtttggagaacagcgtgagggaggtgaaggcctgctacaccttgcagatggagcagctcaacgggatcctgctgcacctggggtcagagctggcacagacccaggcaaagggacagtgccaggcccaggagtatgaggccctgctgaacatcaaggtcaagctggaggctgagatcgccacctactgccacctgctggaagatggcaaggacttcaatcttggagatgccctggacagcagcaactccatgcaaaccattccaaagaccaccacccaccagagagtggatggcaaagtggtgtctgagaccaacgacaccaaagttctgagacattaa

SEQ ID NO: 8555 - DNA, 1458 bp, Homo sapiens
  SIMILAR (47)..(577): 981254mologous to Homo sapiens cytokeratin 18,accession number X12881,Smith-Waterman Score=874.
tcgtccgcaaagcctgagtcctgtcctttctctctccccggacagcatgagcttcaccactcgctccaccttctccaccaactaccggtccctgggctctgtccaggcgcccagctacggcgcccggccggtcagcagcgcggccagcgtctatgcaggcgctgggggctctggttcccggatctccgtgtcccgctccaccagcttcaggggcggcatggggtccgggggcctggccaccgggatagccgggggtctggcaggaatgggaggcattcagaacgagaaggagaccatgcaaagcctgaacgacggcgtggcctcttacctggacagagtgaggagcctggagaccgagaaccggaggctggagagcaaaatccgggagcacttggagaagaagggaccccaggtcagagactggagccattacttcaagatcatcgaggacctgagggctcagatcttcgcaaatactgtggacaatgcccgcatcgttctgcagattgacaatgcccgtcttgctgctgatgactttagagtcaagtatgagacagagctggccatgcgccagtcatgtggagaacgacatccatgggctccgcaaggtcattgatgacaccaatatcacacgactgcagctggagacagagatcgaggctctcaaggaggagctgctcttcatgaagaagaaccacggaagaggaagtaaaaggcctacaagcccagattgccagctctggggttgaccgtggaggtaagatgcccccaaatctcaggacctcgcaaaagatcattggcagacatccggggcccaatattgacgagctgggctcgggaagaaccgagaagaggctagacaagtactggttctcagcagattgaggtgagcaccacagtggtcaccacacagtctgctgaggtttggagctgcttgagacgacgctcacagagctgagacgtacagtccagtcctttggagatcgacctggactccatgagaaatctgaaggccagcttggagaacagcctgagggaggtggaggcccccgtacgcccttacagatggagcagcttcaacggggatccctgctgcaccttgagtcagagctggcacagaccccgggcagagggacagcgccaggccccaggagtatgaggccctgcttgaacatcaagggtcaagcttggaggctgaaattcgccacctaccgccgcctgctggaagatggcgaggactttaatctttggtgatgccttggacagcagcaactccatgcaaaccatccaaaagaccaccacccgccggatagtggatggcaaagtggtgtcttgagaccaattgacaccaaagttctgaggcattaagccagcagaagcagtggtacccttttggggagcaggaggccaataaaaagttcagagttcaaaaaaaaaaaaaagaaaaagaaagttttg

SEQ ID NO: 8556 - DNA, 399 bp, Homo sapiens; identical to SEQ ID NO: 55
  SIMILAR (351)..(103): 431254mologous to Mycobacterium avium Gsa protein,accession number AJ251811,Smith-Waterman Score=118.

SEQ ID NO: 8557 - DNA, 287 bp, Homo sapiens
  SIMILAR (126)..(275): 401254mologous to Volvox carteri extensin,accession number X65165,Smith-Waterman Score=79.
tcagcttgcggggaggtgtggagggagaggcgcgagcgggaaccggggctgcgtgcggcgcttgcgggccagctggagttccgggtgggcgtgggcttggcggccccacactcggagcagccggccggcccgggccttagctgccttcccgccgggcagggctcgggacctgcagcccgccatgcctgagcctcccacccgcttcacgggctcctgtgcggcccgagcctctccgatgagcgccgccccctgctccacggcgcccagtcccatcgaccacccaaggg

SEQ ID NO: 8558 - DNA, 630 bp, Homo sapiens; identical to SEQ ID NO: 6413
  SIMILAR (20)..(535): 321254mologous to Mus musculus neural variant mena+ protein,accession number U72521,Smith-Waterman Score=123.

SEQ ID NO: 8559 - DNA, 1533 bp, Homo sapiens
  SIMILAR (861)..(917): 681254mologous to Homo sapiens Human secreted protein, SEQ ID NO: 7115,accession number G03034,Smith-Waterman Score=69.
ctattctggaaacagatgcctgaaagaacttttgtatctgcccaaggggtttttcctgaccactgcacaaagaaagaccatggcatttttgtagagaaagagtttaacagacacaagggtggccacgccatgtgggagactgagttgagaggtgacagcgtgctggcagtcctcacagccctcgctcgctctcagtgcctcctctgcctgggctcccactttggcggcacttgaggagcccttcagcccaccgctgcactgtgggagcccctttctgtgctggccaaggccacagctggctccctcagcttgcagggatgtgtggagggagaggcgcgagcgggaaccggggctgcgtgcacgcttgggggccagctggagttccgggtgggcgtgggtttggcgggcctgcactcggagcagccggccagccctgctcgcacaaggcagtgagggacttggcacccgggccagcggctgcagagggtgtactaggtcccccagcagtgccggcccaccggcgctgtgctcgatttctcgccaggccttagctgcctttccatggggcagggctcgggacatgcagcccgccatgcctgagcctcccacccactccatgggctcctgtgcggcccgagcctccccgacgagcaccaccccctgctccacggcacccagtcccatcgaccacccaagggctgaggagtgcgagcgcacagcgtggcactggcaggcagctccacctgctgccctggtgcgggatccactaggtgaagccagctgggctcctgagttctttgggtccacgctgcttttatgagctgtaacactcaccgcgaaggtctgcagcttcactcctgaagccagagagaccacgagcccacggggaggaatgaacaactccagacgcgccgccttaagaactgtaacactcaccgcgaaggtctgcggcttcactcctgaagccagcgagaccaccagcccatggtgattttcctcccttcgtcgcagtggttccccctccaaataccactcccttgatcccatggacacagcactcatagcagcttttaagtcctcctggctgaggaggtcctttgcctgggctatggcttcagctgaagagtctgccgagaaggcactgatgcaaagaggggctgcagccaggacaaaggagacccatgggcatcctttcacccacttattccacaagcgcttgcccctcttatgcgccagggctgagccaggaaccgggaggttgatggctgcctccacacccagggtggaacaggggcccacttgccggcgtctttcggtgaaggcgcaggctcggtttcggtctagagggatggtcgcggggggcgtattcgcctttgatcctttgccaacctgggacagtcttttcttccttttggccccatggatttctgcccaggcctggagctctggaaaccaggggggccgatgcacagccaggagcacgtgaggagccactgtatgggagatgctgccctctcctaggggctgaaccat

SEQ ID NO: 8560 - DNA, 457 bp, Homo sapiens; identical to SEQ ID NO: 6419
  SIMILAR (76)..(2): 641254mologous to Homo sapiens hypothetical protein,accession number AL162044,Smith-Waterman Score=83.

SEQ ID NO: 8561 - DNA, 1410 bp, Homo sapiens; identical to SEQ ID NO: 6421
  SIMILAR (1)..(1050): 921254mologous to Homo sapiens KIAA0433,accession number AB007893,Smith-Waterman Score=1666.

SEQ ID NO: 8562 - DNA, 801 bp, Homo sapiens; identical to SEQ ID NO: 6226
  SIMILAR (1)..(168): 1001254mologous to Homo sapiens Neuron-associated protein,accession number B01398,Smith-Waterman Score=298.

SEQ ID NO: 8563 - DNA, 2234 bp, Homo sapiens; identical to SEQ ID NO: 3179
  SIMILAR (852)..(1361): 451254mologous to Felis silvestris polyprotein,accession number X51929,Smith-Waterman Score=350.

SEQ ID NO: 8564 - DNA, 444 bp, Homo sapiens; identical to SEQ ID NO: 2752
  SIMILAR (399)..(187): 641254mologous to Homo sapiens hypothetical protein,accession number AL162044,Smith-Waterman Score=229.

SEQ ID NO: 8565 - DNA, 843 bp, Homo sapiens
  SIMILAR (474)..(61): 941254mologous to Cloning vector pSacBII SacB,accession number U09128,Smith-Waterman Score=684.
tcagccttggcaaaaacaccttctaaataactgagacttgctcagaaattcaggaacacaaaccaaaggctcagggtagaaaaacttggaattatcgctgtctttaaagacacggcccgcgtttttccagctgtcgattgagttgtcgccgaccttttgataaaacatgtagattgatgtgtcatcagcgtctttcgggcttcccgcaagagcaaacacaacgtgatagccgttgtattcagctactgttccgtcagcgttttgcagcggccagctgtcccacacatcaagtccttttgcagactcaatatttttaatcgttgattgatcgaattgaggcacttggtatttttcgttttgctgctgtttagggatctgcagcatatcatggcgtgtaatatgagagacgccgtacgtttctttgtatgctttttggttattttctttcgcgaaggcttgagtcgctcctccggcgctgtgatcgatttctcgccggaccttagctgctttcccgcggggcagggctcgggacctgcagcccgccatgcctgagcctcctacccactccatgggctcctgtgctgccccagcctccctgacgagcaccaccccctgctccacggcgcccagtcccatcgaccacccaagggctgaggagtgcaagcgcacggcacgggactggcaggcagctccacctgcagccccggtgcgggatccactaggtgaagccagctgggctcctgagttgttgcccactctcagttccttgaaatgtgcctcttcagtgtggcagtgttcttcatcgaagcatgcaagccacaaggccccagggagagccagcat

SEQ ID NO: 8566 - DNA, 1449 bp, Homo sapiens
  SIMILAR (634)..(1446): 571254mologous to Homo sapiens ORF2 contains a reverse transcriptase domain.; ORF2,accession number M80341,Smith-Waterman Score=834.
atgcccgccgccgcgccgcccgcgtccgcgtgctccgccacaccatcgtccgcccgccgcaggggctcggacagccgcgccggggaccggagccggcacgggcccgcgagccgtgttggaacagggcctggacagcaaatgaggaagacttattgcagaaattcagagcctagtgacctggaccagggtggaggcagcagaggaggacccaggaggcagtccaaatgtgtccggaattggtgggttcttggtctcactgacttcaagaatgaagccgcggaccctcacgactcaggagcccagctggcttcacccagtggattccgcactagggctgcaggtggagctgcctgccagtcccgcgccatgcgctcgtactcctcagcccttgggtggtcgatgggactgggcgccgtggagcagggggtggtgctcgtcggggaggctcaggccgcacaggagcccatggagtgggtgggaggctcaggcatggtgggctgcaggtcccgagccccacccgcgggaaggcagctaaggccggacaagaaattgagcacagcgccagtgggccggcaccgctggagacccagcacaccctccgcagccactggcctgggtgctaagtccctcattgcccggggccagcagggccggctggctgctccgaacaaaacagacttcaaagcaagagcagttaaaaaagacaaagagggacattatataatgataaaaggccttgtccaaaaggaaagtatcacaatcataaatatatatgcacctaacactggagctcccaaatttacaaaacaattaccactagacctaagaaataagacagacagcaacacaataatagtggggtatttcagtactccactgacagcactaaacaggtcatcaagacagaaagtcaacaaagaaacaatggatttaaactataccctggaacaaatggacttaacagatatttacagaacattctacccaacaaccgctgaatatatattctattcatcagagcatggaactttctccaagacagaccgtatgataggacacaaaacaagtcttaataaatttaagaaaattgaaattataccaagtactctccctgaccacagtggaataaaactagaaatcaactccaaaaagaaccttcaaaaccagacaaatacatggaaattaaataacctgctcctgagtgatcattgggtcaacaatgaaatcaagatggaaattttaaaattcttcaaaccaaatgataatagtgacacaacctatcaaaacctctgggagacagcaaaggcggtgctaagaggaaagttcatagccctaaatgcttacatcaaaaagtctgaaagagcacaaatagacaatctaaggtcacacctcaaggaactagagaaacaagaacaaaccaaacccaaacccagcagaagaaagaaatag

SEQ ID NO: 8567 - DNA, 626 bp, Homo sapiens
  SIMILAR (233)..(3): 461254mologous to Mus musculus human homolog is GPI-anchored protein,accession number X89571,Smith-Waterman Score=170.
ctcagactttcatttctttcagggcaggtcagttttgaaaacttaatgaggtagtcaagttcttttgaaggcaaatacactgcaccattcaaaccccctttgaagtctttttgtacgtgctcctgtgtcaagttctgcaatacatactgaacttgaagtatagttcgaagctttttcttctcagcctcaagttttagcatgtgctcccttctctgggccttcttttgcgcttttagtagccgggccagtggctgcggagggtgtactgggtcccccagcagtgccggcccaccggcactgcgctcgatttctcgccgggccttagctgccttcccacggggcagggctcgggacctgcagcccgccatgcctgagcctcccaccccctctgtgggctcctgtgcggccgagcctccccgacaagcaccaccccctgctccatggtgcccagtcccatcgaccacccaagggctgaggaatgcgagcacacggcgcaggactggcaggcagctccacatgatatggcccttccctgcatctctgaagtcctctcctgccacactcccctgtgagcactgtgctccaacaacactgaccttttcttgttcctcaaacatgcaaaccat

SEQ ID NO: 8568 - DNA, 3594 bp, Homo sapiens; identical to SEQ ID NO: 2758
  SIMILAR (160)..(636): 851254mologous to Mus musculus retinoid X receptor interacting protein No.6,accession number U09416,Smith-Waterman Score=711.

SEQ ID NO: 8569 - DNA, 1513 bp, Homo sapiens
  SIMILAR (381)..(136): 981254mologous to Homo sapiens cell recognition molecule Caspr2,accession number AF193613,Smith-Waterman Score=432.
ctaactgggaggcaccccccagtaggggcagactgacacttcacacggccgggtactcctctgagacaaaacttccagaggaacgatcagatggcagcattcgcagttcacgaaaaaccgctgttctgcaaacaccgctgaatccaggtgatccaggtgccaggggtcggtggcggacgacatgggggagagggtcagcggcgaggccccgcagttggactccaccagctcgccctggatgtggacgtgagccgaggcgtttgtctgcctcaaggcggccttgagaggggcgatctggttgaactggactctggagaggcaaccagtgaatcctggggtgttgtatttgtgaatctcttggtcaattttccctgtttctagtggatcccgcactggggctgcaggtggagctgcccgccagtcctgcaccgtgcgctcgcattcctcagcccttgggtggtcgatgggactgggcgctgtggagcagggggtggcgctcgtcggggaggctcgggccgcacaggagcccatggagtgggtgggaggctcaggcatagcgggctgcaggtcccgagccctgccccgcgggaaggcagctaaggctcggtttgagtcctgctggccggccctgatgaaggatgctcatggagtggtgatcgtcttcaatgctgacatcccaagccaccggaaggaaatggagatgtggtattcctgctttgtccaacagccgtccttacaggacacacagtgtatgctaattgcacaccacaaaccaggctctggagatgataaaggaagcctgtctttgtctggcggcggcggtaaccgcaggcaaggcaggagctgccctcggggctggactctcggggtggcaggggctgcagctgcagctgctcagggcaaggaagcccgtgggctccacgtgggctccacgtgggctcctgcaacgccgctggggaatctctcgcccgctgccccctattctggagaccttgattccaaccactgcccggaggaggtagtggaggcgagcccggtgttaatgagccccgaaggcccaagcaaagacctttatttgcactcattttcacagagtggaaaaactgttttggccaactttctgacagaatcttctgacatcactgaatacagcccaacccaaggagtgaggatcctagaatttgagaacccgcatgttaccagcaacaacaaaggcacgggctgtgaattcgagctatgggactgtggtggcgatgctaagtatgtttcctttaaagaaagtcacttcatcaaatggtttaaaaatcagctgcccaagccaggggcggtggctcacacctgtaattccagcactttgggaggccaaggtggcgccatggccacccccgggacgctcagggctgcggctccggagcccgcatttgaatttccccagaaaaccataagcatgcaagtaaaagttgccaaacgcctcgtttgcataactcgcttgaatttagcttttctcatttag

SEQ ID NO: 8570 - DNA, 952 bp, Homo sapiens
  SIMILAR (832)..(948): 691254mologous to Homo sapiens Human secreted protein, SEQ ID NO: 7083,accession number G03002,Smith-Waterman Score=134.
atgtgggaaagtttgacactttctagagacttcttgaatggctttgaccaaaatgctgatagtggtatagacaataaagttcaggttgaggtggcctcagatgaagatgaggaacttgttgggaactggaataaagaaagggaaaacccattttctggggagaaattaaagccagctgccgaaatttgcataagttacaaggagccaaatgctaatcaccaagataatggggaaaatgtcgccagggcatgtcagagacctttgcagcatcccctcccatcacaggcccagaggcctaggaggaaacaacggtttcctgggccaggttcagggcccacctgggacttggtgccatgcatcccaggtgctcctgccttgactaaaaggggccaaggaaaccaaaatcatggtattctgaaggccagagatatgaatctccgtcatttggcatcccactgggatcggatttgtttcactactaatgctctgctgctaaaaccatacaagttgcctccctctaggcccagggactactgcggaagagctgccttccctcgtggcagggttcgggacctgcagcccgccatgcctgagcctcccacccactccatgggctcctgtgcggcccgagcctccccgatgagcaccaccccctgctccacagcgcccagtcccatcgaccacccaagggctgaggaatgcgagcacacggcacaggactggcaggcagctccacctgcagccccggtgcgggatccactaggtgaagccagctgggctcctgagttctttgggtccatgctgcctttatgagctgtaacatttatcgcgaagatctgcagcttcactcctgagcccagcgagaccacaagcccaccaggaggaacgaacaactccagacacgctgctttaagagctgtaacactaaccgcgaaggtctgcagcttcactc

SEQ ID NO: 8571 - DNA, 858 bp, Homo sapiens
  SIMILAR (218)..(370): 411254mologous to Myxococcus xanthus response regulator FrzZ,accession number AF049107,Smith-Waterman Score=105.
atgtggccacgcctggattcaaggcagtctgaggaggtgagtgtttcaaagaggcacatggatgccacagacaaaatcaagtttccatggttgaaggagaagaggacgatagagtttggggaggcagcaggctacgtctgccacagaagatataaagatatggagccacacgagaagatgggggaggctgccaaaaaagtccactgggtacagatgaggagcagggctcgggacctgcagcccgccatgcctgagcctcccacccactcaaagggctcctgtgcggcccgagcctccccgacgagcaccaccccctgctccacgacgcccagtcccatcgaccacccaagggctgaggagtgcaagcacacggcacaggactggcaggcagctccacctgcagccccagtgtggggtccactaggtgaagccagctgggctcctgagtctggccctagaaacaagaaccaatccagcagcaacaagcatctctggcagtctatcatttcccttcaactgaaatcagatcttcttaaagaaatgcttggctctcagactgggaacggaaatgtacaagatgtgcttcgatatctggtcaaatcagaaactcaaaaagctatcaaagtctctttggactgtgtcagaaagagatactatcggtcttccctcagtctgcagctgaaactctgtgactgctgggggcaggccctgttctcttcagctctcactctggaccccaaggaggttgtggtccgagatttagaagaactttccaactataaaactaccctagaaggaagtggaatctttgactctgtggctcgagtgagggaggagtcagaagcagaagggacatga

SEQ ID NO: 8572 - DNA, 653 bp, Homo sapiens
  SIMILAR (1)..(222): 721254mologous to Homo sapiens putative p150,accession number U93568,Smith-Waterman Score=278.
atggccatactgccaaaagcaatctacacattcaatgcaattcccatgaaagtaccaacattattcctcacagagctagaaaaaacaatcccaacattcatatggaaccaaaaaagagcccacataggcaaagcaagactaagcaaagagaacaagtccgaaggcatcacattacctgacttcaaactatactatgaagctatagtcaccaaaacagcatgccagccagccctgctggccccgggcagtggggaacttagcacccgggccagtggctgcggagggtgtactgggtcccccagcagtgccagcccaccggcgctgcgctcgatttctcaccgggccttagctgccttcccgcggggcagggctcgggacctgtagcccgccatgcctgagcctcccacccactccatgggctcctgtgcggcccgagcctccccaaggagcaccaccccctgctccacggcgcccagtcccatcgaccacccaagggctgaggagtgcgagcgcacggcacgggactggcaggcagctccacctgcagccctggtgcgggatccactgggtgaagctagctgggctcctgagttgtttgggtccacgctgcttttaagagctgtaacactcaccgcgagggtccgtggcttcat

SEQ ID NO: 8573 - DNA, 642 bp, Homo sapiens
  SIMILAR (490)..(555): 771254mologous to Homo sapiens Human secreted protein, SEQ ID NO: 7678,accession number G03597,Smith-Waterman Score=96.
tcagcccgccgccgcactgtgggagcccctctctgggctggccgaggtcggagccggctccctctgcttgcaggaagatgtggagggagaggcgtgggagacgatcacgggccagcgcgagttccaggtgggtgtggccccacactcggagtggccggccagcgccactggccccatgcaagtgaagacttctgtccccagctgcctgcagatctggtaccatgatctttccctcaatccatccatcccaatgcaggatgattggtttaggttggaaaaaataaagttctgttcataacgccactccatgggctcctgtgccgcccgagcctcccggacgagcaccaccccctgctccagggcggccagtcccattgaccacccaagggctgaggagtgcgagcgcacggcgcaggactggcaggcagctccacctgcagccccagtgcgggatccactgggtgaagccagctgggctcctgagtcatgagggtccgcggcttcgttcttcaagtcagtcagaccaagaacccaccaactccggacacagtggcatgtgcctgtagtcccacctgtggtgatcccccttgcaaagtcaatctgagcggctggcaggctttccttcaagccttttccattcat

SEQ ID NO: 8574 - DNA, 2850 bp, Homo sapiens
  SIMILAR (1289)..(1378): 731254mologous to Homo sapiens putative p150,accession number U93563,Smith-Waterman Score=118.
atgagaaaattttgcaggggcagagatattgagaaacacagcatccagttctacccactcctgggaccctcttttactgtcttcgttaagcatcttctgcatataacttgtggcctgcagcacctggctaagatcttcctccactccctccctgggagactgcacagcctagctgggaaagtcaaagccatcaaggacccagaaaatgttacaagggctcctcaaaagccagcaagtgccagaaccaccacccaagcagctggttgcagagccgactccccgttcttaaagggcctgagcctatgggaccggaagagctccacagtctgcctgtctctggtggtggaagaccactctcagaagcgcgggctgaggcttgcacacagtcagattcccgcgcagcacgtgcacagacccacctctgctcagagtgagcctaaggtaggagcaggagagagagcatgtcttaagagagaaagccaccttcatgaacagacgctcacctgctccattaatgccaagagcagccagccagccctgctggcccggggcaatgggggacttagcacccgggccagtggctgcggagggtgtaccgggtcccccagcagtgccggcccaccggcgctgtgctcgatttctcgccgggctttagctgccttcccacggggcagggctcgggacctgcagcccgccatgcctgagcctcccacccactccatgggctcctgtgcggcccgagcctccccgacgagcaccaccccctactccacggcgcccagtcccattgaccacccaagggctgaggaatgtgagcgcacggcgcaggactggcaggcagcttcacctgcagccccggtgcgggatccactaggtgaagccagctgggctcctgagtctggaactaacatttccattacacctggaaatgccacatttgtgacccgggtgcagggacaggcttggtttgcctcatgtatcactggtcatgatatgtctagtttaaaaacttccagtgtcgtggtattaaggagacaatctgaggcacttctaccagccaatttgacatgcaattggcaagattcttctgcccttgccaccttagaaagtgccctgtcccaggtcagacacaaaagattcacatttacacttatggtctttacaggctcagccatagacattatggcaactgttagcattgctgttgtatctattactgaatcagtacaaacaactgcttttgtagataatctggccaaaaatatatgtgatgaacttctcctacaggacatggatgaagctggaaaccaacattctcagcaaaataacacaagaacagaaaaccaaacaccacatgttctcactcataagtgggagttgaacaatgagaacatacggatacagggaggggaacattacatactggggcctgttggtggcaggttgccaacatccaaactcgctgttgattgccagctcctgctccttgcagcagcccagcatgctctctgctggtgccaaaatacccttccaccaaaccccgctaacttctggaactgtcctagagggtttcctaccctagcaagtgagcttgcctatgtcagccctaaccttgctcttgtcattcagctgagccagaggaaaaaatttgagctattctggggtggtctacagagaaccatcttctttcccttcagtgttctcagaatattgactgttgatgaacaagccaatgatgtgagtgtggctgcagcaaggacccttcaaattttcagagatgacatgattgtatatctagaaaaccccattgtctcagcccaaaatctccttaagctgataagcaacttcagcaaaatctcaggatacaaaatcaatgtacaaaaatcacaagcattcttatacaccaacaacagacaaacagagagccaaatcatgagtgaactcccattcacaactgcttcaaagagaataaaatacctaggaatccaacttacaagggatgtgaaggacctcttcaaggagaactacaaatcactgctcaaggaaataaaagaggatacaaacaaatggaagaacattccatgctcatgggtaggaaaaatcaatatcgtgaaaatggccatactgcccaaggtaatttacagattcagtgccatccccatcaagctaccaatgactttcttcacagaattggaaaaaactactttaaagttcatatggaaccaaaaaagagcccacactgccaagtcaatcctaagtcaaaagaacaaagctggaggcatcacactacctgacttcaaactatactacaaggctacagtaaccaaaacagcatggtactggtaccaaaacagagatatagatcaatggaacagaacagagccctcagaaataacgctgcttatctacaactatctgatctttgacaaacctgagaaaaacaagcaatggggaaaggattccctatttaataaatggtgctgggaaaactggctagccatatgtaggaagctgaaactggatcccttccttataccttatacaaaaatcaattcaagatggattaaagacttaaatgttagacctaaaaccataaaaaccctagaagaaaacctaggcattaccattcaggacataggcatgggcaaggacttcttgtctaaaacaccaaaagcaatggcaacaaaagacaaaattgacaaatgggatctgattaaactaaagagcttctgcacagccaaagaaactaccatcagagtgaacaggcaacctacaaaatgggaaaaaattttcgcaacctactcatgtgaaaaagggctaatatccagaatctacaatgaactcaaataa

SEQ ID NO: 8575 - DNA, 2040 bp, Homo sapiens
  SIMILAR (524)..(360): 491254mologous to Homo sapiens hypothetical protein,accession number AL162044,Smith-Waterman Score=125.
ggaaattaaaaaagaaaactggaaactcaaagaagagcaaaatcctgtatcaggaagccacggaccaaatctgacaaagactgcagtgtggaatgttttgagctacttgtggagtgtaaagaaaaaggcccacttgaccttcactcttagaacatcgtttgtcaagtggaccaagggaggtgtggagggagaggcacgagcgggaaccggggctgcgtgcggcgcttgccggccagctggagttccgggtgggcgtgggcttggcgggccccgcactcggagcagccagccagccctgctggccccgggcaatgggggacttagcacctgggccagtggctgtggagggtgtactgattcccccagcagtggctggcccacctgcgctgtgctcgatttctcgtggggccttagctgccttcccgcggggcagggctcgggaactgcagcccgccatgcctgagcctcccacccactccatgggctcctgtgcagcacaagcctccccgacgagcaccaccctcctactccacggcacccagtcccatcgaccacccaagggctgaggaatgcgagtgcatggcgcaggagtggcaggcatctccacctgcagccccagtgtgggatccactaggtgaaaccagctgggctcctgagttctttgggtccacgctgcttttatgagctgtaacactcactgcgaagatctgcagcttcactcttgagtccagagagaccacgagcccaccggaaggaatgaacaactccagaggcactgccttaagagctgcaacactcactgggaaggtctgcagcttcactcctcctgcatttggtgcacccacaggcttaacaccacctgaaagctgccaagacttagggcttgcaccctctgaagcagaaacctgagctctacttgggtgccttttacctatagctggagctggaggagctgcaatatagtgaacagtggcccgagtatgtgcattgcagtggggtcctgggcctggttcatgaaacctttctttcctcttagacctctgggcataattatagaggccaaaatgtttcataacatgctgtctgccagctggagaaccaggaaagccattggtgtaattcaatcccaatggcctgaggagcaagagtgacaatggtgtcatccaatctgaggccaaaggcctgagaactgggggtagggttgtactagcataagtcttagagtctgcaggctgaggaatcagcacctctgatgtctgtgggtgaattatggtgctcggtttcacagttgtgtacgttagtaggatacatttttgttgtcgtcgtttgggcttggacccttttagccaccgttggagcaactgagatgcaaggcaacaggcccctaggatgcacacagcagggtggccctgggcctggccctcaaaacaatttttccctcctaggcctccaggcctgtgatgggagggattgccacgaaggtctctgacatgacctgcagacattttctccattgtcttggtgatcaacattttatgctccactttctcttcaatgctttgctgcttagaaatttcttgcaccagatcccctaagttatctctctcaagttcaaaggtccacagatctgtatggtgggggccaaataccaccagtctctttgcatagcaaaagtgatctttactccagttcccaacaagttcctcatctccatttgagaccacctcagcctgtatttcattgtccatatcattatcaggattttggtcaaagccattcaacaagtctctaggaagttccatactttcccacatcttcttgtcttctgaactctccaagtttattatttctctggccaggacttccaatactatgatgaacaggtgtggtgggacagggcatcctcatcttgtgccagttttcaaggggaatacattcagcttttgactgtttagtatgattttgtctgtgcttgtagaaatctttgcccagaccaatgtccgggagactttccgcaatatttccttgcaggagtttcat

SEQ ID NO: 8576 - DNA, 395 bp, Homo sapiens; identical to SEQ ID NO: 4149
  SIMILAR (2)..(196): 371254mologous to Human endogenous retrovirus K pol protein,accession number Y17833,Smith-Waterman Score=101.
  misc_feature (1)...(395): n = a,t,c or g

SEQ ID NO: 8577 - DNA, 1743 bp, Homo sapiens; identical to SEQ ID NO: 7288
  SIMILAR (94)..(384): 631254mologous to Homo sapiens Gag-Pro-Pol-Env protein,accession number AF164611,Smith-Waterman Score=332.

SEQ ID NO: 8578 - DNA, 1536 bp, Homo sapiens
  SIMILAR (711)..(340): 1001254mologous to Homo sapiens dJ680N4.3 (G-protein coupled receptor),accession number AL121755,Smith-Waterman Score=636.
tcaagacacctgaaaccttatcatgagccagatgctgaggaagagattccaggaggatcccgaggaccccccatttgcagtcatgtcgagactgatgctgaggaggaccccaactgtcacaagcaacacccgttgaacacagccacccacctggggacagatcaagaagctgtcatagatggtggaagaaaacttgtttaggaagattgcattgcagaacgggcagaggtgctgcgcaacgaatcctatggaatcattattgattggtccccttaggggatgtttagcttgaattgcacctctcagtctgcgtgccatggccacactatgttcagctggtctgtcaatggcaatggccagcaaggcattggtggagacgtagagggagacggtgcgcaggtagttgacggaggcacagagcacgtggccatgctcccaggagagctgccgtaccacgtagtagtccatctcgaaggggcagcagatgatggccaccaggaagtcggagatggccaggttggcaatgagcagattggtgaggttgcgcaacttcttatagcgggtgagggcagcgataaagacaaagttaccgatgccgcagaccagcatgatgcctgccagtgcaatgccaatgacgatcttggctgcgaagaaggtccgggtcttggtcatgtcctcatcctcatccatagggaggtcataatcaccataacgtcctggatcctggaaggaggcacaaccagtgggcaacatgcaggagaacatctggtcacattccctgagttccccaagtataggccaaccagacccactgcctaaccagatggaactacccgggatgcggggagaggagacctgagatctgtaagttgggaaaccctccgtggctgcccagctgtcaggaaggacagcataggatggatcagactgtccagaactctcaagaagaatgtgcacctttgccctttgcccaggggccagggcctctttgtctgcccagtcacatcctccagcccccaacacatcagctcccacaggggcttctggaacatttccaaggatgctcccatgagctggccaggctcctacagctgtcacaacgttgtggcacctgttggccagggacaatgaagcaggagggccaggatgctgcggggtcttctctccaaagcaggacaccactccttctgtactgaccaagccatagacttggaaatcaccaagttcactttcacatggacagactgagtcaccctgggccagtgatttatgctctctgagtcctaatcttcctgtaaaccaaattcctgctgcccagtccagtgcctggtgcatagtgggggctagacagacatctgttgagtgcatgaccagggcgctggaaacgactccacatgtgggcgccgcgggatgctgggtagcaaggagatgacccagctgaacaatgcatttggtccactcccctcctcggctttccagccccctaacccaagacaagagggcgcgcgcccgggctgggacaggtcccagccgcat

SEQ ID NO: 8579 - DNA, 760 bp, Homo sapiens
  SIMILAR (441)..(689): 481254mologous to Human endogenous retrovirus K pol protein,accession number Y10391,Smith-Waterman Score=230.
ctgagcaggactgtgaatggtttgtatttacaattcttgcagtaaacaatctgcagcttaagcctgctaaacgttttcactggaaagtgttgccacaaggaccaaatcaacagccaatttggataccatcaagatacctgaaaccttatcataagccagatgccaaggaagagattccggaaggatcccaaggattcccagttgcagccatgtcaagactgacgctgaggaggaccccaactgtcacgagcaacacccatcgaacacagccacccacctggggacagatcgagaagctgccacagatggcggaagaaaacctgaggaaagctggacaaccagtcacaataagtaattggattctccctagaataactaaatttaaaccaattgaaggtgctgagaatgtttttacagatgggtctagcaacggtaaagcttcttattctggctcaaaaggacctttgactgaagggaatcaaatggctgatcgccttgttgctaaagtaatatctaatgctagacactttcacaatttaacccatgttaatgcctctggtctcaaacgcagatacagcattacctggaaagaagctaaagctattatccagcgatgcccaacttgccaaatggtacattcctcatcttttacaggaggagttaatcctcgaggattggaacctaattctcaagctctagctaaatttttctctatacggaatattaaacacattactgatatcccatataattctgaagg

SEQ ID NO: 8580 - DNA, 1354 bp, Homo sapiens
  SIMILAR (340)..(696): 431254mologous to Homo sapiens Gag-Pro-Pol protein,accession number AF164614,Smith-Waterman Score=296.
atgggtatttcctgcccagggtcctcaaaaatgcttaatagtcgagcgctccctgtgctgaaactgacccaaggagctctgcgggattgtaaagaacgagcaaactacacaaacttcaacatttacaaggctgtagagagccagggaaagtttgtatgtgttctctataatggacagcaaagccctgaatatgtcatgataccatgtacatctgtgtctccaacaggccaggaagtccctgaggacagaggaatgagaatggtgatgaagaataaacccaataagcctagcaaaatgcagagtctgaaatccagtaagcatctcacaaattctgtcattgttattgctgtaggaattttcttctcggtcactttgcaagccagggacccccagctggatgatgccatagaacagcttagaggagtgtgcattagagcttgggaaaaaatcacttcaggtggagaacaatacccttcctttagtgctataaaacagggaccaaaagaaccatacattgattttatagctcggttacaggagtctcttaaaaagatgattgcagattcggctgctcaggatatagtgttgcagttattagctttcgacaatgctaatcccgattgccaggctgctctgcgacctatcagagggaaagcacatttagttgattgtatcaaggcctgtgatgatattggagatgggtctagtaatggtaaagcttcttattttggctcaaaaagtaaagttttccagacatcctatacttcagctcaaaaagcagagcttgtagcggtaattgaggtattgactgcttttgatatgcctattaatgtgatttctgattcttcatacatggtttattccacacagttaattgaaaatgctcagttacgatttcatacagatgaacaactgatgactttatttacccaattgcaaacagcatttaggagtacaatgcatcctttttacatcactcacattagggctcgctcatacacctcttccaggacctttgactgaagggaatcaaatggccgattgcctagttgctactgcagtatctaatgctagacactttcacaatttaacccatgttaatgcctctggtctcaaatgcagatacagcaatacctggaaagcagctaaagctattatccagcgacgcccaacttgccaaatggtgcattcctcatcttttacaggaggagttaatcctcaaggattggaacctaattctctttggcaaatggatgtcacacatgttccctcgtttgggagactagcttatgtacatgtatgtgtggacaccttttctcactttgtctgggctacatgccaatcaggagagtct

SEQ ID NO: 8581 - DNA, 1822 bp, Homo sapiens
  SIMILAR (707)..(1198): 621254mologous to Homo sapiens Gag-Pro-Pol protein,accession number AF164614,Smith-Waterman Score=567.
atgggacaagtgtggggtctggtttgttccaccttggaactttttcacactgatgatgaggaggaaggagagtataacgaattaacagaagaggttacagagcaggtttatttgccagctaaagctaaagcggcaaaggagggagaggttcattcctacccttctgcaccccctcattattattttgaagaaaaagagtggcctgaccctccagatctttcttttccagaggacagtgggcgaaaagtagttgcccctggtgactgttcgaccagcgccttgagcgactgctcttagttctattcaggcaggaattcgagcaagctagacaagagggtgatttagaaggcttggcagctccctgttagaatacaccccccagatcaacagggaaatattatagctacatttgagccttttccttttaaattactcaaagaatttaaacaagctattcatactaaaaaagaatgtagaaataatcagcaagtcagctgccagataggggaaaaaagaaaactgctgagtctgaaatatgtccaacatgtaaaaaaggaaaacactgggctaatcagtgtcactctaagtttgataaagaagggaacctgatttcaggaaatgccatgaggggcctgtcctgggccccattccaaactggggcatttccagctcaggccattccctcacacccgtacaatgtctgtcccccgccacagccggtagtgccgcagtagatttatgctgcacaaaagctgtgagccttctacctggggaacccctgcaaaaggtcccaacaggagtctgtggacccttgccagcagggacaataggattacttttaggaaggtctagtttaggtttaaaagggatacaaatacatacaggagtcattgattcaaattacaatggggaaattcaaattgttatatctacttctgtttcctggaaagcagagccgggagagcgcatagcacagctcctgatcgtgccatatgtgggaatgggaaaaagtgaaattaaacgaacaggaggatttggaagcacaaataaacaaggcaaagcagcttattgggtaaatcaaattactgataaacatcctacctgtgaaacaaccattcagggaaagaaatttaaaggtttggtagatacaggagtggacatttcgatcatttctctgcagcactggctgtccacgtggcgaattcaacccactcaatttaacataggacctttgactgaagggaatcaaatggctgatcacctagttgctaatgcaatatctaatgctagacactttcacaatttaacccatgttaatgcctctggtctcaaacacagatacagcattacctggaaagaagctaaaaatattatccagcgatgcccaacttgccaaatggtacattcctcatcttttagaggaggagttaatcctcgaggactggaacctaattcactttggcaaatggatgtcacacatattcccttgtttgggagactagcttatgtacataaaagaagaagaataagaggaggaggaggaggagaaggagaaggagaaggagaaggagaaggagaagaagaagaagaagaagaagaagaagaagaagaagaagaagaagaagaagaagaagaagaagaagaacaagaacaagaacaagaagaacaagaacaagaagaacaagaacaagaagaacaagaacaagaagaaagaagaagaaaagacactgaagagctttcatactctctccccctcaacagaacccaaccatgctggcaccctgattttggacttccagccaccagaactgtgagaagataa

SEQ ID NO: 8582 - DNA, 1764 bp, Homo sapiens
  SIMILAR (187)..(765): 461254mologous to Human endogenous retrovirus K pol protein,accession number Y17832,Smith-Waterman Score=437.
atgggacaggtatggtgtctggtttgtatcaccttggaactttttcacactgataatgaggaggaacaagagtatagcgaagtaacaaaagaggttacagagcatgtttatttaccagctaaagctaaagcggcaaaggaaggagaggttcatccctacccttctgcaccccctccttattattttgaagacaaagaccctccagatctttcttttctggaggacactgggcaaaaagcaggaattcagcaagctagacgagagggtgatttagaggcttggcagttccctgttagaatacaccccccagatcaacagggaaatattatagctacatttgagccttttccttttaaattcgggaaagcacattcagttgattatatcaaggcctgtgatggtatcggaggacctttgactgaagggaatcaaatggctgattgcctagttgctaatgcaatatctaatgctagacactttcacaatttaacccatgttaatgcctctggtctcaaacgcagatacagcattacctggaaagaagctaaagctattatccagcaatgcccaacttgccaaatggtacattcctcatcttttacaggaggagttaatcctcgaggactggaacctaactctctttggcaaatggatgtcacacatgttccctcatttgggagactagcttatgtacatgtatgtgtggacaccttttctcactttgtctgggctacataccaatcaggagagtcttctgcctgtgttagttaaacatccccttttgcagtgttttgtggtggtgggcattccagcttttattaaaacagataatgccccaggctatactagccaagctctagctacatttttctctgtgtggaatattaaacacattaccggtatcccatacaattctcaaggacaagccatagtggaaagaatgaatctctccctaaaacagcagttgcaaaagcaaaaagggggaaacagggactacaggacaccccatagatgcaactgaacctagcattattaactttaaattttctgagcctgcccaaaggccagatgttttcagcagctgaacagcatctacagaaaccagctgcaaagacaaaaacagaacaactgatttggtggagagatctgataacaaaaagttgggaaataggtaaaataataacttggggtagaggttatgcttatatttctccaggacaaaatcaacagccaatttggataccatcaagacacctgaaaccttatcatgagccagatgccgaggaagagactccaggaggatcccgaggacccccccagttgcagccatgtcaagactgatgctgaggaggaccccaactgtcacgagcaacacccgtcaaacacagccatccacctgaggtcagatcaagaagctgtcacagatggcagaagaaaacctgaggaatggtctggaacacggacctggtggagaccctggagctgcagaacctgatgctgtgtgcgctgcagaccatctacggagcagaggcgcggaaggagtcacggggcacgcacgccagggaaggctacaaggtgcagattgatgagtacgattactccaagcccatccaggggcaacagaagaagccctttgaggagcactggaggaagcacaccctgtcctatgtggacgttggcactgggaagctaccaaagaagagacaacatccagcagcagccactcccgcaggactccagggaacaaggatggaatgagaattg

SEQ ID NO: 8583 - DNA, 1284 bp, Homo sapiens
  SIMILAR (1071)..(913): 671254mologous to Homo sapiens HELG protein,accession number AJ277291,Smith-Waterman Score=172.
tcagaagtcatcatctaaagaattccattgctcacctcctgcatagcagcacagccccatgaggccacacaccagatggaggggataaaagtacgaggtcatggcttcttgcaagaggctttttcttaaactaaccctgactcttatcttggcctttggcttcccactgcagacagcccttgcaggtccatccaggttggggaagatggttttaaaaggttcattagttaagaaaggccctggggccctgagggaaactcggaaggtagcttctgccctaaggggcttgagcaccaggacgtgtctacgcgggccggcagcgtcagcagcagcaggagcagaaggcaggcaagacccccctggggggccatggtgttcgccggcggctggggacctaggatcacctggggtccagagcccgggaggaggatccccgagaggggcgcaagttgcgatgtccggaagccgacgacggcgtgccgaacccggggtctggggcgcgctgcagtgacaccggcgctgagcacggaggatgcactcatttcctccatccttgcgcttctgtgaaatgggtagagtcctttgtttctcgtatctaaatgtctcacgggctctcctctcaggagcgcgtccccgtgccctccagctgcccgttcctgctgaaagcatccggacagctccccgggccgcggccctggggcccgccagagccctgccttgcaccccgctctcccctctctggcccggagggctgcgccgggcagatcctttcctctgaccagtaggaagtaaggtgaaatagtatgtaacatttctgagaatagtccttggcttctgtggggtggagtagagggaagtagtgaccttaccccggatttctttccttcctactgattggaatgtggatatgatggctgaagcaagagcaacagtcttacacgacaaagtaaaaacatcatattttgctaggactgcctgaacatctggataggcctgtaattctaaaagtgattctaagagattttcatggatgttcaacatggtaagaggaggaaattctttcatcaactctgcccccagagtggacaacctaggatgaggcttggctccttctgcttctttgtcccctctcctctgagtccccagttccccgggaggaatcccaggctgcaggagccagctgactgcaagagctgcactcaaccacttaacaacaggttctgttctacaaggtagtttgccagtgcctagaacctgaaacatttcttcaccttctacattcat

SEQ ID NO: 8584 - DNA, 422 bp, Homo sapiens
  SIMILAR (1)..(147): 1001254mologous to Homo sapiens Human secreted protein sequence encoded by gene 15 SEQ ID NO:138,accession number Y91465,Smith-Waterman Score=286.
tggaacctgcacaggagtggtgaaggggacagtgacacacttcatgctggctgtcctgtcctggtgggagataagtgggtggccaacaagtggatacatgagtatggacaggaattccgcagaccctgcagctccagccctgaagactgaactgttggcagagagaagctggtggagtcctgtggctttccagagaagccaggagccaaaagctggggtaggagaggagaaagcagagcagcctcctggaagaaggccttgtcagctttgtctgtgcctcgcaaatcagaggcaagggagaggttgttaccaggggacactgagaatgtacatttgatctgccccagccacggaagtcagagtaggatgcacagtacaaaggaggggggagtggaggcctgagagggaagtttctggagttc

SEQ ID NO: 8585 - DNA, 2544 bp, Homo sapiens
  SIMILAR (1591)..(2541): 881254mologous to Homo sapiens p40,accession number U93569,Smith-Waterman Score=1432.
atgggtcctggggcgcggctggcggcgctgctggcggtgctggcgctcgggacaggagacccagaaagggctgcggctcggggcgacacgttctcggcgctgaccagcgtggcgcgcgccctggcgcccgagcgccggctgctggggctgctgaggcggtacctgcgcggggaggaggcgcggctgcgggacctgactaggtgcaatgatgaaacaataacatacctgttagataagaggttgactgttctcactgcagctaacatcccctactcgtctccggaaaacggtgcgaagagaaggcgccaagacgccttccctccaatacactacaatacccaggacgctttgctacaatacctctccggggttggctggggggcgcctccagctgcgcaagcgcatagggatgcgccctttgtggactccattgcgcaggtgctgttgcgcacttccggtggaagcgctgaagcgagtgggtggagtttacggagccggtgggcggtaggcggtgctacgggtagctgggtgctgtccaaaggcgacagggcgtcgttaggggagcgagtcgtgaccggttgggccacactcaacgtgggacgaagcttcgcctactgtttgactacgtgcgtgcagcctcccctcgatgtcggccctcgaaaagagcatgcacctcggccgccttccctctcgcccacctctacccggcagcgggggcagtcagagcggagccaagatgcgaatgggagaaggaaacagaagaccaagtcagagcctgagagatttgaagatgctgtgttgcttgccggctttaaagtggaggaagaacctgtccagagacctaggaggaaagaatggtttcagggcccaagcccagggcactgctgccctgctcagcctcaggactctgcaccttgtatcctggctactcatgctccagccagggctcaaaatgccccaggcacagcttgggccgctgctctagagggcacaagcactgtaagccttgaccacttccatgtggttggtgtagtggttgtatcaggaggtgagatcattctactcctttctttcagattctacgacaaggtactttctttgcatgaggattcaacaacccctgtggctaaccctctgcttgcatttactctcatcaaacgcctgcagtctgactggaggaatgtggtacatagtctggaggccagtgagaacatccgagctctgaaggatggctatgagaaggtggagcaagaccttccagcctttgaggaccttgagggagcagcaagggccctgatgcggctgcaggacgtgtacatgctcaatgtgaaaggcctggcccgaggtgtctttcagagagtcactggctctgccatcactgacctgtacagccccaaacggctcttttctctcacaggggatgactgcttccaagttggcaaggtggcctatgacatgggggattattaccatgccattccatggctggaggaggctgtcagtctcttccgaggatcttacggagagtggaagacagaggatgaggcaagtctagaagatgccttggatcacttggcctttgcttatttccgggaacagagctcctcaccagcaacggaacaaagctggatggagaatgactttgatgagttgagagaagaaggcttcagacgatcaaactactccgagctacaggaggaaattcgaaccaatggcaaagaagttaaaagctttgaaaaaaaattagacgaatggataactagaataaccaatgcagagaagtccttaaaggacctgatggagctgaaaaccaaggcacgagagctacgtgacgaatgcagaagcctcagtagccgatgcaatcaactggaagaaagggtatcagtgatggaagacgaaatgaatgaaacgaagcgaggagagaagtttagagaaaaaagaataaaaagaaacgaacaaagcatccaagaaatatgggactatgtgaaaagaccaaatctacgtctgattggtgtacttgaaagtgacagggagaatggaaccaagttggaaaacactctgcaggatattatccaggagaacttccccaatctagcaaggcaggccaacattcaaattcaggaaatacacagaacgccacaaagatactcctcgagaagagcaactccaagacacataattgtcagattcaccaaagttgaaatgaaggaaaaaatgttaagggcagccagagagaaaggtcgggttacccacaaagggaagcccattagactaacagctgatctctcagcagaaactctacaagccagaagagagtggggaccaatattcaacattcttaaagaaaagaattttcaacccagaatctcatatccagccaaactaagcttcataagtgaaggagaaataaaatcctttacagacaagcaaatgctgggaggttttgtcaccaccaggcctgccctacaagagctcctgaaggaagcactaaacatggaaaggaacaactggtaccagccactgcaaaaacatgtcaaattgtaa

SEQ ID NO: 8586 - DNA, 1248 bp, Homo sapiens
  SIMILAR (52)..(774): 961254mologous to Homo sapiens Human PRO1374 (UNQ711) amino acid sequence SEQ ID NO:118,accession number Y99373,Smith-Waterman Score=1208.
atgcaaagaggccagcaggccacgggtagctctgccaatgcatggggcatcttgcagccaaagtgggtacaaacaggcccagataataagaggatggccaggaatgtcttgaaatatgaaaggctcttggcagagagccccaaccacgtggtagctgaggctgtcatccagaggcccaatataccccacctgcagaccagagacacctacgaggggctatgtcagaccctgggttcccagcccactctctaccagatccctagcctctactgttcctatgagaccaattccaacgcctacctgctgctccagcccatccggaaggaggtcatccacctggagccctacattgctctctaccatgacttcgtcagtgactcagaggctcagaaaattagagaacttgcagaaccatggctacagaggtcagtggtggcatcaggggagaagcagttacaagtggagtaccgcatcagcaaaagtgcctggctgaaggacactgttgacccaaaactggtgaccctcaaccaccgcattgctgccctcacaggccttgatgtccggcctccctatgcagagtatctgcaggtggtgaactatggcatcggaggacactatgagcctcactttgaccatgctacgtcaccaagcagccccctctacagaatgaagtcaggaaaccgagttgcaacatttatgatctatctgagctcggtggaagctggaggagccacagccttcatctatgccaacctcagcgtgcctgtggttagggtagtacagtgcctggcacatcctgagcattcgataatcaatgccagaatgcagcactgttttggtggaacctgcacaggagtggtgaaggggacagtgacacacttcatgctggctgtcctgtcctggtgggagataagtgggtggccaacaagtggatacatgagtatggacaggaattccgcagaccctgcagctccagccctgaagactgaactgttggcagagagaagctggtggagtcctgtggctttccagagaagccaggagccaaaagctgggggagggaaaggagaattagatgctgaccctgcccctagaaatggagcagaccctcaaatcatcatgaaaccatgtggccacgagtggagacatgaacaggctgcattaagaggctcccctcacccctggaagtttcatgggaaggagggacttgagcaaatcttgaagatgagcagggtccctagaggctga

SEQ ID NO: 8587 - DNA, 1162 bp, Homo sapiens
  SIMILAR (752)..(1150): 931254mologous to Homo sapiens Human PRO1374 (UNQ711) amino acid sequence SEQ ID NO:118,accession number Y99373,Smith-Waterman Score=658.
tgcctggctgaaggacactgttgacccaaaactggtgaccctcaaccaccgcattgctgccctcacaggccttgatgtccggcctccctatgcagagtatctgcaggtggtgaactatggcatcggaggacactatgagcctcactttgaccatgctacgtcaccaagcagccccctctacagaatgaagtcaggaaaccgagttgcaacatttatgatctatctgagctcggtggaagctggaggagccacagccttcatctatgccaacctcagcgtgcctgtggttagggtagtacagtgcctggcacatcctgagcattcgataatcaatgccagaatgcagcactgttttggtggaacctgcacaggagtggtgaaggggacagtgacacacttcatgctggctgtcctgtcctggtgggagataagtgggtggccaacaagtggatacatgagtatggacaggaattccgcagaccctgcagctccagccctgaagactgaactgttggcagagagaagctggtggagtcctgtggctttccagagaagccaggagccaaaagctgggcttgatggagaaaggtttcctactgggctccgcagcaagacttcccacctcggggctttgtgtcctgttctgtgtgcatcgcaaaacttcaagttcagacagttggcaaatgccatcaaggaaaggggtcccaatccagacctgaagagagggttcttggatctcactcaagaaagaattcagggcgagtccacagtgcaaactctgaaggatggctatgagaaggtggagcaagaccttccagcctttgaggaccttgagggagcagcaagggccctgatgcggctgcaggacgtgtacatgctcaatgtgaaaggcctggcccgaggtgtctttcagagagtcactggctctgccatcactgacctgtacagccccaaacggctcttttctctcacaggggatgactgcttccaagttggcaaggtggcctatgacatgggggattattaccatgccattccatggctggaggaggctgtcagtctcttccgaggatcttacggagagtggaagacagaggatgaggcaagtctagaagatgccttggatcacttggcctttgcttatttccgggtaagggagtaa

SEQ ID NO: 8588 - DNA, 467 bp, Homo sapiens
  SIMILAR (204)..(404): 631254mologous to Homo sapiens HTRM clone 3340290 protein sequence,accession number Y73387,Smith-Waterman Score=196.
  misc_feature (1)...(467): n = a,t,c or g
tggacggccgacccacgcgtgcggcttgtagccggtgcgcggagtggctggggctacgtgctgagctgtcgcggagccggaacagcagcggtgaagcccctcggctcggccgagaccgccgtgcccactgctcgcctcggatgccgccgctttagccgcagccgctgctgccgccgccgggggagaggcagcctattgtctttctccgcggcgaaggtgaggagctgtctcggctcggcccgcgggggagccccgggagccgcacggatatagaagacttagatcactatgagatgaaagaagagcctgttagtgagaagaagttggaggatgaaggaactgaaaaagaaaattgggcaatattagagaaaattaggaagactgaaaggcaaggccatttaaatgttgttcctgacagcatctcanaggatggtgtcctctggcttactctctggggaatgctgctc

SEQ ID NO: 8589 - DNA, 417 bp, Homo sapiens
  SIMILAR (7)..(90): 851254mologous to Homo sapiens golgin-95,accession number L06147,Smith-Waterman Score=121.
tttcgtgcggccccagccccagagagtgggggtgagtctgtgtttggtgagacccaccgggccctgcagggggccatggagaagctgcagcgactttatggaaggagaaggtggacctgaaggagcgggtagagaaactagagcttcaattcatccacctctcaggacagacagacaccatagggagaaagtacatcagccagggggcagtgtcagagacgcagcactgggagaggaggacatcgtcaggctggcccaggaccaggaggagatgaaggtgaacctgcaggagctgcggggcaggtgttgcagcttgtgggagaccacaaggaggggcatggcaaattctgaccattgcccagaaccctgctgatgagcccactctaggagccccaatagcccaggagcttgggtgtg

SEQ ID NO: 8590 - DNA, 433 bp, Homo sapiens
  SIMILAR (328)..(411): 671254mologous to Homo sapiens golgin-95,accession number L06147,Smith-Waterman Score=90.
agcagcggtgaagcccctcggctcggccgagaccgccgtgcccattgctcgcctcggttgccgccgctttagccgcagccgctgctgccgccgccgggggagaggcagcctattgtctttctccgcggcgaaggtggcatttttcaactccgctggagccaatgcccaggaggaacaaagggtgtgctgccagcccctggctcacccagtggcctcgtcccagaaaaagccagaggtagcggccccagccccagagagtgggggtgagtctgtgtttggggagacccaccgggccctgcagggggccatggagaagctgcagcgactttatggaaggagaaggtggacctgaaggagcgggtagagaaactagagcttcaattcatccacctctcaggacagacagacacccataataaaatatcatattaaa

SEQ ID NO: 8591 - DNA, 2772 bp, Homo sapiens
  SIMILAR (2059)..(2646): 241254mologous to Lycopersicon esculentum extensin-like protein,accession number AF159296,Smith-Waterman Score=112.
atgtcagaaaaaacacaacaggggaaattggccgcagccaagaaaaagttaaaagcatattggcagaggaagagccctggcattccagcaggagctaacaggaaaaagaaaatcaatggcagtagccctgacacagccacttctggtggttaccactcacctggggattcagcaacaggtatctacggggagggccgtgcatcctctactaccctggaggatctggagagccagtaccaagaactagcagtggccctggattcaagctccgcaataatcagtcaactcactgaaaacatcaattcactggttcgcacatctaaggaggagaagaagcatgagatacatctggtacagaagcttgggaggagcttgttcaaactcaaaaaccagacggctgaacccctggccccagagcccccagcagggccatctaaggtagagcagctacaagatgagaccaaccacctaaggaaggagctagagagtgtgggaagacagctccaggctgaggtggaaaacaatcagatgttgagtctcctgaacaggagacaggaggagaggctacgtgaacaggaggagaggctacgtgaacaggaggagaggcaacgtgaacaggaggataggctacatgaacaggaggagaggctacgtgaacaggaggagaggctgtgtgaacaggaggagaggctgtgtgaacaggaggagaggctacgtgaacatgaggagaggctgtgtgaacaggaggagaggctacgtgaacaggaggagaggctgtgtgaacaggaggagaggctacgtgaacatgaggagaggctgtgtgaacaggaggagaggctatgtgaacaggaggagaggctacatgaacaggaggagaggctacgtgaacaggaggagaggctgtgtgaacaggaggagaggctacgtgaacatgaggagaggctgtgtgaacaggaggagaggctacgtgaacatgaggagaggctgtgtgaacaggaggagaggctacgtgaacaggaggagaggctgtgtgaacaggaggagaggctacgtgaacaggaggagaggctgtgtgaacaggagaagctgccagggcaggagaggctgctggaagaggtggagaagctgttagaacaggagaggcggcaggaggagcaggagaggctgctggagagggagaggctgctggaagaggtggagaagctgttagaacaggagaggcagcaggaggagcatgagatgctgctggagagggagaggctgctggaagaggtggagaagctgttagaacaggagaggcggcacgaggagctcgagacgctgctggagagggagaggctgctgtactcgaccccggagttcatcatctcggagccgctggccaatatgtactcatgtgggaaccagaacacactgatggaggagttggcagagcaggcacagcagcacgacgagatgctgcacatgcaccacgcgctgaaggaggcgctcagcatcatcggtgacatcaacaggaccactgttaccatgcccccgcccgtggacgacacctggttgcaggtgcagagcatccctgacgcacacaggccagaggcttcccctgatccctttgggccctacccccctggtgctcttgtgccccagccggggtccccagtgtgccgagtggctgcacgccccagatccatgcggcacgtgccggccgggcccggtgggtctccccaaacacagactcacccccactctctggggctggggccgctacctctggcttcttctgggactttgttcctcctgggcactggctccagcggagttgaaaaatgccacctgaagacaagaggactaaaggcctcttggcacatacaccaccccttgaatttccagttcaccaccaccagcccggacagtgaccacattctcatcaaagtgcaaatttctattcttatccccacttctgccaaccctaaacctactttaagtcgcttatacggcataggagccaaaatagcagggacacatcttatagaatcctttgaaatgcatttcattactttctcacctcctccacctccttctacactctctctcaacgaaaccgctgttcttccttcaaccaaggataaaatcaagcacttgttcgcggcgcggactccacaccgcggccgcccgccccaggggaggagtgagtccgccccagcggcgccaacccggggacccggggcaagggttcggggccatccgccgccgggcgcgccccccatccggaaagcggcgacggcccccaagttgggctgcggagtgggaggcgcgccgagccccaagcagacaatgcgggagaagggtgatgcgcagggaggaggggtccgcaaagctgaggtccccgcgccgcccggctacccatccgtgccgcccgcccctgaagccccgcgcagcccccgaccctcctactgggcccgccccaccgagcggccgcaggggacgggccgcgtccgcaccccgacccctcctcaaatcacaaaacttcccccaactccgccaactaagttgcgctctcaccgtgcggctcccggggctcccccgcgggccgagccgagacagctcctcaccttcgccgcggagaaagacaataggctgcctctcccccggcggcggcagcagcggctgcggctaaagcggcggcaaccgaggcgagcaatgggcacggcggtctcggccgagccgaggggcttcaccgctgctgttccggctccgcgacagctctgcacgtag

SEQ ID NO: 8592 - DNA, 473 bp, Homo sapiens
  SIMILAR (185)..(454): 651254mologous to Homo sapiens HTRM clone 3340290 protein sequence,accession number Y73387,Smith-Waterman Score=274.
ttcgttaacctcttcgagatccctgtccgtgtggtggaattcggggctacgtgcagagctgtcgcggagccggaacagcagcggtgaagcccctcggctcggccgagaccgccgtgcccattgctcgcctcggttgccgccgctttagccgcagccgctgctgccgccgccgggggagaggcagcctattgtctttctccgcggcgaaggtgaggagctgtctcggctcggcccgcgggggagccccgggagccgcacgaatgggacaacagaagaagtgacttcaaaagaagacgaagaggaagagatggatgaagatatagaagacttagatcactatgagatgaaagaagagcctattagtgagaagaagttggaggatgaaggaactgaaaaagaaaattgggcaatattagagaaaattaggaagactgaaaggcaaggccatttaaatgtgttgaccctgatagtcc

SEQ ID NO: 8593 - DNA, 383 bp, Homo sapiens
  SIMILAR (28)..(267): 331254mologous to Zea mays HMGI/Y protein,accession number AJ131372,Smith-Waterman Score=109.
cacttgttcgcggcgcggactccacaccgcggccgcccgccccaggggaggagtgagtccgccccagcggcgccaacccggggacccggggcaagggttcggggccatccgccgccgggcgcgccccccatccggaaagcggcgacggcccccaagttgggctgcggagtgggaggcgcgccgagccccaagcagacaatgcgggagaaggctctgcacgtagccccagccaccccgcgcaccggctacaagccgcccgggggtggccggggcacgcaagagggcagtaacgtctgcgagtcctcccgtgagtacacgcggagcaagggctgcgagctgggattgcacggcagagctgcccatcccgctccacgagaccaata

SEQ ID NO: 8594 - DNA, 4584 bp, Homo sapiens
  SIMILAR (454)..(1374): 761254mologous to Homo sapiens melanoma-associated chondroitin sulfate proteoglycan (MCSP),accession number X96753,Smith-Waterman Score=1175.
atgggcagctctgccgtgcaatcccagctcgcagcccttgctccgcgtgtactcacgggaggactcgcagacgttactgccctcttgcgtgccccggccacccccgggcggcttgtagccggtgcgcggggtggctggggctacgtgcagagctgtcgcggagccggagcagcagcggtgaagcccctcggctcggccgagaccgccgtgcccattgctcgcctcggttgccgccgctttagccgcagccgctgctgccgccgccgggggagaggcagcctattgtctttctccgcggcgaagccaatcgtgtttaaggagaaactaacaatgaaaacggactcgttgatggaggaaaagttggaatgcagcctctggtgctgtttgagcgatccctctaccccgggtcgctgctgtgttctggaaaggcgcattgtaccctggatgcagcagctgctagcgaatataaagcaggcagaaaaacatgaaaagaaccacccggaggtgactgtggccatggctctgactgacatagacctgcagctgcagttctccatgtcccaacccgaagccctccttctcctggcagcaggcccagctgaccacctcctgctgcagctctactctggacacctgcaggtcaggcttgtcctgggccaggaggagctgaggctgcagaccccagcagaaattctactgagtggctccgtcccccacaccacagttctgactgtctcagaggactggcccacattgtcagtcaatgggtttctgaatgcctcctctgtagtcctgggagcccccctagaagtcccctatgggctctttgttgggagcactgggagacttggcctgccctacctgaggggaaccagccatcccctgaggggttgcctccatgcagccgctctcaatggccgcagactcctccagcctctgacccccaataagcatgagggctgtgctgaagagttttctgccaatgatgatgtggccctgggcttctctgggtcccactctctggctgccttgcctgcctggggcactcaggatgaaggaaccctggagtttacactcaccacacagagctggcaggcacccttggccttccaggcagcaggctggcatggggacttcatccatgtggacatatttgagggccacctgtggtccatggttgagaagggccagggtactgtattgctcctcaacagtgtgcctgtgactgacgcacagccccacaaggtcagcatccacatcaacattcaccagctagaaatctccatggaccagtaccccacacgaactgaggagtcctcagctacctggagccacgaacaccgctcaggcctgacaccaggggctgccaatgcctccctgctgggctggctgcatggaagacctcagtgtcaatggctagaggcaggggctgtgggaagccttgctgacgcacaacatggtggctggctgcagactggaggagctgctatcagcgcagtggtggtgaccgagggtggcacagcctggcttgagtggtggcatgtgcagcccatgctggcactgatggaggctgaactgcgtaaatcccaggcccgcttcatccacgatggccctgaggacacctctgaccagctggtgctggaggtgtcagtgatggcttggttgcccatgccctcatgcctgcggaggggccaaacagacctcctgcccatccaggtcaaccctgtcaatgacccaccccacatcatcttcccacatggcagccttatggtgatcctggaacacacacagaagcctctggggcctgaggttctccaggcctatgacctggactctgcctgtgagggcctcaccttccagctccttggcaccccctctggcctccccgtggagcaccgagaccagcctggggagccggtgactgagttctcctgctgggagttggaggccggcagcctagtctatgtccactgtggtggccctacacaggacttgacattccgggtcagcaatggactgcaggccagccccccggccatgctgaaggtggtggctgtccagctggccatacaaatccaccgcagcacagggctgcatctggcccagggctctgccatgcccatcttgcctaccaacctgttggtggagaccagcgccgtggggcaggatgtgaccgtgctgttccgtgtcaccggaggcctgccgttcagggagctgcagaagcagggggctggtgggcactacaccgaggacaccgtggagaacctggatctgcaggtgcaggtgagctggaaaatcctgagcaatctgtccttcctagtgaccatccagagagccactgtgtggatgctgcagctggagccactgcacactcagaacacccagcaggaggccctcaccacagcccacctggaggccaccctggaggaggcaggcccaagccccccaaccttccactgtgaggtggttcaggctcccaggaaaggcaactttcaactacagggcacgatgctgtcagacggtcagggcttcacccaggatgacgtacaggctgcagaggtgacctatggggccatggcacatgcctcagtggcagtggaggacaccttctgtttccatgtcacagctccaccatatttctccccactctgtaccttctccatccatattggcggtgacccagacatgcctgtcctcgtggtgcccgagggtggtgggtgtgtcctctctgctgaccagctcttcatcaagagtctcaacagtgccaggtacctctatgaggtcatggagcagccccgccatgggaggttgacttggcgtgggacacaggacaagatcactatggtgacatccttcaccaatggagacctgatgcatggccagctgaccatcagctgcgtcttccacgtggcctggggtaggtggcggctgctgactacagacaacatggccttcagcaatgctgattcgggctttgctgaggcccagctggtgctgacccaccaggacctcctctctggcagtatcatggccacggatgagcccatgcagcccatctgccgcttcatccaggaggggcctcaggaagaggcgagtcctgtgtccgatgggcagcaccaggccatcacggtgctggaggtgcaggccttggagccttacctctgtgtggccaatggctccggcctcatggttcctcaaggaggccagggtaccatcaacatggccgagctccacctgggcaccaacctcaacatctgcagtagggatgaggcccactaccacgtcacagacagccctcactggggacagttgctccaagccactcagccagccacagccttctctcagcaggacctgctggttggggctgttttctatggccacaatggcagcctcagctcccgcaacaccctggccttctcaatggatgtgggaccagtgcacacagatgccaccctacaagtgaccattgccctagagggcccagtagccccactgaagctggcccagcacaaggagatctacatcttccagggagaggcagctgagatcagaagggaccagctggaggtagcccaggaggcagtgccgccagcagacatcgttttctcagtgaagagcccaccgagtgccggctacctggtgatggtgctgcgtggcatcttggcagatgagccacccagcctggaccccgtgcagagcttctcccaagaggcagtggacacaggcaggatcctctacctgcactcccgccctgaggcatgccttctcgctggatgtggcctcggcctgggtgctccccttgaggacgtcacgtggagctggaggtgctggagccaccccggcatggggccctgcagaaggaggatgggcctcaagccaggaccctcagcaccttctgctggagagaggtacggctgtggaagagcatctgatccagtacctgcacgatgggagcaagacactgacggttttgtcctgatggctaatgcctctgagatggaccgccagagccatcctgtggccttcactgtcaccatcctgcctgtcaatggccaacccccgacctcatacaaactcaggcctgcagaggctctgaggagcatggatggttactctgggcccaaggacctggtgtacaccattaagcagcccagcaatgggtgggtagtgcagtgggcggtgccgggcactgagagtccgtccagccactcagcagccagagcctcagagccagcaggcaccgacccccagctcctgctctaccatgtggtgcggggcctccagctaggccggctcttccacgcccagcatgacagcacaggggaggacctggtgaacttcactcaggcagagaccccggagttcatcatctcggagccgctggccaatatgtactcatgtgggaaccagaacacactgatggaggagttggcagagcaggcacagcagcatgacgagatgctgcacatgcaccacgcgctgaaggaggcgctcagcatcatcggtgacatcaacaggaccactgtcaccatgcccatgcccccgcccgtggacgacacctggttgtcagagcatccctga

SEQ ID NO: 8595 - DNA, 542 bp, Homo sapiens
  SIMILAR (61)..(2): 451254mologous to Homo sapiens similar to golgi antigen; similar to Q08379 (PID:g2498401),accession number AC004460,Smith- Waterman Score=41.
tgtgccgagtggctgcacgccccagatccatgcggcacgtgccggccgggcccggtgggtctccccaaacacagactcacccccactctctggggctggggccgctacctctggctttttctgggacgaggccactgggtgagccaggggctggcagcacaccctttgttcctcctgggcactggctccagcggagttgaaaaatgccaccatggcctcccggctctccaggtcccctgggatgttcggcatgggccgaggcgcctcctgctcactgtccagatgtcctcctccatctccgtgcggctcccggggctcccccgcgggccgagccgagacagctcctcaccttcgccgcggagaaagacaataggctgcctctcccccggcggcggcagcagcggctgcggctaaagcggcggcaaccgaggcgagcaatgggcacggcggtctcggccgagccgaggggcttcaccgctgctgttccggctccgcgacagcacgaagtggtcgactcggcaaatccgaaccggtacgtcagt

SEQ ID NO: 8596 - DNA, 1037 bp, Homo sapiens
  SIMILAR (220)..(984): 291254mologous to Herpesvirus papio NTR,accession number AF200364,Smith-Waterman Score=134.
tgcaaatttctattcttatccccacttctgccaaccctaaacctactttaagtcgcttatacggcataggagccaaaatagcagggacacatcttatagaatcctttgaaatgcatttcattactttctcacctcctccacctccttctacactctctctcaacgaaaccgctgttcttccttcaaccaaggataaaatcaagcacttgttcgcggcgcggactccacaccgcggccgcccgccccaggggaggagtgagtccgccccagcggcgccaacccggggacccggggcaagggttcggggccatccgccgccgggcgcgccccccatccggaaagcggcgacggcccccaagttgggctgcggagtgggaggcgcgccgagccccaagcagacaatgcgggagaagggtgatgcgcagggaggaggggtccgcaaagctgaggtccccgcgccgcccggctacccatccgtgccgcccgcccctgaagccccgcgcagcccccgaccctcctactgggcccgccccaccgagcggccgcaggggacgggccgcgctccgcaccccgacccctcctcaaatcacaaaacttcccccaactccgccaactaagttgcgctctcaccgtgcggctcccggggctcccccgcgggccgagccgagacagctcctcaccttcgccgcggagaaagacaataggctgcctctcccccggcggcggcagcagcggctgcggctaaagcggcggcaaccgaggcgagcaatgggcacggcggtctcggccgagccgaggggcttcaccgctgctgttccggctccgcgacagctctgcacgtagccccagccaccccgcgcaccggctacaagccgcccgggggtggccggggcacgcaagagggcagtaacgtctgcgagtcctcccgtgagtacacgcggggcaagggctgcgagctgggattacacggcagagctgcccatcccgctccacgagaccaatagtaaggcacctgggcggggcgctcaggttgctaa

SEQ ID NO: 8597 - DNA, 2370 bp, Homo sapiens
  SIMILAR (1014)..(1103): 661254mologous to Homo sapiens golgin-95,accession number L06147,Smith-Waterman Score=105.
atgggcagctctgccgtgcaatcccagctcgcagcccttgctccgcgtgtactcacgggaggactcgcagacgttactgccctcttgcgtgccccggccacccccgggcggcttgtagccggtgcgcggggtggctggggctacgtgcagagctgtcgcggagccggagcagcagcggtgaaggccctcggctcggccgagaccgccgtgcccactgctcgcctcggttgccgccgctttagccgcagccgctgctgccgccgccgggggagaggcagcctattgtctttctccgcggcgaaggtgtcagatgaactgaaggataatggaaacaatagcaaatttatcttctcagtcacctgtgagtcttcctttgagagtgggacttgcagagtacttggagatggaggaggacatctggacagtgagcaggaggcgcctcggcccatgccgaacatcccaggggacctggagagccgggagccgcacggtggcatttttcaactccgctggagccagtgcccaggaggaacaaagggtgtgctgccagcccctggctcacccagtggcctcgtcccagaagaagccagaggtagcggccccagccccagagagtgggggtgagtctgtgtttggggagacccaccgggccctgcagggggccatggagaagctgcaggtgacgactttatggaaggagaaggtggacctgaaggagcgggtagagaaactagagcttcaattcatccacctctcaggacagacagacaccatagtgagcgagaggctagggcaccgctggggggagctgccaggccatccgaggggccccagcatctgagccatgtcctcctgcaggaaagtacatcagccagggggcagtgtcagagacgcagcactgggagaggaggacatcgtcaggctggcccaggaccaggaggagatgaaggtgaacctgcaggagctgcggggcaggtgttgcagcttgtgggcgaccacaaggaggggcatggcaaattttgaccattgcccagaaccctgctgatgagcccactctaggagccccagtagcccaggagcttgggtgtgctgacgagcagggtggcttttatcctagatcaccactggattgctgacagatagaggaggtgggaccctgactatcacccctaatctgcagtggatttggctctcggcactcccaggctgggagctggatacctgccctggcagcatggctcagactgcatgacaggtacggcgtgcccaggatgatgtgcccaggcctctggccacctgagtccagccccccacacaaccccctccaagctcccagcccctacaccataaaccatgagctctgtgccctctctgatggttccacatctgccaccttgggcatggagcctgttgtaagagcccccaggctcagccatggagaccttgagcagtggcactgagtcctgtggctggcagggagggaagtgagacagccagcagcacaaggacagaaagaggaaagagcaaggctgcagctctagaagggaggtgcaggcagcctggctctgaggctccaggtatgccccctgtgtggagctggggcagcggggcaggcagaccattcatgcagcaggcagtgaggcatgtacctaccatggctgatgctcctcaggggccactgatagtgattctgaaagacagcatcaaatcacatggcaggtcccatgcatgggtggggcaggcctgggggtggcggacacacgcacacgccagattgtgcacacacatgctgtgaggccccacggcccgcatgcacactctaacacatgcccacaaacaacacgcatacgttgtcctcttcgccacctcccggtgcccagaaccctcaccagccggcacgtgccgcatggatctggggcgtgcagccactcggcacactgaagcacatgcgtgggcagagtcacaacacagatgctcacccgcacacagaggcatttgcaccagctccctgcacactcgtgcctggcgtgctcagaggaccacccatcctgctcagggagacagggcttgctcactaatgtccggctgtcatttctccacctaagagccttccatggctccctactgcctacagcgttgaatcccaacaagtcatactctttggactttgaaggttctccaccctgtgcgctggacttggagccccttggagtatggcttttcacacgggcttctataccgcttcgactggaagatccacctccccactgccttttctcactcagatggggacaccgaggtccagaggaaaagacacctgtcaaatgtcacagatctgggaggggacttaagaattatcatgccaagagg

SEQ ID NO: 8598 - DNA, 482 bp, Homo sapiens
  SIMILAR (325)..(269): 471254mologous to Homo sapiens Human secreted protein, SEQ ID NO: 7871,accession number G03790,Smith-Waterman Score=49.
ctaactctcatctgcccaaaaaaacttctcctttttatttaatttacatctgagttattctaacaatataacaatgattttaggtctctcttttagctgtggacgaaatgcacatgagcttacccaagatgaagaaggacatttactgggacgattctgctgctcgcccaccatacacattggcagctgctgactactgcataccctcatttctggggtcaacagtccagatggggtaagtgcatttttaaaaaatctctaatattttccagcctgagcaacatagtgagaccttgtctctataaaaaaaaaaagaaataaaataatttaaagtagccaactgtgatgtcacctgtagtcctagctacttggggaggctgcagttggaggattgcttgagcccaggggttcaaggctgcagtgagctgtgattgtgccattgcactccagcctgggtgacaaagtgaagccctgtctcaaga

SEQ ID NO: 8599 - DNA, 2104 bp, Homo sapiens
  SIMILAR (1249)..(1635): 931254mologous to Escherichia coli enterobactin,accession number M60177,Smith-Waterman Score=605.
atggcctttatgctaagtcctttgctcaaacgctatacctggaacagcgcctggctgtattacgcgcgtatttttattgcgctttgtggaaccacagcgtttccgtggtggctgggtgatgtaaaactgacgattccgctaacgctggggatggtggcagcggcgctgaccgatctcgatgaccgactggcgggacgtttgcgtaacctcatcattacgctgttctgcttttttatcgcctcggcctcagtagaattgctgtttccctggccctggctatttgcgattggcttaacgctctctaccagcggcttcattttgctcggcggtctgggtcaacgctatgcaacaattgccttcggtgcattgctgatcgccatttacactatgttgggaacatcactgtatgagcactggtatcagcagccgatgtatctgctggccggtgccgtctggtacaacgaaatgaatcgataccgctcttggtgcagcctcttattcggttatgactgggttgggattccgctggtttacacccaggttgtcactcttgctgtctataccttcttctttgcgtgcctgattggacgccagtttttggatcccaccaaaggctacgcagggcatgacttggatctttacattcccatcttcaccctcctacaattcttcttctatgcaggatggcttaagggcagtgcgccgctgcaactttcacaaccgcatcacacggcttatatcatctttacctctggctccaccggcaggccgaaaggggtaatggtcgggcagacggctatcgtcaaccgcctgctttggatgcaaaatcattatccgcttacaggcgaagatgtcgttgcccaaaaaacgccgtgcagttttgatgtctcgcaattctttgccgaatatggcgtaacgaccacgcactttgtgccgtcgatgctggcggcatttgttgcctcgctgacgccgcaaaccgctcgccagagttgcgcgacgttgaaacaggttttctgtagtggtgaggccttaccggctgatttatgccgcgtatggcaacagttaactggcgcaccgttgcataatctatatggcccgacggaagcggcggtagatgtcagctggtatccggcttttggcgaggaactggcacaggtgcgcgggcagcagtgtgccgattggttatccgggctatctcggacgccccgatctgacacgccagccgctttattgccgatccttttgccaccaggtgaacggatgtaccgtaccggagacgttgcccgctggctggataacggcgcggtggagtacctcgggcgcagtgatgatcagctaaaaattcgcgggcagcgtatcgaactgggcgaaatcgatcgcgtgatgcaggcgctgccggatgtcgaacaagccgttacccacgcctgtgtgattaaccaggcggctgccaccggtggtgatgcgcgtcaattggtgggctatctggtgtcgcaatcgggcctgccgttggataccagcgcattgcaggcgcagcttcgtgaaacattgccaccacatatggtaccggtggttctgctgcaacttccacagttaccacttagcgccaaggcggggtgccccgctgcccaagtgccccgggtggcccaggtccgcgtgtgcgcggttctggaggatctgggtgacatcagagaatcagagggagaaaggaaacaggaggcagacgctgtgctgggcactcaggacacaccccgagtgacctcacagcccaatggcctcctgttgaagatagagccccaggagaatgtgaagattgaggggcagcaccagggcctggtgtggctgtgtgtggccgcgtcgccggtcctcgtccgcgtgacaagggagaaagaagagaaaaagaaagaagagggcaataacatgaggtttacctcgttggtattgtctgttttggtaaatattgtgcgtgcacttgaaaagaaggtgttggatataatgttcaacaattgtcgtaccggggtccaggccattacgttatctcatcggcgtgctctagcaattgcaattgcattggctcgctatattaaatcggcgctatacgatggca

SEQ ID NO: 8600 - DNA, 1526 bp, Homo sapiens
  SIMILAR (3)..(761): 561254mologous to Homo sapiens vitelliform macular dystrophy protein,accession number AF073501,Smith-Waterman Score=754.
gttttatgacaacagatgaaaggaaattattcaaccacctcaagtctcctcatctgaaatattgggttccattcatctggtttggaaatcttgcaactaaagcccggaatgaaggtagaatcagagacagtgttgatctgcaatcattgatgactgaaatgaatcgataccgctcttggtgcagcctcttattcggttatgactgggttgggattccgctggtttacacccaggttgtcactcttgctgtctataccttcttctttgcgtgcctgattggacgccagtttttggatcccaccaaaggctacgcagggcatgacttggatctttacattcccatcttcaccctcctacaattcttcttctatgcaggatggcttaaggtagcagagcagcttatcaacccttttggagaagatgatgatgattttgaaactaactggtgcattgacagaaatttgcaggtctctcttttagctgtggacgaaatgcacatgagcttacccaagatgaagaaggacatttactgggacgattctgctgctcgcccaccatacacattggcagctgctgactactgcataccctcatttctggggtcaacagtccagatggggctgtctgggtccgactttcctgacgaggagtggctgtgggattatgagaagcatggccatcggcattccatgataagaagagtcaagcggttcctgagtgcccacgaacacccctccagccccagaagaagaagctacaggaggcagacaagtgacagctccatgttcttaccccgagatgacctcagcccagccagggacctactggatgtgccctcaagaaacccccccagggcctcacccacctggaagaaatcctgcttcccagaaggaagccccacgctgcacttcagcatgggagagctgtccaccatcagggagaccagccagacaagcactttacagagcctgaccccacagtccagtgtgagaacttcccccatcaaaatgccactggtacctgaggtattgatcacagcagccgaagcaccagtgcccacatcagggggctaccaccatgattccgctacctccatcttgagctctgagtttacaggggttcagccaagcaagactgagcagcagcagggccccatgggatccatcctgtctccctcagagaaggagacacctcctggaggccccagtccccagacagtttcagccagcgctgaggaaaatatattcaactgtgaagaagaccctggtgatacctttctaaaaaggtggagtcttccgggattcctggggtccagccacacttccctgggaaacctaagtccagaccccatgagctctcagccagctcttttaattgacacagaaacatcctcagagatcagtgggatcaacattgtggctggctctcgagtctcttctgatatgctgtatttaatggaaaacctggacaccaaggaaacagatatcatagagctgaacaaggaaactgaggaatcacccaaatga

SEQ ID NO: 8601 - DNA, 397 bp, Homo sapiens
  SIMILAR (3)..(395): 981254mologous to Homo sapiens Human laminin A chain,accession number W50892,Smith-Waterman Score=668.
aaaacctgatcttcaatttggaacttttggatttcatcagtgcagttggccatgagcaagtcgacctggacacctgctggctgtcagaaaggcctaagctggctcccgatgcagaggacagcaagctcttgccagagccccgggcttttccagaacagtgtgtggtggatgcagctctggagtacgttcccggcgctcaccagtttggtctcacacaaaacagccatttcatcttgccttttaatcagtcggctgtcagaaagaagctctcggttgagctaagcatccgcacgttcgcctccagcggcctgatttactacatggctcatcagaaccaagcagactacgctgtgctccagctgcacgggggccgcctccacttcatgtttgaccttgg

SEQ ID NO: 8602 - DNA, 642 bp, Homo sapiens
  SIMILAR (390)..(205): 401254mologous to Homo sapiens laminin A chain,accession number X58531,Smith-Waterman Score=133.
tcacctggtctccttggaactgctgcgcagccgccagtaaaacggctctgcacggatgtgctgccggacggtggcggcatccagcaggaagtcgggggcctggtagtaaaccccctcggtcgtgcccctcaagttactctgagaaaccacacgcagaagaggctgatcggagcccagcgttactggggtcctcacgtagtcctccagctctgagcagaggtgggacagcccggagcagaagcacgggctgcagcccagggggttgtctgcgcggagagcgaaggtgccctctcgacattcgttgcactgaggaccaaagacattttccaagatatttgcttttaggtcttgttccatgtcaacaatggtgctggcaggataacagctgcatatgagcccaaaaccgccactgtgctctgcatgaagatgtttcttagagaaaggcagccgccagttgtggacgtgctgtttctgtagcaccagccatgggaggaatgcagacttttcaaaggcagctcctgggcagctgggctcagaagaggcacctgcccgtctcagcggcagtgcacgtgcaccgagaacctctttgctgggctgtgggtggtctttggtttcatgtttcataatagcttcaaggttcat

SEQ ID NO: 8603 - DNA, 1673 bp, Homo sapiens
  SIMILAR (866)..(1342): 731254mologous to Homo sapiens Human laminin A chain,accession number W50892,Smith-Waterman Score=543.
atgcacagtacctggctctgtttcccagcaaggctcttgaaagagctgccctttcctcagggactgtttcctcgtttaaccatccggtcagcctcccgcacacccccagctgctcttgagagagttactcgagacccctgtgcagctacatgtttagacagaggatctcttaaaggaattctcggccactccccctttcaaagccctcctgtgacttcccactgtgccgaaaatccaaacaccctcaaagcccctcctccctatgttggagccacatctgccctggtgctgtccctgggtggtccagtgacaccgtggctctcggttgagctaagcatccgcacgttcgcctccagcggcctgatttactacatggctcatcagaaccaagcagactacgctgtgctccagctgcacgggggccgcctccacttcatgtttgaccttggcaaaggcagaacaaaggtctctcaccctgcactgctcagtgatggcaagtggcacacggtcaagacagactatgttaaaagaaaaggcttcataactgtcgacggccgagagtctcccatggtgactgtggtgggagatggaaccatgctggatgtggagggtttgttctacctaggaggcctgccctcccagtaccaggccaggaaaattggaaatatcacccacagcatccctgcctgcattggggatgtgacggttaacagcaaacagctggacaaggacagcccggtgtctgccttcacggtgaacaggtgctacgcagtggcccaggaaggaacatactttgacggaagcggatatgcagctcttgtcaaagagggctacaaagtccagtcagatgtgaacatcacactggaagtttcgaacctcctcgcagaatggcgtcctcctggggatcagcactgccaaagtggatgccattggactagagcttgtggacggcaaggtcttgttccatgtcaacaatggtgctggcaggataacagctgcatatgagcccaaaaccgccactgtgctctgtgatggaaaatggcacactcttcaagctaacaaaagcaaacaccgtatcactctgattgttgatgggaacgcaggttggcgctgaaagtcccacacaccccagtctactccagtggacaccaaccaatcccatttatgttggtggctaatcctgctggtgtgaagcaaaaatgcctgcgcagccagacctcgttccgcgggtgtttgaggaagctagctctatttaagaggcccgcaggtgcagtcctttgacttcagcagagcgttcgaactgcacggagttttccttcattcctgtcctgggaccgagtcctgaacttcaagcagaatcctcagttggaatcattgctcaatattttgaggagaagtgtatgtgtgaattaagaatctcttcagttcatatttcatttccaactcaggttaagtgtttctggggagagatgttgtgtttcacgttacactaaaaccacatgtgcaacaaatacctccattaaatggtctaaaatgtaaattgaattccctggctctctttttaaacgtatttttaaaaaaatctttatacacattgaatgttctgttgattacttgatagtattttatgttcctcattttgagctttttaaaaaagtatcaaaaaagatgat

SEQ ID NO: 8604 - DNA, 915 bp, Homo sapiens
  SIMILAR (150)..(4): 611254mologous to Arabidopsis thaliana putative protein,accession number AL162506,Smith-Waterman Score=144.
ctattcctcctcctcctcttcctcctcctcctcctcttcctcctcctcctcctcttcctcctcctcctcaccctcctcttctccatctataactgtttcacggctttcatattctctgggctgttcccctgtgtctttcggcttttgcccgagaggtttattgggccctgaatgcactcttgtctgagtaaaaactgtcacgttgaggcctgagagtggagcgcaggcttctgcctgtggggaggaccagtggtccagacacccagagactggagacacctgaagatctcgctgtgtcctaaacacactgttgcccagtctgctttctttctgcaccacattcacttccaattcgagagtgcctggtgctgccagctcgcagggctgcagggatcccacggggtaaggagatgctcttatggggtcctcactgctgactcgggactccacgttccaggccgggcgtcttcccgcatctgtgtgcttgcagctactgaggactgtcacagcctgggtccctcctggggtcaacaatatctttcttgtacttgctactgagaaagctgttgtgaatgttggcatgctggcagattttaagaaacacctttcacactcttgcacaacatctactgaggcagacatgcatccacgacactggctgtttgctacaggcactgtgtgactgcttgtcaggcttccagtgaggcgtctgcatcctggctctaacgtcgacttaagcgtcgagcgagcccacgtctgatggattgtctctgaggatatttctgactgggccccgtcccagggtttctggttcggcaggtctgggtgatgcctacgcactgcatttctaacaagcttccagcgatgctgctggcctggagaccatgttcggagaccacctagattacacaacat

SEQ ID NO: 8605 - DNA, 525 bp, Homo sapiens
  SIMILAR (170)..(6): 411254mologous to Arabidopsis thaliana F15O4.29,accession number AC007887,Smith-Waterman Score=100.
tcacacatttccaaccttctcatcatcgccgcatcttgtaatgatgatccagccatcgtcgtcatctcctcctcctcctcttcctcctcctcctccttcttcttcctcctcttcctcttcctccttctcctcctcctcttcttcttttttttttgtagcgatgaagccttgccagcttgggtaatagcccattaaggccccaccatacggcaggtcccgaggtccggtccggtgctcagcaagaacgaggaatacggacaagtggagggtgagcaaggccaagaggagctctactgggcccataggaccgcttagtggacacgctcgatgggtagctcgtctccacaaccagggtgtaccaatgtgagtgtcagctatcagcagagagtagaccctggagtggatagctcctctccacaggtaggtcatcctcagctttgctccaagatcagagcaggtgccgctatgggttgggggagcttccggggcccctgagagtacagagatgcctgggtccgcagccat

SEQ ID NO: 8606 - DNA, 471 bp, Homo sapiens
  SIMILAR (236)..(346): 291254mologous to Hydra sp. mini-collagen,accession number X61046,Smith-Waterman Score=49.
tcagccttgcaaagtgctgagatggaccacaggatcaaccaccacaccagccatcgtcgtcatctcctcctcctcctcttcctcctcctcctccttttcctcctcctcttcctcttcctccttctcctcctcctcttcttctttttttttgtagcgatgaagccttgctgtgttgccacactggtgttgaacttttttttgtgatatttgcttattgcagtggtctgaaactgaacctgcaatatctccaaggtatgcatcatcatcaggtctgaatgggtttcctctaccccgcacaccacctgcatatgcataaataccaagttctggcatccatttcaacccgtcactcgcaatcaagccgagcacgaccaccacactggtgcgcacacccacgacgcaccaccacagcagaagaccaaccatcacgacacaaagcagcaccaccgcaccgagccgactgcaccccat

SEQ ID NO: 8607 - DNA, 476 bp, Homo sapiens
  SIMILAR (2)..(103): 881254mologous to Homo sapiens coding sequence (1 is 3rd base in codon),accession number V00478,Smith-Waterman Score=155.
cggtggctccatcctggcctcactgtccaccttccagcagatgtggattagcaagcggagtacgcacgagtcgggcccctccatcgtccaccgcaaatgcttctaaacggactcagcagatgcgtagcatttgctgcatgggttaattgagaatagaaatttgcccctggcaaatgcacacacctcatgctagcctcacgaaactggaataagccttcgaaaagaaattgtccttgaagcttgtatctgatatcagcactggattgtagaacttgttgctgttacttgctttgagttggaagcggtttgcatttacgcctgtaaatgtattcattcttaatttatgtaaggtttttttttgtacgcaattctcgattctttgaagagatgacaacaaattttggttttctactgttatgtgagaacattaggccccagcaacacgtcattgtgtaaggaaaaataaaagtgctgcc

SEQ ID NO: 8608 - DNA, 849 bp, Homo sapiens
  SIMILAR (3)..(59): 571254mologous to Mus musculus gamma actin-like protein,accession number AF195094,Smith-Waterman Score=46.
  misc_feature (1)...(849): n = a,t,c or g
tccgcaaagacctgtacgccaacacgggcgctgtcgggcggcaccaccatgtacccgggcattgctgacaggatgcagaaggagatcaccgccctggcgcccagcaccatgaagatcaagatcatcgcacccccagagcgcaagtactcggtgtggatcggtggctccatcctggcctcactgtccaccttccagcagatgtggattagcaagcaggagtaccgacgagtcgggcccctccatcgtccaccgcaaatgcttctaaacggactcagcagatgcgtagcattctgctgcatcgggttaattgagaatagaaatttgcccctggcaaatgcacacacctccatgctagcctcacggaaactggaataagccttcgaaaagaaattgtccttgaagcttgtatctgatattcagcactgggattgtaggaacttgttgctgattttgaaccttgtatttgaagttaactgtttccccttggtatttgttttaattacccctggtaacaaatctttgaggttcaacctttagtacggtgtgggcttggtcacttcgtgggctaaaggtaagaacggtgcttggtggaagacaaagtctgtgggcttgggtgagtctggtgtggccagcagcctctgatctgtgcagggtattaacgtgtcagggctgagtgttctgggatttctctagaggctggcaagaacccagttggtttgtctttggggtctgtcagggttggaaagtccaagccgtaggacccagtttcctttcttagctgatgtctttggccagaacaccgtgacctgtacttgctttgaggtggaggcgnttcatttacgcccggaa

SEQ ID NO: 8609 - DNA, 1379 bp, Homo sapiens
  SIMILAR (393)..(416): 1001254mologous to Mustela putorius furo beta-actin,accession number AF038150,Smith-Waterman Score=42.
tcaacacccctggccatgtacatggccatccaagctgtgctgtccctctacacctctgggcgcaccactggcattgccatggattctggagatggggtcgcccacacggtacccatctatgagggctacaccctcccccatgccatcctgcatctggacctggctggctgggacctgactgactacttcatgaagatcctcatggagtgcagctaccgtttcaccaccatggctgagcaggagattgtgtgtgacatcaaggagaagctgtgcaatattgccctggacttcgagcacaagatggccactggcgcatcctcctcctctctggagaagagctacgaggtgcctgatggccaggtcatcaccatcggcaacgagtggttctggtaccggaggcactgtttcagccttccagggcatggaatcttgtggcatccaagagaccaccttcaactccatcatgaagtgtgatgtggacatctgcaaagaactgtatgccaaaatggtgctgtccagtggcaccaccatgtatctgggaattgccgacaggatgcagaaggagatcacggcccttggccgcccaagcacattaagattcagattcatcgcacccccaggaggcgcaagtactcggtgttggatcggtgggctcaatcctggcctcactgtccaccttccagcaggatgtggatttagcaagcaggaagtacgacgagtcggggcccctccatccgtccaccgcaaattgcttctaaacggactcagccagatgccgtagcatttgctggcatgggttaattgagaatagaaatttgcccctgggcaaatgcacacaccttcatggctaagcctcacggaaacttggaataagccttcggaaaaaggaaattgtccttggaagctttgtatctggatatcagcactgggattgtaggaacttgttgctggattttgaaccttgtatttgaagttaactgttccccttgggtatttaacgtgttcaggggctgagtgttctgggatttcttctaggaggctgggcaagaacccagttgtttttgtcttgcggggtcttgtcagggtttggaaaagtccaagccgtagggaccccagtttcctttcttaagctgatgtcttttggccaaaaccccggtgggctgttaattgcttttaagttgggaagcggtttgcatttacgcctgtaaatgtattcaatcctaaattaaggtaaggttttttttgtacgcaattctcgattctttgaagagatgacaacaaatctttggttttctcctagttatgtgagacacattagggccccagcgggctcgtctttgtgtaaggaaaaataaaagtgctgccgtcccccaaaaaaa

SEQ ID NO: 8610 - DNA, 392 bp, Homo sapiens
  SIMILAR (144)..(392): 791254mologous to multiple sclerosis associated retrovirus protease,accession number AF009666,Smith-Waterman Score=334.
catgtccactatgccgaggcaatcactggaaggtgcactgccccagcggacgaaggttccctaggtcagaagcccccaaccagatgatccaacaacaggacagagggtgcccggggcaagcgccagctcatgtcatcaccctcactgagccccgggtacgtttaaccattgagggccaggaaactgacttcctcctggacactggcgcggccttctcagtgttaatctcctgtcctggacgactgtcctcaaggtctgttaccatccgatgaatcctgggacagcctgtaaccaggtatttctcccacctcctcagttgtaattgggagactttgctcttttcacatgcctttcttgttatgcctgaaagtcccacacccttattagggagg

SEQ ID NO: 8611 - DNA, 567 bp, Homo sapiens
  SIMILAR (66)..(128): 631254mologous to Human T-cell lymphotropic virus type 1 gag protein,accession number L36905,Smith-Waterman Score=83.
tcacccagtaggacttgttaccagtgtggtttgcaaggacacttttaaaaagattgtccagtgagaagccgccccctcgtccatgtctgctatgccaaggcaatcactggaaggtgcactgccccagaggacaaaggttctctgggtcagaagcccccaaccagatgatccagcaacaggattgagggtgcctgacgactgagaacatactatacgccgtgcatacgccttggggaagtctgctgtgacatctaagccgccaccgccatacccggctcggtccaggctgaatgtgaggcgtttgtgctctcttgcgaccaactgagtatagagacacgctgtacgagaatctctggcatgcagctgacgcagtgtttggaggtttgtttctcgccaccagatgcccaccgaagaggagtgggaaaggtctataatcagcattctggctttactattataaatgttggagaagcgggggcaggcagattcaaatgctagctcataaatgatgatgccacaagcatcatctttgtatatagagctcttttcctccactgaagcagcatg

SEQ ID NO: 8612 - DNA, 377 bp, Homo sapiens
  SIMILAR (3)..(215): 801254mologous to Gallus gallus heat shock cognate 70,accession number AJ004940,Smith-Waterman Score=269.
agatgtcccctatggttgtgacaaagatgaaggaaattgcagaagcctaccttgggaagactgttaccaatgctgtgctcacagtgccagcctactttaatgactcagcatcaggctaccaaaaagatgctagaactattgctggtctcaatggacttagaattagcaatgagccaactgctgctgctattgcttatggcttaaaccaaaaggtttatgaaggcgagcgtgccgtgagcaaggataacagcctgcttggcaagtttgaactcacgggcatacttcctgtgacagtgctcctcacactgaagtcacttgacactgatgctagtgacatcctcagtgtctctgctgtggacaaaagtataggaagctgg

SEQ ID NO: 8613 - DNA, 423 bp, Homo sapiens
  SIMILAR (4)..(363): 901254mologous to Mus musculus heat shock protein 70 cognate,accession number M19141,Smith-Waterman Score=555.
atggtttttgatgccaaacgtctgattgcacacagatttgatgatgctgttgtccagtctgagatgaagcattggcccttcatggtggtgaatgatgctggcaggcccaaggtccaagtggaatacaagggagagagcaaaagcttctatccagagaaggtatcctctatggttctgacaaatatgaaggaaattgcagaagcctaccttgggaagactgttacccatgctgtggtcgcagtgccagcttactttaatgactctcagcgtcaggctaccaaagatgctggaactattgttggtctcaatgtacttagaattattaatgagccaactgctgctgcttatggcttagacaaaagacacagatcctcactacctattctgacagccagcctggtgtgctggttcaggtttatgaag

SEQ ID NO: 8614 - DNA, 1662 bp, Homo sapiens
  SIMILAR (4)..(927): 861254mologous to Homo sapiens 71 Kd heat shock cognate protein,accession number Y00371,Smith-Waterman Score=1315.
atggacactaaacagttgattggtgatgccgcaaagcatcaagttgcaatgaaccccaccaacacagtttttgatgccaaacgtctgattggacgcagatttgatgatgctgttgtccagtctgatatgaagcattggcccttcatggtagtgaatgatgctgacaggccccaggtccaagtagaatacaagggagagaccaaaagcttctatccagaggaggtatcctctattgttctgacaaagatgaaggaaattgcagaagcctaccttgggaagactgttaccagtgctgtggtcacagtgccagcttactttaatgactctcagtttcaggttaccaaagatgctggaactattgctggtctcaatgtacttagaattattaatgagccaactgttgctgctattgtttacaaaagttcagacaaaaaggttggagcacaaagaaacgtgcttatctttgacctggggggtggcactttcggtgtgtcaatcctcactattgaggatggaatctttgaggtcaagtctacagccagagacaaccacttgggtggagaagattttgacaaccgaatggtcaaccattttattgctgagctcaagcgcaagcataagaaggacatcagtgagagcaagagagctgtaagatgcctccgtactgcttgtgaacatgctaagcgtactctctcttccagcacccaagtcagtattgagatcgattctctctatgtaggaattgacttctatacctccattacctgtgcccagtttgaagaattgaatgctgacctgttctgtggcaccctggacccagtagagaaagcccttcgagatgccaaaccagacaagtcacaaattcatgatattgtcctggcagccatcctgtctggagacaagtctgaaaatgttcaagatttgctgctcttggacgtcactcctctttcccttggtattgaaactgctagtggagtcatgaccatcctcatcaactgtaataccaccattcctaccaagcagacacagaccttcattacctattctgacaaccagcctggtgtgcttattcaggtttatgaaggtgagcgtgccatgtccaaggataacaacctgcttggcaagtttgaattcacgggcatacctcctgaaccccaaggtgttcctcagattgaagtcacttttgacattgatgccaatggtatcctcagtgtctctgctgtggacaaaagtacaggaaaagagaataaaattactatcactaataataagggccatttgagcaaggaagacattgaacctgaagatgagaagcagagggacaaggcgtcatccaagaattcacttgagtcctatgcattcaacatgaaagcaactgtcgaagatgagaaacttcaagacaagattaatgatgaggacaaacagaagattctggacaggtgtaatgaaattatcaactggcacaataagaatcggactgccaagaaggaagaatttgaacatcagcagaaagagctggaggaactttgcaacccaatcatcaccaagctgtaccagagtgcagaaggcatgccaggaagaatgcctgggggattccctgttggtggagctcctccttctggtggtgcttccttagggcccaccatcgaagaggttgattaa

SEQ ID NO: 8615 - DNA, 1452 bp, Homo sapiens
  SIMILAR (478)..(1449): 771254mologous to Homo sapiens 71 Kd heat shock cognate protein,accession number Y00371,Smith-Waterman Score=1238.
atggtgaatgatactgacaggcccaaggtccaagtagaatacaagggagagaccaaaatcttctatccagaggaggtgtcctctatggtcctgacaaagatgaaggaaattgcagaagcctaccttgggaagactgttaccaatgctgtggtcacagtgccagcttactttaataactctcagcatcaggctaccaaagatgctggaactattgctggtctcaatgtacttagaattatcaatgagccaagtgctgctgatattgcttacggcttagacaaaaaggttggagctgaaagaaatgtgtttatctttgacctgagaggtggcacttttgatgtgtcaatcctcattattcaggatggaatctttgaggtcaaatctggagacacccacttgggtgaagaagactttgacaaccgaattgtcagccattttattgctgagttcaagcataagtataagaaagacatcaccattcgagatgtcaaactagacaagtcacagattcatgatattgtctctattggtggttatactcatatccccaagattcagaagcttctccaagacatcttcaatagaaaagaactgaataagagcatcaaccttgatgaagctgttgcttatggtgcagctgtccaggcagccatcctatctggagacaaatctgaaaacgttcaagatttgctgctcttggatgtcaatcctctttcctttggtattgaacttgctggtggagtcatgactgtcctcctgtcctcatcaagcatagtactaccattcctaccaagcagacagagaccttctgacagcctatctattctgacaaccagcctggtttatgaaggtgagtgtgctatgaccaaggatgacaacctgcttgacaagtttgaactcacaggcataccttctgcaccccatggtgttcctcagattgaagtcacttttgacattgatgccaatggcatcctcaatgtctctgctgtggacaagagtgtaggaaaagagaacacgattactaccactaatgacaagcaccgtttgagcaaggaagacatgaacatatggtccgctgagaagtacaaagctgaagataagaggcagagggacaaagtgtcatccaagaattcacttgagtcctatgcattccacatgaaagcaacagtcaaagatgagaagcttcaaggtaagattaatggtgaggacaaacagaagattctggacaagtttaatgaagttatcaaatggctggataagaatcaggctgctaagaaggaagaatttgaacatcagcagacagagctggagaaagtctgcaatctcatcattagcaagcggtaccagagtgcaggaggcatgcctggaggaatgcctgggggattccctggtggtggagctcctccctctagtggtgcttcctcaaggcccatcactgaagaggttgattaa

SEQ ID NO: 8616 - DNA, 1388 bp, Homo sapiens
  SIMILAR (188)..(1387): 651254mologous to Homo sapiens 71 Kd heat shock cognate protein,accession number Y00371,Smith-Waterman Score=1100.
gaaaccggtctcattgaactcgcctgcagctcttgggttttttgtggcttccttcgttattggagccaggcctacaccccagcaaccatggtccaaggggacctgcagttggtattgatcttggcaccacctactcttgtgtgggtgttttccagcacggaaaagtccgagataattgccaatgtatcagggaaaccgaaccactccaagctatgtcgcctttacggacactgtaacggttgatcggtgatgccgcaaagaatcaagttgcaatgaaccccaccaacacaagtttttgattgccaaacggtctgattggacggcagatttgattgatgctgttgtcccagtctgatatgaaacattgggccctttatggtggtgaatgatgctggcaggcccaaggctccaagttagaataccaagggagagaccaagagccttgtatccagaggagggtgtctttctatgggtctgaccaaagatgaaaggaaatttgcagaagccttaccttggggaagactgttaccaatgcttgtggtcacagtgcccagtttactttaatgactctccagcgtcaggctaccaaagatgctggaactattgctggtctcaatgtacttagaatttattaatgaggccaactgctgctgctattgctttacggcttagacaaaaaaggtttggagcagaaaagaaaccgtgctcatcttttgacctggggaggtggcactttttgatgtgtcaatcctcactattgaggattggaatctttgaaggtcaagtctacagctggagacacccacttgggtgggaggaagattttgacaaccgaatggtcaaccattttattgctgagtttaagcgcaagcataagaaggacatcagtgagaacaagagagctgtaagacgcctccgtactgcttgtgaacgtgctaagcgtaccctctcttccagcacccaggccagtattgagatcgattctctctatgaaggaatcgacttctatacctccattacccgtgcccgatttgaagaactgaatgctgacctgttccgtggcaccctggacccagtagagaaagcccttcgagatgccaaactagacaagtcacagattcatgatattgtcctggttggtggttctactcgtatccccaagattcagaagcttctccaagacttcttcaatggaaaagaactgaataagagcatcaaccctgatgaagctgttgcttatggtgcagctgtccaggcagccatcttgtctggagacaagtctgagaatgttcaagatttgctgctcttggatgtcactcctctttcccttggtattgaaactgctggtggagtcatgactgtcctcatcaagcgtaataccaccattt

SEQ ID NO: 8617 - DNA, 2130 bp, Homo sapiens
  SIMILAR (2)..(670): 491254mologous to Homo sapiens 6-phosphofructo-2- kinase,accession number Z83821,Smith-Waterman Score=446.
acgatatctcaactggataggaacaccaactaaaggtatgtctctgaaagcctttgttcaacaaccccataaaagctactggctgaaaaccttacttccagacaacatggaagccctgcaaatcaggaagtaagtacccaatattttaggaacctgtgctgtctcatggctgaaaggcccttgttcagatgttgcggtaaagaaattttttattttttccttgggtaactactgggaagggaattagctaatatgagaacatggttacaaggtatggtaacactccaactcttatctagagcctatttctccagcacaaaccccaaagaaaaggaccaccagttacttttccactttgctctgccttaggcttagatcatgcctaagctttctaaagagaattgagtgctatgaggtcaactaccaacccttggatgaggaactggacaggtaagagccagcaccccaaagtcaaggtctagatctttcacccagttttgatatcctgtaggatcacatccagagccgcacagtctactacctcatgaatatccatgtcacacctcgctccatctacctttgccgacatggcgagagtgaactcaacatcagaggccgcatcggaggtgactctggcctctcagttcgcggcaagcaggtagggtgggccacacacacccagatgggttggctgggctgtcctaggtgggctgcaggcttcccaattctgccctcccgaccttatcccaacgcaggtgtcacactggcagcccctgtccccactcatgacagtgtccttcctgccctccccactagggcaggcggccaggatgagacagagccaggactgaaagccgggcctactggcctgccctcagctcccccactggagatggggggaggtgccccaggcaaggcactatcctggatggccacaccctggtgtctccctttctgttacgtcgaggtagctctcacttgcgcagcacccactgtgtaccaggctgtggtctgggtgctccccatccactatctaaagtgcagcccccagacagcaggccagatgagacaatgctctttggatatgaggccagagaggggcagggatgtgtccgagggcacaagggaccatgtaagggagctgagggagtttaacctatggctcatacctccctgtcaagggctccttccgaccagtcacatgaagaggaccatccagacagctgaggccctgggtgtcccctatgagcagtggaaggccctgaatgagattgatgcggtgagatgcatggggtgaatctcctgtgtgtgggggtgacttgagtctgggattatcccactgcgagaccaagataaatatcgctaccgctatcccaagggagaggtaaggtttgcggggtggcctaatgcctaggactactccccagtgtcttcattgcaactgaatgtatctgttgatctgccaccaggcgtctatgcggtgcctcctggcctatttcctgataaaaagttcaggtactaccctcatctctgctttgggaatgtttgatggtatttgagacactgaccccaacaattagatatctatatcttagtagttaagagaagagtatctagaacaaggatgcctaggttcagattctttctctttcacatactagctgtactgcctttcacaaatttctttaacttctctggcctcagtgtcctcatctgtaaaatggggagaataatgatgaattttaaataaacataagtaaaaagtttagaacagttcatgacacattgtgtgggctatatattaactgctattattagtatagtattattcttagctaacattttcaaagccaacgttaacagtctgcctcaatctggaaaagatgagctagtatttctgtgaagcatgctaccatcaggtgatagtagggcctttcatagcttcatgatcctgattacaagtttctgtccttgctataggggtaatttccccaagatagtgatgttttcattttaaattgtttttcaaatgataatttatttttaaaaaaatatgtaggcattgcatttacagagtatttacacactgactgcataggctgaactgcaaactggggcagctggcctggc

SEQ ID NO: 8618 - DNA, 206 bp, Homo sapiens
  SIMILAR (156)..(7): 381254mologous to Mus musculus immune associated protein 38,accession number Y08026,Smith-Waterman Score=96.
  misc_feature (1)...(206): n = a,t,c or g
acttgggagctgaaaatgtccggagtgtccacgacttccacgtggnacttgtcnccactgcggctgcccgtggtgnaggccctggttacagacgtggcccccagcctggagaagaaccgtagacattttcttcatctgtcgccatcttccttcctcccatgcttacctttcctggtgacaggctctgaagttggccacaagaagcc

SEQ ID NO: 8619 - DNA, 413 bp, Homo sapiens
  SIMILAR (174)..(413): 951254mologous to Homo sapiens reverse transcriptase,accession number L27428,Smith-Waterman Score=416.
gcaattctttgaagaaagtcattggtagcttgatggggatggcatttaatctataaattaccttgggcagtatggccattttcacgatattgattcttcctacccacgagcatgaaatgttcttccatttgtttgtatcctcttttatttccttgagcactggtttgtagttctccttggccatcagagaaatgcaaatcaaaaccacaatgagataccatctcacaccagttagaatggcaatcattaaaaagtcaggaaacaacaggtgctggagaggatgtggagaaataggaacacttttacactgttggttggactgtaaactagttcaaccattgtggaagtcagtgtggtgattcctcaggaatctagaactagaaataccatttgacccagccatcccattactg

SEQ ID NO: 8620 - DNA, 5976 bp, Homo sapiens; identical to SEQ ID NO: 5415
  SIMILAR (1957)..(5781): 971254mologous to Homo sapiens putative p150,accession number U93563,Smith-Waterman Score=6519.
  misc_feature (1)...(5976): n = a,t,c or g

SEQ ID NO: 8621 - DNA, 1734 bp, Homo sapiens
  SIMILAR (91)..(1728): 891254mologous to Homo sapiens putative p150,accession number U93569,Smith-Waterman Score=2503.
gaacgcagctcctcaccagcaacggaacaaagctggatggagaatgactttgatgagttgagagaagaaggcttcagacgatcaaacttctccgagctaaaggagaaagttcgaacccatcacaaacaagataaaaaccttgaaaaaaggagctggttttttgaaaagatcaacaaaatcgatagacctctagcaagactaataaagaagaaaagagagaagagtcaaataaacgcaataaaaaacgataaaggggatatcactgccgatcccacagaaatacaaactaccatcacagaatactataaacacctctatgcaaataaactagaaaatctagaagcaatggataaattccttgacacatacaccctcccaagaataaaccaggaagaagttgaatctctgaataggccaataacaggctctgaaactgaggcaataattaatagcttaccaaccaaaaaaagtccaggaccagatggattaacagctgaattctaccagaggtacaaggaggagctggtaccattccttctgaaactattccaatcaatagaaaaagagcgaatcctcccgaactcattttatgagggcatcatcctcctgataccaaagcctggcagagacaacacaaaaaaagataattttaaaccaatatccctgatgaacatggatgcaaaaatcctcaataaaatactggcaaaccgaatccagcagcacatcaaaaagcttatccaccatgatcaagtgggcttcatccctgggatgcaaggctggttcaacatatgcaaatcaataaatgtaatccagcatataaacagaaccaaagacaaaaaccacatgattatctcaacagatgcaggaaaggcctttgacaaaattcaacagcccttcatgctaaaaactctcaataaattaggtattgatgggatgaatctcaaaataataagagctatttatgacaaacccacagccaatatcatactgaatagacaaaaactggaagcattccctttgaaaactggcacaagacagggatgccctctctcaccactcctattcaacatagtgttggaagttctggccagggcaatcaggcaggagaaggaaataaagggtattcaattaggaaaagaggaagtcaaattgtccctgtttgcagatgacatgattgtatatctagaaaaccccatcgtctcagcccaaaatctccttaagctgataagcaacttcagcaaagtctcaggatacaaaatcagtgtgcaaaaatcacaagcattcttatacaccaataacagacaaacagagagccaaatcatgagtgaaatcccattcccaattgcttcaaagagaataaaatacctaggaatccaacttacaagggatgtgaaggacctctttaaggagaactgcaaaccactgctcaaggaaataaaagagaacacaaacaaatggaagaacattccatgctcatggatagaaagaatcaatattgtgaaaatggccatactgcccaaggtaatttatagtttcaatgccatccccatcaagcacccaatgactttcttcacagaattggaaaaaacaactttaaagttcatatggaaccaaaaaagagcccgcatcaccaagtcaatcctaagacaaaagaacaaagctggaggcatcacgctacctgaattcaaactatactacaagactacagtaaccaaaatagcatggtacgggtaa

SEQ ID NO: 8622 - DNA, 1675 bp, Homo sapiens
  SIMILAR (182)..(1675): 931254mologous to Homo sapiens putative p150,accession number U93568,Smith-Waterman Score=2372.
tgcaatcaaactagaactcaggattaagaatctcactcaaaaccgctcaactacatggaaactgaacaacctgctcctgaatgactactgggtacatagcgaaatgaaggcagaaataaagatgttctttgaaaccaacgagaacaaagacacaacataccagaatctctgggacacattcgaagcaaaaagcaagagcaaacaacattcaaaagctagcagaaggcaagaaataactaaaatcagagcagaactgaaggaaatagagatacaaaaaacccttcaaaaaattaatgaatccaggagctggttttttgaaaggatcaacaaaattgatagaccactagcaagactaataaagaaaaaaagagagaagaatctaatagacgcaataaaaactgataaaggggatatcaccaccaatcccacagaaatacaaactaccatcagagaatactacaaacacctctacgcaaataaactagaaaatcgagaagaaatggataaattcctcgacacatacactctcccaagactaaacgaggaagaagtcgaatctctgaatacaccaataacaggctcagaaattgtagcaataatcaatagcttaccaaccaaaaagagtccaggaccagatggattcacagccgaattgtaccagaggtacaaggaggaactggtaccattccttctgaaactattccaatcaatagaaaaagagggaatcctccctaactcattttatgaggccagcatcattctgataccaaagccaggcagagacacaaccaaaaaagagaattttagaccaatatcgttgatgaacattgatgcaaaaatcctcaataaaatactggcaaaaggaatccagcagcacatcaaaaagcttatccaccatgatcaagtgggcttcatccctgggatgcaaggccggttcaatatacgcaaatcaataaatgtaatccagcatataaacagaaccaaagacaaaaaccacatgattatctcaatagatgcagaaaaagcctttgacaaaattcaacaaccctttatgctaaaaactctcaataaattaggtattgatgggacgtatttcaaaataataagagctatctatgacaaacccacagccagtatcatactgaatgggcaaaaactagaagcattccgtttgaaaactggcacaagacagggatgccctctctcaccactcctattcaacatagtgtttgaaattctggcccgggcaattaggcaggagaaggaaataaagggtattcaattaggaaaagaggaagtcaaattgtccctgtttgcaggcgacatgattgtatatctagaaaaccccattgtctcagcccaaaatctccttaagctgataagcaacttcagcaaagtctcaggatacaaaatcaatgtgcaaaaatcacaagcattcttatacaccaataacagacaaacagagagccaaatcatgagtgaactcccattcacaattgcttcaaagagaataaaatacctaggaatccaacttacaagggatgtgaaggacctcttcaaggagaactacaaaccactgctcaaggaaataaaagaggatacaaacaaatggaagaacattccatgctcatgggtaggaagaatcaatatcgtgaaaatggccatactgcccaag

SEQ ID NO: 8623 - DNA, 2142 bp, Homo sapiens; identical to SEQ ID NO: 4221
  SIMILAR (799)..(1992): 901254mologous to Homo sapiens putative p150,accession number U93563,Smith-Waterman Score=1908.

SEQ ID NO: 8624 - DNA, 1245 bp, Homo sapiens; identical to SEQ ID NO: 6379
  SIMILAR (406)..(1242): 931254mologous to Homo sapiens putative p150,accession number U93572,Smith-Waterman Score=1345.

SEQ ID NO: 8625 - DNA, 1785 bp, Homo sapiens
  SIMILAR (326)..(1783): 911254mologous to Homo sapiens putative p150,accession number U93572,Smith-Waterman Score=2221.
cttcagtagctgatttgatcaagtggaagaaagggtatcagtgattgaagatcaaatgaatgaaatgaagcgagaagagaagttcagagaaaaaagagtaataagaaatgaacaaagcctccaagaaatatgggactatgtgaaaagactaaatctgcatctgattggtgtacctgaaagtgactgggagaatggaaccaagttggaaaacactcttcaggatattatccaggagaacttccccaatctagcaaggcaggccaacattcagattcaggaaatacagagaatgccacaaagatactcctcgagaagaacaactccaagacacataattctaaatgcccacaagagaaagtaggaaagatataaaattgacaccctaacatcacaattaaaagaactagagaagcaagagcaaacatattcaaaagctagcagaaggcgagaaataactaagatcagagcagaactgaaggaaatagagacacaaaaaacccttcaaaaaatcaatgaatccagaagctgttttgaaaagatcaacaaaattgatagactgctagcaagactaataaagaagaaaagagagaagaatcaaacagacgtaataaaaaatgataaaggggatatcaccaccgatcccacagaaatacaaactaccatcagagaatactataaacacctctacacaaataaactagaaaatctagaagaaatggataaatttctggacacatacaccctcccaagactaaaccaggaagaagttgaatctctgaatagaccaataacaggctctgaaattgaggcaataattaatagcctaccaaccaaaaaaagtacaggaccagacagattcacagccgaattctaccagaggtacaaagaggagctggtaccattccttctgaaactattccaatccatagaaaaagagggaatcctccttaattcattttatgaggccagcaccatcctgataccaaaggctggcagagacacaacaaaaaaagagaattttagaccaatatccctgatgaacattgatgcaaaaatcctcaataaaatactggcaaaccgaatccagcagcacatcaaaaagcttatccactacaatcaagtcagctttatccctgggatacaaggctggttcaatatatgcaaatcaataaatgtaatccagcatataaacagaaccaaagacaaaaaccacacgattatctcaatagatgcagaaaaggcctttgacaaaatccaacagcccttcatgctaaaaactcttaataaactaggtattgatgggacgtatctcaaaataatgacagctatttatgacaaacccacagccagtaccatactgaatggacaaaaactggaagcattccctttgaaaactggcacaagacagggatgccctctctcaccactcctattcaacatagtgttggaagttctggccagggcaatcaggcaggagaaagaaataaagggtattcaattaggaaaagaggaagtcaaattgtccctgtttgcagacgacatgattgtatatttagaaaaccccattgtctcagcccaaactctccttaaactgataagcaacttcagcaaaatctcaggatacaaaatcaatgtgcaaaaatcacaagtattcccatacaccaataacagacaaacagagagccaaatcatgagtgaactcctattcacaattgcttcaaagagaataaaatacgtaggaattcaacttacaagggatgtgaaggacctcttcaaggagaacta

SEQ ID NO: 8626 - DNA, 5130 bp, Homo sapiens; identical to SEQ ID NO: 2332
  SIMILAR (2614)..(4473): 941254mologous to Homo sapiens putative p150,accession number U93572,Smith-Waterman Score=3044.

SEQ ID NO: 8627 - DNA, 1461 bp, Homo sapiens
  SIMILAR (384)..(431): 811254mologous to Homo sapiens putative p150,accession number U93564,Smith-Waterman Score=68.
atgggagactttaacaccccactgtcaacattagacagatcaacaagacagaaagttaacaaggatacccaggaattgaattcagctctgcaccaagtgagcctaacagacatctacagaactctccaccccaagtcaacagaatatacattcttctcagcaccacatcgcacttattccaaaattcaccgcatagttggaaaaataccaactaccatcagagaatactgtaaagacctctatgcaaataaagtagaaaatctagaagaaatggataaattcctcgacacatacaccctcccaagactaaaccaggaagcagttgaatctctgaatagaccaataacaggctctgaaattgaggcaataattaatagcctacaaccaaaaaaagttcaggaccagatgaattcaaagccgaattctaccagagtgttggaagttctggccagggcaatcaggcaggagaaagaaataaagtgtattcgattaggaaaagaggaagtcaaattgtctctgtttgcagatgacatgattgtatatttagaaaaccccattgtctcagcccaaaatctccttaagctgataagcaacttcagtaaagtctcaggatacaaaatcaatgtgcaaaaatcacaagcattcttatacaccaataccagacaaacagagagccaaatcatgagtgaactcccattcacaattgcttcaaagagaataaaatacctaggaatccaacttacaagggatgtggaagacctcttcaaggagaactacaaaccactgctcaatgaaataaaagaggacccaaacaaatggaagaacattccatgctcatggataggaagaatcagtatcctgaaaatggccatactgcccaaggtaattgatagattcaatgccatccccatcaagctaccaatgactttcttcacagaattggaaaaaactactttaaagttcatatggaaccaaaagagagcccacattgccaagacaatcctaagccaaaagaacaaagctggaggcatcatgctacctgacttcaaacaatactacaaggctacagtaaccaaaacagcatggtactggtaccaaaacagagatagagaccaatggaacagaacagagccctcagaaataataccacacatatacaaccatctggtctttgacaaacctgacaaaaacaagcaatggggaaaggattccctatttaataaatggtgctgggaaaactggctagccatgtgtagaaagctgaaactggattccttccttacaccttatacaaaaattaattcaagatggattaaagacttaaatgttagacctaaaaccataaaaaccctagaagaaaacctaggcaataccattcaggacataggcatgggcaaggacttcatgtctaaaacaccaaaagcaatggcaacaaagccaaaattgacaaatgggatctaa

SEQ ID NO: 8628 - DNA, 1929 bp, Homo sapiens
  SIMILAR (425)..(1693): 891254mologous to Homo sapiens putative p150,accession number U93570,Smith-Waterman Score=1930.
tgcacccaatacaggagcacccagattcataaagcaagtcctgagtgacctacaaagagacttagactcccacacaataataatgggagactttaacaccccactgtcaacattagacagatcaatgagacagaaagttaacaaggatatccaggaattgaactcagctctgcaccaagcggacctaatagacatctacagaactctccaccccaaatcaacagaatatacattcttttcagcaacacaccacacctattccaaaattgaccacatagttggaagtaaagctctcctcagcaaatgtaaaagaacagaaattataacaaactgtctctcagaccacagtgcaatcaaactagaactcaggattaagaaactcactgaaaaccgctcaactacatggaaactgaacaacctgctcctgaatgactactgggtacataacgaaatgaaggcagaaataaagatggtctttgaaaccaatgacactctcccaagactaaaccaggaagaagttgaatctctgaatagaccaaaaacaggctctgaaattgaggcaataattaatagcctaccaaccaaaaaaagtccaggaccagatggattcacagctgaattctaccagaggtacaaggaggagctggtaccattccttctgaaactattccaatcaatagaaaaagagagaatcctccctaactcattttatgaggccagcatcatcctgataccaaagcctggcagagacacaacaaaaaaagagaattttagaccaatatccctgatgaacattgatgcaaaaatcctcaataaaatactggcaaaccgaatccagcagcacatcaaaaagcttatccaccatgatcaagtgggcttcatccctgggatgcaaggctggttcaacatatgcaaatcaataaatgtaatccagcatataaacagaaccaaagacaaaaaccacatgattatctcaatagatgcagcaaaggcctttgacaaaattcaacaacccttcatgctaaaaactctcaataaattaggtattgatgggacttatctcaaaataataagagctatctatgacaaacccacagccagtatcatactgaatggacaaaaactggaagcattcactttgaaaactggcacaagacagggatgccctctctcaccactcctattcaacatagtgttggaagttctggccagggcaatcaggcaggagaaggaaataaagggcattcaattaggaaaagaggaagtcaagttgtccttgtttgcagatgacatgattgtatatctagaaaaccccatcatctcagcccaaaatctccttaagctgataggcaacttcagcaaagtctcaggatacacaatcaatgtgcaaaaatcacaagcattcttatacaccaataacagacaaacagagagccaaatcatgagtgaactcccattcacaattgcttcaaagagaataaaatacctaggaatccagcttacaagggatgtgaaggacttcttcaaagagaactacaaaccactgctcaatgaaataaaagaggataaaaacaaatggaagaacattccatgctcatgggtaggaagaatcaatattgtgaaaatggccatacctcccaaggtaatttatagattcaatgccatccccatcaagctaccaatgactttctttggcatgatctttctatcccagaaatatggccatgtcactctgctgtttagactccttcagtggctcctcaacgttgccaggaacaacaacaaagtattttacaagatctataaagttggtcataaactgtcttctgcttatgtcctgtgtcttacctgttcacacttttctgtaagcttcctttagtccacctatgcttgctttcttcctggtctttacattcttttctctggcta

SEQ ID NO: 8629 - DNA, 1299 bp, Homo sapiens
  SIMILAR (439)..(1254): 881254mologous to Homo sapiens putative p150,accession number U93574,Smith-Waterman Score=1200.
atgaagcttccagaggaaggatcaggcagcattatttgctgttctgcaatatttgctgttctgcagcttccactggtgatacacaggcaaacagggtatggagaggacctccagcaaactccaacagaccttcagctgagggacctgactgatcacagctcctcgccagcaatggaacaaagctggatggagaatgactttgatgagctgaacagaagtaggcttcagaaggcaaataaactagaaaatctagaagaaacggataaattcctcgacacatacaccctcccaagactaaaccaggaagaaactgaatctctgaatagaccaataacaggctctgaaattgaggcaataattaataacgtaccaaccaaaaaaagtccaggaccagatggagtcacagccaaattctaccagaggtacaaggaggagctgagaaccgtcaacaaaaaccacatgattatctcaatagatgcagaaaaggccttcgacaacattcaacagcccttcatgctaaaaactctcaataaactaggtattgatgcaacatatctcaaaataataagagctatcgatgacaaacccacagccaatatcatactgaatgggcaaaaactggaagcattccctttgaaaactggcacaagacagggatgccctctctcaccactcctattcaacatagtgttggaagttctggccagggcaatcaggcaagagaaagaaataaagggtattcaattaggaaaagaggaagtcaaattgtccctgtttgcagatgacatgattgtatatctagaaaaccccattgtctcagcccaaaatctccttaagctgataaacaacttcagcaaagtctcaggatacaaaatcaatgtgcaaaaatcacaagaattcctatacaacaataacagacaaacagagaaccaaatcatgagtgaactcccattcacaattgcttcaaagagaataaaatacctaggaatccaacttacaagggatgtgaaggacctcttcaaggagaactacaacccactgctcaatgaaataaaaaaggacacaaacaaatggaagaacattccatgctcatggataggaagaatcaatatcatgaaaatggccatactgctcaaggtaatttatagattcaatgccatccccatcaaactactaatgattttcttcacagaattggaaaaaaactactttaaagtgtatatagaaccaaaaaagagcccatattgcaaagccaatcctaagccaaaagaacaaagctggaagcatcactctacgtga

SEQ ID NO: 8630 - DNA, 2187 bp, Homo sapiens
  SIMILAR (388)..(1086): 871254mologous to Homo sapiens putative p150,accession number U93563,Smith-Waterman Score=1037.
atgggagactttaacaccccactgtcaacattagacagatcaaggaaacagaaagttaacaaggatatccaggaattgaactcagcactgcaccaagcagacctaaaagacatctacagaactcttcatcccaaatcaacagaatatacattcttttcagcaccacaccacacttattccaaaattgaccacatagttggaagtaaagcactcttcagcaaatgtaaaagaacggaaattataacaaactgtctctcagaccacagtgcaatcaaactagaactcaggattaagaaactcactcaaaaccgctcaactacatggaaactgaacaacctgctcctaaatgactactgggtacataacgaaatgaaggcagaaataaagatgttctttgaaaccatgttggaagttctggccagggcaatcaggcaggagaaggaaataaagggctttcaattaggaaaagaggaagtcaaattgtccctgtttgcagatgacatgattgtatatctagaaaaccccatcaactcagcccaaaatctccttaagctgataagcaacttcagcaaagtctcagcatacaaaatcactgtgcaaaaatcacaagcattcttatacaccaataacagacaaacaaagagccaactcatgagtgaactcccattcacaattgcttcaaagagaataaaatacctaggaatccaacttacaaaggatatgaaggacctcttcaaggagaactacaaaccactgctcaatgaaataaaagaggatacaaacaaatggaagaacattccatgctcatgggtaggaagaatcaatatcgtgaaaatggccatactgcccaagttaatttatagattcaatgtcatccccatcaagctaccaatgactttcttcacagaattggaaaaaactactttaaagttcatacggaaccaaaaaagaacccacatttccaagtcaatcctgagccaaaagaacaaagctggaggcatcacgctacctgacttcaaactatattacaaggctacagtaaccaaaacagcatggctaaagttcttgagaagacttgtaagccagggaaagggctaccttcactgttattcaacggtctggaaaaaaccacgagctgatcaccaggatgagtctgctttccagggacagcacatcatcctaaacgtcccagccagcagacccctgcactctcctggttttatctctgaaagaggactgggcagcattggctggagaacttcctggaaggcttcactgatcaatcaattggctgtcgcttatgggttggtagcaacagcagaccggatctccgaggatgcagagtccatacccaaggctgcgccctggggaacaggtgctgtatccacagctgagaaatccatagagcgttcacatcacaggactctgtgcagacaacccccagtaccagcccagagccaggaagacttgctggagcctaatcaaatgaaaaggcaccagaaaacaaaccctggtaatatgacaaaacaaggctctttaatacccccaagaaatcacactagcttaccaacaatgaatccaaatcaagaagaaatccctgatttacctgaaaaaaagttcaggagcaaaattggcctacaagggacatacttgaatgtaatacaagccgtctatgacaaacccacagccaacataatactgaatggggaaaagttgaaagcattccctctgagaactggaacaagacaaggatgcccactctcaccattcctcctcatcgtagtactggaagttctagccagagcaatcagacaagagaaagaaatcaagagcatccaaatcagtaaagaggaaatcaaactgtcactgtttgctgatgatatgatcatttacctcgaaaaccctaaagactcctacagaaagctcctagaaccgataaaagaattcagcaaagtttctagatacaagattaatgtacacgaatcagtagctcttctatacaagaacagcaaccaagcagagaatcaaatcgagaattcaaccccttttactgaaaaaaaaaaacttaagaatatacctaaccaaggaagagaaagacatctacaaggaaaactacaaaacactactgaaagaaatcatagacaacacaaacaaatggaaacacatcccatgctcatggatgggtag

SEQ ID NO: 8631 - DNA, 1698 bp, Homo sapiens; identical to SEQ ID NO: 7070
  SIMILAR (586)..(1677): 921254mologous to Homo sapiens putative p150,accession number U93574,Smith-Waterman Score=1805.

SEQ ID NO: 8632 - DNA, 5076 bp, Homo sapiens; identical to SEQ ID NO: 3974
  SIMILAR (1774)..(4986): 911254mologous to Homo sapiens putative p150,accession number U93563,Smith-Waterman Score=5076.

SEQ ID NO: 8633 - DNA, 1410 bp, Homo sapiens; identical to SEQ ID NO: 4326
  SIMILAR (64)..(1398): 761254mologous to Homo sapiens putative p150,accession number U93572,Smith-Waterman Score=1655.

SEQ ID NO: 8634 - DNA, 1443 bp, Homo sapiens
  SIMILAR (385)..(1035): 881254mologous to Homo sapiens putative p150,accession number U93563,Smith-Waterman Score=985.
atgaagcttccagaggaagcatcaggcagcaatatttgctgttatgcaatatttgctgttctgcagcctctgctggtgatacccaaggaaacagtgtctggagtggacctccagcaaactccaacagatctgcagctgagcgacctgactcctggaaggaaaactaacaaacagaaaggaatagcatcaccatcaacaaaaaggacatccacaccaaaaccccatctacaagcaaatgctcagagattttgtcaccaccaggcctgtgttacaagagttcctaaaggaagcactaaacatggaaaggaacaactggtaccagccactgcaaaaacctgccaaattgtaaagaacatcaatgctatgaagaaactgcatcaattaacagaaatacaaattaccatcagagaataccataaacacctctatgcaaataaactaaaaaatctagaagaaatggataaattcctggacacatacaccctcccaagactaaagcaggaagaagttgaatctctgaatagaccaataatgggctctgaaattgaggcaataattaatagcctaccaaccaaaaaaagtccaggaccagatggattcacagccaaattctacgagaggtacaaagaggagttggtatcattccttctgaaactattccaatcaatagaaaaagagggaatcctccctaactcattttatgaggctagcatcatcttgataccaaaacctggcagagacacaacaaaaaaagagaattttagaccaatatccctgaagaacatcgatgcaaaaatcctcaataaaatactggcaaaccgaatccggcagcccatcgaaaagcttatccaccacgatcaagtcggcttcatccctgagatgaaaggctggttcaaaaaatgcaaatcaataaacgtaatccatcacataaaccaaaccaatgacaaaaaccacatgattatctcaatagatgcagaaaaggccttcgacaaaactcaacagcccttcatgctaaaaactctcaataaactagggacaatcaggcaaaagaaagaaataaaaggtattcaattaggaaaagaggaagtcaaattgtctctgtttgcagatgacatgattgtctatttagaaaactccatcgtctcagcccaaaatctccttaagctgataagcaacttcagcaaagtctcaagatacaaaatcaacctgcaaaaatcacaagcattcctatacaccaataacagacacatggagagccaaatcacgagtgaactcccattcacaattgatacaaagagaataaaatacctaggaatccaatttacaagggatgtgaaggacctcttcaaggagaactacaaattactgctcaatgaaataaaagaggacacaaacaaatggaagaacattccatgctcatggatagaagaatcaatatcatga

SEQ ID NO: 8635 - DNA, 1881 bp, Homo sapiens; identical to SEQ ID NO: 7842
  SIMILAR (1)..(1128): 941254mologous to Homo sapiens putative p150,accession number U93564,Smith-Waterman Score=1912.

SEQ ID NO: 8636 - DNA, 1482 bp, Homo sapiens
  SIMILAR (4)..(1479): 891254mologous to Homo sapiens putative p150,accession number U93563,Smith-Waterman Score=2242.
atggagctgaaaaccaaggctcgagaactacgtgaagactcaggagccgatgcgatcaactggaagaaagggatcaacaaaattgatagaccgctagcaagaataataaagaaaaaaagagagaagaatcaaatagatgcaataaaaaatgataaaggggatatcaccaccgatcccacagaaataaaaactatcatcagagaatactacaaacacctctatgcaaataaactagaaaatctagaagaaatggataaattcctcgacacatacactctcccaagactaaaccaggaagaagttgaatctctgaatagaccaataacaggagctgaaattgtggcaataatcaatagcttaccaaccaaaaagagtccaggaccagatggattcacagccgaattttaccagaggtacaaggaggaactggtaccattccttctgaaactattccaatcaatagaaaaagagggaatcctccctaactcattttatgaggccagcatcatcctgataccaaagccgggcagagacaaaaccaaaaaagaggattttagaccaatatccttgaggaacattgatgccaaaatcctcaataaaatactggcaaaccaaatccagcagcacatcaaaaagcttatccaccatgatcaagtaggcttcatccctaggatgcaaggcttgttcaacatatgcaaatcaataaatgtaatccagcatataaacagaaccaaagacaaaaaccacatgattatctcaatagatgcagaaaaggcctttgacaaaattcaacaacacttcatgttaaaaactctcaataaattaggtattgctgggacgtatctcaaaataataagagctatctatgtcaaacccacagccaatatcatactgaatgggcaaaaactggaagcattccctttgaaaattggcacaagacagggatgccctctctcaccactcctattcaacatagtgctggaagatctgtccagggcaatcaggcaggagaaggaaataaagggtattcaattaggaaaagaggaagtcaaattgtccctgtttgcagatgacatgattttatatctagaaaaccccattgtctcagcccaaaacctccttaagctgataagcaacttcagcaaagtctcaggatacaaaatcaatgtacaaaaatcacaagcattcttatacaccaacaacagacaaacagagagccaaatcatgagtgaactcccattcacaattgcttcaaagagaataaaatacctaggaatccaccttacaagggatgtgaagcacctcttcaaggagaactacaaaccactgctcaacgaaataaaagaggatacaaacaaatggaagaacattccatgctcatgggtaggaagaatcaatattgtgaaaatggccatactgcccaaggtaatttacagattcaatgccatccccatcaagctaccaattactttcttcacataa

SEQ ID NO: 8637 - DNA, 2091 bp, Homo sapiens
  SIMILAR (814)..(1500): 821254mologous to Homo sapiens putative p150,accession number U93569,Smith-Waterman Score=934.
atggtgtttctggaaaagattagcgttggaatcagcagactgagtaaacaacatccgcccttcatccgtgtggccctcccactggatgcggacccaactgtgtccagaattggttccttccagtgggttcttggtctcgctgacttcaggaatgaagccgtggaccctcgcgatgttcagatgtgtccggagtttattccttctggtgggttcgtggtcttcctgacttcaggagtaaagccgcagaccttcacagtgagcattacagctcttaaaggtgagcctacccaaatgagaaggaaccagaaaaccaactctggtaatatgacaaaactaggctatttaacaccccaaaaaaatcacactagctcaccagcaatgagtccaaaccaagaacaaatccctgattcacctgaaaaagaattcaggaggaccgaagaggcttcattgactgagggaggaacaataaatcctattatttcttgggccgtagggaatggtagcagcaaaaatctataccacattttggggaaaggaagaaaaatcttctcgtcctcaggaatcaagcaaaaatccattgcttctggggaaagacaaaacttccagaggaacgatcagacagcagcatttgcggttcatgaaaatccgttgttctgcagccaccgctgctggtacccaggcaaacaagagaagtgcttaaaggagctgatggagctgaaagccaaggctcgagaactacgtgaagaatgcagaagcctcaggagccgatgcgatcaactggaagaaagggtatcagtgatggaagatgaaatgaatgaaatgaagcgggaagggaagtttagagaaaaaagaataaaaagaaacgaacaaagcctccaagaaatatgggactatgtgaaaagaccaactctacatctgattgatgtacctgaaacactaaatgcccacaagagaaagcaggaaagatctaaaaccgacaccctaacatcacaattaaaagaactagagaagcaagagcaaacacattcaaaagctagcagaaggcaagaaataactaaaatcagagcagaactgaaggaaatagagacagaaaaaacccttcaaaaaattaatgaatccaggagctggttttttgaaaggatcaacaaaattgatagaccgctagcaagactaataaagaagaaaagagagaagaatcaaatagatgcaataaaaaatgataaaggggatatcaccagcgatcccacagaaatacaaactaccatcagagaatactacaaacacctctacgcaaataaactagaaaatctagaagaaatggataaattcctcgacacatacaccctcccaagactaaaccaggaagaagttgaatctctgaatagaccaataacaggctctgaaattgtggcaataatcaatagcttaccaaccaaaaagagtccaggaccagatggatccacagctgaattctaccagaggtacaaggaggaactgctgataagcaacttcagcaaagtctcaggatacaaaatcaatgtacaaaaatcacaagcattcttatacaccaataacagacaaatggagagccaaatcatgagtgaactcccattcacaattacttcaaagagaataaaatacctgggaatccaacttacaagggacattaaggacctcttcaaggagaactacaaaccactgctcaatgaaataaaagaggatagaaacaaatgcaagaacattccatgctcatgggtaggaagaattaatatcgtgaaaatggccatactgcccaaggtaatttatagatttaatgccattcccatcaagctacgaatgactttcttcacagaactggaaaaaactactttaaagttcatatggaaccaaaaaagagcccgcatcaccaagtcagtcctaagccaaaagaacaaagctggaggcatcacgctacctgacttcaaactatactacaaggctacagtaaccaaaacagcatggtactggtaccaaaacagagatataagatcaatggaacagaacagagccctcagaaataacaccacatatctacaactatctgatctttga

SEQ ID NO: 8638 - DNA, 3543 bp, Homo sapiens; identical to SEQ ID NO: 3976
  SIMILAR (1447)..(3276): 981254mologous to Homo sapiens putative p150,accession number U93574,Smith-Waterman Score=3162.

SEQ ID NO: 8639 - DNA, 2094 bp, Homo sapiens; identical to SEQ ID NO: 6727
  SIMILAR (310)..(1629): 851254mologous to Homo sapiens putative p150,accession number U93563,Smith-Waterman Score=1914.

SEQ ID NO: 8640 - DNA, 2784 bp, Homo sapiens; identical to SEQ ID NO: 6553
  SIMILAR (1267)..(2781): 871254mologous to Homo sapiens putative p150,accession number U93563,Smith-Waterman Score=2247.

SEQ ID NO: 8641 - DNA, 1584 bp, Homo sapiens
  SIMILAR (925)..(1563): 891254mologous to Homo sapiens putative p150,accession number U93572,Smith-Waterman Score=938.
atgtctatatcaggcacagtcagaatgtcagccaagtccaaggggaacccctcctcgtcctgtccagccgagggaccgccggcagcctccaaaaccaaggtgaaggaacagatcaagatcatcgtggaggatttggaattagtcctgggcgacctgaaggacgtggccaaggaacttaaggagcaacattggtggcaccccataagtggtgacacagccacatcaatttgcacagttctggagagtgagaagtccaagatcaaggtaacggcatttgatgtctggctccacctctgggggaagggcacagacaaacaaaaagacagcagtaacttctgcagacttaagtgtccctgtctgacagctttgaagagagcagtggttctcccagcacgcagctggagatgtgagaatgggcagactgcctcctcaagtgggtccctgacccctgaccctcgagcagctaacagggaggcaccccctagcaggggcagactgacacctcacacggccagtgacggggagaatggaaccaagttggaaaacactctgcaggatattatccaggagaacttccccaatctagcaaggcaggccaacattcagattcaggaaatacagagaacgccacaaagatactcctcgagaaaagcaactccaagacacataattgtcagactcaccaaagttgaaatgaaggaaaaaatgttaagagcagccagagagaaagaaatacaaactgccatcagagaatactacaaacacctctatgcaaataaactagaaaatctagaagaaatggataaattcctcgacgcatacaccctcccaagacaaaaccaggaagaagttgaatctctgaatagaccaataacaggacctgaaattgtggcaataatcaatagcttaccaaccaaaaagagtccaggaccagatggattcacagccgaattctaccagaggtacaaggaggaacggcatattaacagaaccaaagatgaaaaccacatgattatctcaatagatgcagaaaaggcctttaacaaaattcaacaacccttcatgctaaaaactctcaataaattaggtattgatgggacgtatttcaaaataataagagctatctatgacaaacccacagccaatatcatactgaatgggcaaaaactggaagcattccctttgaaaactggcacaagacaggaatgccctctctcaccactcctattcaacatagtgttggaagttctggccagggcaattaggcaggagaaggaaataaagggtattcaattaggaaaagaggaagtcaaattgtccctgtttgtagactacatgattgtacatctagaaaaccccatcatctcagcccaaaatctccttaagctgataagcaacttcagcaaagtctcaggatacaaaatcaatgtacaaaaatcacaagcattcttatacaccaacaacagacaaacagagagccaaatcatgagtgaactcccattcacaattgcttcaaagagaataaaatacctaggaatccaacttacaagggatgtgaaggaccctcttcgaggagaacgataa

SEQ ID NO: 8642 - DNA, 1722 bp, Homo sapiens; identical to SEQ ID NO: 7849
  SIMILAR (187)..(1002): 851254mologous to Homo sapiens putative p150,accession number U93569,Smith-Waterman Score=1161.

SEQ ID NO: 8643 - DNA, 1034 bp, Homo sapiens
  SIMILAR (195)..(1031): 931254mologous to Homo sapiens putative p150,accession number U93572,Smith-Waterman Score=1345.
aaaatctagaagaaacggataaattcctggacacatacaccctcccaagactaaaccaggaagaagttgaatctctgaatagaccaataacagactctgaaattgaggcaataattaatagcttaccaaccaagaaaagttcaggaccagatggattcacagctgaattctaccagaggtacaaggaggagctgcctggcagagacacaacaaaaaaagagaattttagaccaatatccctgatgaacatcgatgcaaaagtcctcaataaaatactggcaaaccgaatccagcagcacatcaaaaagcttatccaccatgatcaagtgggcttcatccctgggatgcaaggctggttcaacatacacaaatcaataaacgtaatccagcatataaacagaaccaaggacaaaaaccacatgattatctcagtagatgtagaaaaggcctttgacaaaattcagcagcccttcatgctaaaaactctcaataaattaggtattgatgggacatatctcaaaacaataagagctatttatgacaaacccacagccaatatcatactgaatgggcaaaagctggaagcattttctttgaaaactggcacaagagagggatgccctctctcaccactcctattcaacatagtgttggaagttctggccagggcaatcaggcaggagaaagaaataaagggtattcaattaggaaaagaggaagtcaaattgtccctgtttacagatgacataattgtatatctagaaaaccccatcatctcagcccaaaatctccttaagctggtaagcaacttcagcaaagtctcaggatataaaatcaatgtgcaaaaatcacaagcattcttacacaccaataacagacaaacagagagccaaatcatgagtgaactcccattcacaattgctacaaagagaataaaatatctaggaatccaacttacaagggatgtgaaggacctcttcaaggggagctacaaaccactgctcaacgaagtaaaaaaggacacaaacaaatag

SEQ ID NO: 8644 - DNA, 1068 bp, Homo sapiens
  SIMILAR (208)..(1023): 881254mologous to Homo sapiens putative p150,accession number U93574,Smith-Waterman Score=1200.
gcaaataaactagaaaatctagaagaaacggataaattcctcgacacatacaccctcccaagactaaaccaggaagaaactgaatctctgaatagaccaataacaggctctgaaattgaggcaataattaataacgtaccaaccaaaaaaagtccaggaccagatggagtcacagccaaattctaccagaggtacaaggaggagctgagaaccgtcaacaaaaaccacatgattatctcaatagatgcagaaaaggccttcgacaacattcaacagcccttcatgctaaaaactctcaataaactaggtattgatgcaacatatctcaaaataataagagctatcgatgacaaacccacagccaatatcatactgaatgggcaaaaactggaagcattccctttgaaaactggcacaagacagggatgccctctctcaccactcctattcaacatagtgttggaagttctggccagggcaatcaggcaagagaaagaaataaagggtattcaattaggaaaagaggaagtcaaattgtccctgtttgcagatgacatgattgtatatctagaaaaccccattgtctcagcccaaaatctccttaagctgataaacaacttcagcaaagtctcaggatacaaaatcaatgtgcaaaaatcacaagaattcctatacaacaataacagacaaacagagaaccaaatcatgagtgaactcccattcacaattgcttcaaagagaataaaatacctaggaatccaacttacaagggatgtgaaggacctcttcaaggagaactacaacccactgctcaatgaaataaaaaaggacacaaacaaatggaagaacattccatgctcatggataggaagaatcaatatcatgaaaatggccatactgctcaaggtaatttatagattcaatgccatccccatcaaactactaatgattttcttcacagaattggaaaaaaactactttaaagtgtatatagaaccaaaaaagagcccatattgcaaagccaatcctaagccaaaagaacaaagctggaagcatcactctacgtga

SEQ ID NO: 8645 - DNA, 1055 bp, Homo sapiens; identical to SEQ ID NO: 6244
  SIMILAR (3)..(647): 881254mologous to Homo sapiens putative p150,accession number U93563,Smith-Waterman Score=975.

SEQ ID NO: 8646 - DNA, 2301 bp, Homo sapiens
  SIMILAR (685)..(2286): 921254mologous to Homo sapiens putative p150,accession number U93563,Smith-Waterman Score=2594.
atggggaaaaaacagagcagaaaaactggaaactctaaaaagcagagtgcctctcctcctccaaaggaacgcagttccacaccagcaacggaacaaagctggtcggagaatgactttgacgagttgagagaagaaggcttcagacgatcaaactactccaagctacaggaggaaattcaaaccaaaggcaaagaagttaaacactttgaaaaaaatttagacgaatgtataactagaataaccaatagagagaagtgcttaaaggagctgatggagctgaaagccaaggctcgagaactacgtgaagaatgcagaagcctcaggagccaatgcgatcaagtggaagaaaggactgctagcaagactaataaagaagaaaagagagaagaatcaaatagatgcaataaaaatgataaaggggatatcaccaccgatcccacagaagtacaaactaccatcagagaatactacaaacacctctatgcaaataaactacaaaatctagaagaaatggataaattcctcgacacatacatcctcccaagactaaaccagaaagaaattgactctctgagtagaccaataacaggatctgaaattgtggcaataatcaatagcttaccaaccaaaaagagtccaggaccagatggattcacagccgaattctaccagaggtacaaggaggaactgaaaatcctcaataaaatactggcaaaccaaatccaacagcacatcaaaaagcttatccaccatgatcaagtgggcttcatccctgggatgcaaggctggttcaatatatgcaaatcaagaaatgtaatccatcatataaacagaaccaaagacaaaaaccacatgattatgtcaatagatgcagaaaaggcctttgacaaaattcaacaacccttcatgctaaaaactctcaataaattaggtattgatgagacgtatctcaaaataataagagctatctatgacaaacccacagccaatatcatactgaatgggcaaaaactggaagcattccctttgaaaactggcacaagacagggatgccctctgtcaccactcctattcaacgtagtgttggaagttctggccagggcaatcaggcaggagaaggaaataaagggtattcaattaggaaaagaggaagtcaaattgtccctgtttgcagaagacatgattgtatatctagaaaaccccatcgtctcagcccaaaatctccttaagctgataagcaacttcagcaaagtgtcaggatacaaaatcaatatacaaaaatcacaagcattcttatacaccaataacagacaaacagagagccaaatgatgagtgaactcccattcacaattgcttcaaacagaataaaatacctaggaatccaccttacaagggacatgaaggacctcttcaaggagaactacaaaccactgctcaatgaattaaaagagaatacaaacaaatggaagaacattccatgctcatgggtaggaagaatcaatatcatgaaaacggccatactgcccaaggcaatttacagattcagtgccatccccatcaaactaccaatgactttcttcaaagaattggaaaaaactactttaaagttcatatggaaccaaaaaagagcctgcatcgccaagtcaatcctaagccaaaagaacaaagctggaggcatcacgctacctgacttcaaactatactacaaggctacagtatccaaaacagcatggtactggtaccaaaacagagatatagatcaatggaacagaacagagccctcagaaataacgccgcatatctacaactatctgatctttgacaaacctgtgaaaaacaagcaatggggaaaagattccctgtttaataaatggtgctgggaaaaccggctagccatatgtagaaagctgaaactggattccttccttacaccttatacaaaaattaattcaagatggattaaagacttaaacgttagacctaaaaccataaaaaccctagaagaaaacctaggcattaccattcaggacataggcatgggcaaggacttcatgtctaaaacaccaaaagcaatggcaacaaaagccaaaattgacaaatgggatctaattaaactaaagagcttctgcacagcaaaagaaactaccatcagagtgaacaggcaacctacaaaatgggagaaaattttcacaacctactcatctgacaaagggctaataatatccagaatctacaatgaactcaaacaaatttacaagaaaaaaaaaacaaccccatcaaaaagtgggcgaagaacatga

SEQ ID NO: 8647 - DNA, 3192 bp, Homo sapiens; identical to SEQ ID NO: 3969
  SIMILAR (1087)..(2478): 961254mologous to Homo sapiens unknown,accession number AF148856,Smith-Waterman Score=2341.

SEQ ID NO: 8648 - DNA, 1139 bp, Homo sapiens
  SIMILAR (486)..(1136): 951254mologous to Homo sapiens putative p150,accession number U93563,Smith-Waterman Score=1045.
tgcacccaagcacacagcttatggtctccaaaaaggaactagggctggctggagaaaaggctgaatccaatcatagggctagaaggtataagcctccgctgctgatacccaggcaaacagggtctggagtggacctccagcaaactccaacagacctgcagctgagggtcctgactgttagaaggaaaactaacaaacagaaaggacatccacaccaaaaccccatctgtacgtcaccatcatcaaagaccaaagaaatacaaactaccatcagagaatactatcaacacctctacacaaataaactagaaaatctagaagaaatggataaattctttgacacatacaccctcccaagactaaaccaggaagaagttgaatctctgaatagaccaataacaggctctgaaattgaggcaataattaataacttaccaaccaaaaaagtccaggaccagatggattcacagccaaattctaccagagtgttggaagttctggccagggcaatcaggcaggagaaggaaataaagggcattcaattaggaaaagaggaagtcaaattgtccctgtttgcagatgacatgattgtatatctagaaaaccccatcgtctcagcccaaaatctccttaagctgacagccaacttcagcaaagtctcaggatacaaaatcaatgtgcaaaaatcacaagcattcttatacaccaataacagacaaacagagagccaaatcatgagtgaactcccattcacaatggcttcaaacagaataaaatacctaggaatccagcttacaagggatgtgaaagacctcttcaaggagaactataaaccactgctcaatgaaataaaagaggatacaaacaaatggaagaacattccatgctcatgggtaggaagaatcaatatcatgaaaatggccatactgcccaaggtaatttatagattcaatgccatccccatcaggctaccaagaactttcttcatagaattggaaaaaactactttaaagttcatatggaaccaaaaaagggcccacattgccaagtcaatcctaagccaaaagaacaaagctggaggcatcacactacctgacttcaaactatactacaaggctacagtaaccaaaacagcatag

SEQ ID NO: 8649 - DNA, 2202 bp, Homo sapiens
  SIMILAR (649)..(2199): 811254mologous to Homo sapiens putative p150,accession number U93563,Smith-Waterman Score=2112.
atggagctgaaagccaaggctcgagaactacgtgaagaatgcagaagcccctggagcagatgcgatcaactagaagaaggggtatcagtgatggaagatgaaatgaatgaaatgaagcaagaagggaagtttagagaaaaaagaataaaaagaaatgaacaaagcctccaagaaatatgggactatgtgaaaagaccaaatctacgtcagattggtgtacctgaaagtgatggggagaatggaaccaagttggaaaacactctgaaggatattatccaggagaacttccccaatctagcaaggcaggccaacattcagattcaggaaatacagagaacgccacaaagatactccttgagaagagcaactccaagacacaaaattgtcagattcaccaaagttgaaatgaaggaaaaaatgttaagggcagccagagagaaagcaccacaccactcctattccaaaattgaccacatcgttggaagtaaagctctcctcagcaaatggaaaagatcagaaattataacaaactgtctctcagaccacagtgaaatcgaactagaactcaggattaagaaactcactcaaaaccgctcaactacatggaaattgaacaacctgctcctgaatgactactgggtacataacgaaatgaaggcagaaataaagatgttctttgaaaccaacgagaacaaagacacaacacaacagaatctctgggacacattcaaagcagtgtgtaaaggaaaatttgcagcactaagtgcccacaagagaaagcaggaaagatcaaaaattgacaccctaacattacaattaaaagaactagaaaagaaagagcaaacatattcaaaagaaatacaaactacaatcagagaatactacaaacacctctgtgtaagtaaactagaacatctagaagaaatggataaattccttgacacatacaccctcccaagactaaaccaggaagaagttgactctctgaatagaccaataacaggctctgaaattgtggcaatgatcaatagcttaccaaccaaaaagagttcaggaccagatggattcacagccaaattctaccagaggtacaaggaggaactggtaccattccttctgaaactattccaaacaattgaaaaagagggaatcctccctaactcgttttatgaggccagcatcatcctgataccaaagccgggcagagacacaagcaaaaaagataattttaggccaatatccttgatgaacactgatgcaaaaatcctcaataaaatattggcaaaccaaatccagcagcacgtcaaaaaccttatccaccatgatcaagtgggcttgatccctggaatgcaaggctggttcaacatacgcaaatcaataaatgtaatccagcatataaacagaaccaaagacaaaaaccacatgattatctcaatagatgaagaaaaggcctttaacaaaattcaacaacacttcatgctaaaaactctcaataaattaggtattgatgggacgtatctcaaaataagagctatctatgacaaatccacagccaatatcatactgaatgggcaaaaactggaagcattccctttgaaaactggcacaagacagggatgccctctctcaccactcctattcaacatagtgttggaggttctggccagggcaattaggcaggagaaggaaataaatggtattcaattaggaaaagaggaagtcaaattgtccctgtttgcagatgacatgatagtatatctagaaaactccatcgtctcagcccaaaatctccttcagctgataagcaacttcagcaaagtctcaggatacaaaatcaatgtacaaatatcacaagcattcttatacaccaataacagacaaacagagagccaaatcatgagtgaactcccattcgccattgcttcaaagagaataaaatacctaggaatccaacttacaagggacgtgaatgacctattcaaggagaagttcaaaccactgctcaatgaaattaaagaggatacaaacaaatggaaaaacattccatgctcatgggcaggaagaatcaatatcgtgaaaatggccatactgcccaaggtaatttatagattcaataccatccccatgaagctaccaataactttcttcacagaattggaagaaactactttaaagttcaaatggaaccaaaaaagggcctga

SEQ ID NO: 8650 - DNA, 2241 bp, Homo sapiens
  SIMILAR (946)..(2238): 921254mologous to Homo sapiens putative p150,accession number U93563,Smith-Waterman Score=2079.
atgtctgtcttgttcactgtatcacctgtgcccagctcagtgcctggtgggcattcgacaactctgttgactggttcactgacaggctgtgaggggctttggcaactaggattcacaatgggctttggacgcttgccaggtgaggacagcattcccagaaaaaactgcgagtgtgggaaccagacctcaggaaggcaagggagggaacatgtgggccaaggaggcctggactgggggccagcctacggcagtggcaaggatgtaaacaaggcgactgcacaggcaggcagtaagattagcccagctggcagtggccagtggaaaaaggggtggctgttcagtgatggcaaacatgccatgcgggaaggtggtaatcagaagaggggtttggaaactcaagagcacataagtgaacaaaacatcaagcttgctcttaaaagtttttcaatcttacgcatgttgctggaaggaacgtctgctttctccatgggctgggtgatcacagaggggttgctggagctgatgagcactggggtgctgatctctaccatatggcgccctgaaggagaatggaccatccggttgagagtgttcaaggctgttgtgatggaaaactgcccaggcaccttcctcctggaccctgggcccctacggagggtagacgtgttgcctctggaggacgaggacaccagggacaggttttttgtgcgggatgactggcgacctttgttcttctctaaaaggtgtcttgcgttgccctctaaaaccgtatctcattctaatttagaaatccaaccaagactaaaccaggaagaagttgaatccctgaatagaccaataacaggctctgaaattgaggcaataattaatagcctaccaaccaagaaaagtccaggaccagacagattcacagccgaattctaccagaggtacaaggaggagctgcatataaacagaaccagcgacaaaaaccatatgattatctcaatagatgcagaaaaggcctttgataaaattcaacagcccttcatgctaaaaactctcaataaattaggtattgatgggacgtatctcaaaataataagagctatttatgacaaacccacagccaatatcatactgaatgggcaaaaactggaagcattgcctttaaaaactagcacaagacagggatgccctctgtcaccactcctatttaacatagtgttggaagttctggccagggcaatcaggcaggagaaagaaataaagggtattcaattaggaaaagaggaagtcaaattgtccctctttgcagatgacatgattgtatatttagaaaaccccatcgtcttagcccaaaatctccttaagctgataagcaacttcagcaaagtctcaggatacaaaatcaatgtgcaaaaatcacaagcattcttaaacaccaataacagacaaacagagagccaaatcatgagcgaactcccattcacaattgcttcaaagagaataaaatacctaggaatccaacttacaagggatgtgagggacttcttcaaggagaactacaaaccgctgctcaacaaaataaaagaggacacaaataaatggaagaacattccatgctcatggataggaagaatcaatattgtgaaaacggccatactgcccaaggtaatttatagattcattgctatccccatcaagctaccaatgactttcttcacagaatttttaaaaactactgtaaagttcatatggaaccaaaaaagagcccacactgccgagtcaatcctaagccaaaagaacaaagctggaggcatcacgctacctgacttcaaactatactaccaggctacagtaaccaaaacagcatggtactggtacctaaacagagatatagaccaatggaacagaacagaggcctcagaagtaacaccacacatctacaaccatctgatctttgacaaacgcgacaaaaataagaaatggggaaacgattccctatttaataaatggtgctgggaaaactggctagccatatgtagaaagctgaaactggatcccttccttacaccttatacaaaaatcaattcaagatggattagagacttaaatgttagacctaaaaccataaaaaccctagaagaaaacctaggcaataccattcaggacatcggcatgggcaaggacttcatgtctataacaccaaaagcaatggcaacaaaagccaaaattgacaaatgggatctaattaaatga

SEQ ID NO: 8651 - DNA, 1889 bp, Homo sapiens
  SIMILAR (513)..(1733): 961254mologous to Homo sapiens putative p150,accession number U93563,Smith-Waterman Score=2012.
acagatcaatgagacaaaaagtcaacaaggatacccaggaattgaactcagctctgcaccaagcggacctaatagacatctacagaactctccaccccaaatcaacagaatatacatttttttcagcaccacaccacacctataccaaaattgaccacatacttggaagtaaagctctcctccgcaaatgtaaaagaacagagattataacaaactatctctcagaccacagtgcaatcaaactagaactcaggattaagaatctcactcaaaaccgctcaactacatggaaactgaacaacctgcttctgaatgactactgggtacataacaaaatgaaggcagaaataaagatgttctttgaaaccaacgagaacaaagacacaacataccagaatctctgggacgcattcaaagcaaaatacaaactaccatcaaggaatactacaaacacctctatgcaaataaactcgaaaatctggaagaaatggataaattcctggacacataacactctcccaagactaaaccaggaagaagttgaatctctgaatagaccaataacaggagctgaaattgtggcaataatcaatagtttaccaaccaaaaagagtccaggaccagatggattcacagccgaattctaccagaggtacaaggaggaactggtaccattccttctgaaactattccaatcaatagaaaaacagggaatcctccctaactcattttatgaggccagcaccattctgataccaaagccgggcagagacacaaccgaaaaagagaattttagaccaatatccttgatgaacattgatgcaaaaatcctcaataaaatactggcaaaacgaatccagcagcacatcaaaaagcttatccaccatgatcaagtgggcttcatccctgggatgcaaggctggttcaatatacacaaatcaataaatgtaatccagcatataaacagagccaaagacaaaaaccacatgattatctcaatagatgcagaaaaagcctttgacaaaattcaacaacgcttcatgctaaaaactctcaataaattaggtattgatgggacgtatttcaaaataataagagctatctatgacaaacccacagccaatatcatactgaatgggcaaaaactggaagcaatccctttgaaagctggcacaagacagggatgtcctctctcaccactcctattcaacatagtgttggaagttctggccagggtaattaggcaggagaaggaaataaagggtattcaattaggaaaagaggaagtcaaattgtccctgtttgcagatgacatgattgtatatctagaaaaccccattgtcacagcccaaaatctccttaagctgataagcaacttcagcaaagtctcaggatacaaaatcaatgtacaaaaatcacaagcattcttatacaccaacaacagacaaacagagagccaaatcatgagtgaactcccattcacaattgcttcaaagagaataaaatacctaggaatccaacttacaagggatgtgaaggacctcttcaaggagaactacaaaccactgctcaaggaaataaaagaggatacaaacaaatggaagaacattccatgctcatgggtaggaagaatcaatatcatgaaaatggccatactgcccaaggtaatttacagattcaatgccatccccatcaagctaccaatgactttcttcacagaattggaaaaaactaaagttcatatggaaccaaaaaagtgcccacatcaccaagggaatcctaagccaaaagaacaaagctggaggcatcacactacctgacttcaaactatactacaaggctacagtaaccaaaacagcatggtactggtaccaaaacagagatataga

SEQ ID NO: 8652 - DNA, 1779 bp, Homo sapiens
  SIMILAR (916)..(1692): 941254mologous to Homo sapiens unknown,accession number AF149422,Smith-Waterman Score=1247.
atgggagactttaacaccccactgtcaacattagacagatcaacgagacagaaagtcaacaaggatacccaggaattgaactcagctctgcaccaagcggacctaatagacatctacagaactctccaccccaaatcaacagaatatacattcttttcagcaccacaccacacttactccaatattgaccacatagttggaagtaaagcactcttcagcaaatgtaaaagaacagaaattataacaaactgtctctcagaccacagtgcaatcaaactagaactcaggattaagaaactcactcaaaaccactcaactacatggcaactgaacaacctgctcctgaatgactactgggtaaataatgaaatgaaggcagaaataaagatgttctttgaaaccaatgagaacaaagacacaacagaccagaatctctgggacacattcaaagcagtgtgtagagggaaatttatggcactaaatgcccacaagagaaagcaggaaagatctaaaatgggcaccctaacatcacaattaaaagaactagaaaagcaagagcaaacacattcaaaagctagcagaaggcaagaaataactaagatcagagcagaactgaaggaaatagagacacaaaaacccttcaaaaaattaatgaatccaggagctgaaatacaaactaccatcagagaataccacaaacacctctatgcaaataaactagaaaatctagaagaaatggataaattcctcgacacatacatcctcccaagactaaaccaggaagaagttgaatctctgaatagaccagtaacaggctctgaaattgaggcaataatcaatagcttaccaaccaaaaagagtccagggccatatggattcacagccgaattctaccagaggtacaaagaggaactgcatataaacagaaccaaagacaaaaaccacatgattatctcaatagatgcagaaaaggcctttgacaaaattcaacaacccttcatgctaaaaactctcaataaattaggtattgatgggacgtatctcaaaatattaagagctatctatgacaaacccacagccaatatcatactgaatgggcaaaaactggaagctttccatttgaaaactggcacaagacagggatgccctctctcaccactcctattcaacatagtgttggaagttctggccagggcaatcaggcaggagaaggaaataaagggtattcaattaggaaaagaggaagtcaaatggtccctgtttgcagatgacatgattgtatatctagaaaaccccatcgtctcaacccaaaatctctttaagctcataagcaacttcagcaaagtctcaggatacaaaatcaatgtacaaaaatcacaggcattcctatacaccaataacagacaaacagagagccaaatcatgagtgaactcccattcacaattgcttcaaagagaataaaatacctaggaatccaacttacaagggatgtgaaggacctcttcaaggagaactacaaaccactgctcaatgaaataaaagaggatacaaacaaatggaagaacattccatgctcacgggcaggaagaatcaatatcgtgaaaatggccatactgcccaaggtaatttacagattcagtgccatccccatcaagctaccaatgactttcttcacagaattggaaaaaactaaagttcatatggaaccaaaaaagagcccacattgccaagtcaatcctaagccaaaagcacaaagctggaggcatcacactacctga

SEQ ID NO: 8653 - DNA, 2093 bp, Homo sapiens; identical to SEQ ID NO: 5628
  SIMILAR (691)..(2091): 821254mologous to Homo sapiens putative p150,accession number U93563,Smith-Waterman Score=2020.

SEQ ID NO: 8654 - DNA, 1983 bp, Homo sapiens
  SIMILAR (950)..(1021): 871254mologous to Homo sapiens putative p150,accession number U93572,Smith-Waterman Score=106.
ccccactgtcaacattagacagatcatcgagacagaaagttaacaaggatatccaggacgttatctcagctctgcatgaagcaggcctaatagacatctacagaactctccaccccaaatcaacagaatatacattcttctcagcaccacatcacacttattacaaaattgaccacatagttggaagtaaagcactccttagcaaatgtaaaagaacagaaatcacaacaaactgtctctcagacgacagagcaatcaaattagaactcaggattaagaaactcactcaaaactacacaactacatggaaactgaacaacctgctcctaagtgactactgggtaaacaacgaaatgaaggcagaaataaagatgttctttgaaaccaatgagaacaaagacacaatgtaccagaatctctgggacacattcaaagcagtgtgtagagggaaatttatagcagtaaatgcctacaagagaaagcaggaaagatctaaaatccacaccctaacatcacaactaaaagaaccagagaagcaagagcaaacacattcaaaagctagcagaaggcaagaaataactaagattagagcagaactgaaggagatagacacacaaaaaacccttcaaaaaatcagtgtatccaggagctggttttctgaaaggatcaacaaaattgatagactgatagcaagactaatgaagaagaaaagagagaagaatcaaatagatgcaataaaaaatgataaaggggatatcactattgatcccacagaaatgcaaactaccatcagagaatactataaaaacctctacgcaaataaacttgaaaatctagaagaaatggataaattcttggacacatatatcctcccaagactaaaccaggaagaagttgaattgccaaatagaccaataacaggctctgaaaatgaggcaataattaatagcctaccaacaaaaaaagtccaggaccagatgagttcacagccaaattctaccagaggtacaaagaggagctgcagggcaatcaggcaagagaaagaaagagaggacactcaattaggaaaagaggaagtcaaattgttactgtttgcagaagacatgattgtgtatttagaaaaccccatcgtctcagcccaaaatctccttaagctgataaacaacttcagcaaagtctcaggatacaaaatcaatgtgcaaaaatcacaagcattcttacacaccaataacagacaaacagagagccaaatcatgagtgaatgcccactaacaattgcttcaaagagaataaaatacctaggaatccaacttacaagggatgtgaaggacctcttcaaggagaactacaaaccactgcttaacaaaataaaagaggacacaaaacaaatggaagaacattccacgctcatgtttaggaagaaacaatattgtgaaaatgaccatactgcccaaggtaatttatagattcatactttaaacttcatatggaaccaagaaagagcccgcattgccaagacaatcctaagcaaaaagaacaaagctggaggtatcacgctacctgacttcaaactatactacaaggctacagtaaccaaaacagcacggtactggaaacaaaacattaagaaaggaagcgtgtggcccatctccttgaaatctgagaagaggggtcatagaactagaccgctgtggaagttatgccataatgacgtccaaggagagctcctaaagacaatacaatttttgtttggctctcccttaggacactcatccttggatcccagtgccctggtgtgtaagtaagcccaggaagcccacagccagaaccaacttgccagcagtgtgagagccattttaggagtggatcttccagccccagtgacactccagctgataacccatgagcgagtaagtcttctacacctgaataaactagttcagagtcacacggccagtaagaaatagggtcaagatctgagct

SEQ ID NO: 8655 - DNA, 1743 bp, Homo sapiens
  SIMILAR (1136)..(1219): 851254mologous to Homo sapiens putative p150,accession number U93572,Smith-Waterman Score=138.
atggtttttgaaaagatcaacaaaattgatagacggctagcaagactaatacagaagaaaagagagaagaatcaaatagatgcaataaaaaatgataaaggggatatcaccaccaatcccacagaaatacaaactaccatcagagaatactataaacacctctatgcccataaactagaaaatctagaagaaatggataaattcctggacacatatactctcccaagactaaaccaggaagaacttgaatccccgaatagaccaataacagactctgaaattgaggcaatacttgagagcctaccaaccaaaaaaggtccaggaccagatggattcacagtcaaattctaccagaggtacaaagaggagttggtaccattctgtctgaaactattccgatcaatagaaaaagagggactcctccctaactcattttatgaggccagcatcatcctgataccaaagctgggcagagacacaacaaaaaaagagaattttagaccaatatccctgatgaacattgatgcaaaaatcctcaataaaatactggcaaagagaatccagcagcacatcaaaaagcttatccaccacgatcaagtcggcttcatccctgggatgcaaggctggttcaacataggcaaatcaataaaagtaatccgtcatagaaacacaaccaagtacaaaaaccacatgattatctcaacagatgcagaaaaggcctttgacaaaattcaacagcacttcatgctgaaaactctcaataacctagtgttggaagttctggccagggcaatcagacaggagaaagaaataaagggtattcaattaggaaaagaggaagccaaattgtccctgtttgcagatgacatgattgtatatttagaaaactccattgtctcagcccaaaatctccttaagctgataagcaacttcagcaaagtctcaggatacaaaatcaatgtgcaaaaattacaagcattctcatacaccaataacagacaaacagagagccaaatcatgagtgaactcccattcgcaattgcttcaaagagaataaaatacctaggaatccaacttacaagggatgtgaaggacttcttcaaggcgaactacaaaccactgctcaatgaaataaaaaaaggacacaaacaaatggaagaacaatccatgctcgtggataggaagaataaatattgtgaaaacggccatactgcccaagaattggaaaaaactaatttaaagttcatatggaaccaaaaaagagaccgtattgccaagacaatcctaagccaaaagaacaaagctggaggcatcacactacccgacttcaaactatactacaaggctacagtaaccaaaacagcatggtactggtaccaaaacagacatatagaccaatggaacagaacagagccctcagaaacaataccacacatctacaaccatctgaattttgacaaacctgacaaaaacaagaaatggggaaaggattccctatttaataaatggtgctgggaaaactggctagccatatgtagaaagctgaaactggatcccttccttacaccttatacaaaaattaattcaaggtggattaaacacttaaatgttagacctaaaaccataaaaatcctagaagaaaacctaggcaataccattcaggacataggcatgggcaaggacttcatgactaaaacaccaaaagcaatagcaacaaaaccaaaattgacaaatgggatctaa

SEQ ID NO: 8656 - DNA, 1260 bp, Homo sapiens
  SIMILAR (1)..(1164): 821254mologous to Homo sapiens putative p150,accession number U93563,Smith-Waterman Score=1632.
atggataaattcctcgacacatacaccctcccaagactaaaccaggaagaagttgaatctctgaatagaccaataacaggctctgaaattgaggcaataattaatagcttaccaaccaaaaaaagtccaggaccagatggattcacagccgaattctaccagaggtacaagaaggagctggtaccattccttctgaaattattccaatcaacagaaaaagagggaatcctccctaactcattttatgaggccaacatcatgctgataccaaagcctggcagagatacaacaaaaaaagagaattttagaccaatatccctgataaacatcgatgcaaaaatccttagtaaaatactggcaaaccaaatccagcagcacatcaaaaagcttatccaccatgatcaagtgggcttcatccctgggatgcaaggctggttcaacatacgcaaatcaataaatgtaatccagcatataaacagaaccaatgacaaaaaccatacgattatctcaatagatgcagaaaaggcttttgacaaaattcaacaacccatcgtgctaaaaactttcaataaattaggtattgatgggacccaatatcatactgaatgggcaaaaactggaagcattccctttgaaaaccggcacaagacagggatgccctctctcaccactcctattcaacatagtgttgaagttctggccagggcaatcaggcaggagaagggaataaagggtattcaattaggaaaagaggaagtcaaattgtccctgtttgcagatgacaagattgtatatctagaaaaccccatcgtctcagcccaaaatctccttaagctgataggcaacttcagcaaagtctcaggatacaaaatcaatgtacaaaaatcacaagcattcttatacaccaataacagacaaacagaaagccaaatcatgagtgaactcccattcacaattgcttcaaagagaataaaatatttaggaatccaacttacaagggatgtgaaggacctcttcaaggagaactacaaaccactgctcaatgaaataaaagaggatacaaagaaatggaagaacattccatgctcatgggtaggaaaaatcaatatcatgaaaatggccatactgcccaagaaacttctcacactgaaagctctagaactaaatcccagtggtgttgatactcccaaaatgctcaggaagagtctttcttttgagcagcaatgcactgaagtttcccagttgaccctccacatctga

SEQ ID NO: 8657 - DNA, 1842 bp, Homo sapiens; identical to SEQ ID NO: 555
  SIMILAR (1730)..(1837): 881254mologous to Homo sapiens putative p150,accession number U93572,Smith-Waterman Score=164.

SEQ ID NO: 8658 - DNA, 1593 bp, Homo sapiens; identical to SEQ ID NO: 7846
  SIMILAR (1533)..(1592): 761254mologous to Homo sapiens putative p150,accession number U93574,Smith-Waterman Score=93.

SEQ ID NO: 8659 - DNA, 1578 bp, Homo sapiens
  SIMILAR (911)..(940): 1001254mologous to Mus musculus reverse transcriptase,accession number U15647,Smith-Waterman Score=49.
atgggagactttaacaccacactgtcaacattagagagatcagcgagacagaaagttaacaaggatatccaggaattgaactcaggtctgcaccaagcagacttaatagacatctacaaaactgtcaaacccaaatcaacagaatatacattcttctcaggaccacaccgcacttattccaaaattgaccacatagttggaagtaaagcactcctcagcaaacgtaaaagaacagaaattataacaaactgtctctcagaccacagtgcaatcaaactagaactcaggattaagaaactcactcaaaaccgctcaactacatggaaactgaacaacctgttcctgaatgactactgggtacataacaaaatgaaggcagaaataaaaatgttctttgaaaccaacgagaacaaagacacaacataccagactctctgggacacatttaaagcagtgtgtagagggaaatttatagcgctaaatgcccacaagagaaagcaggaaagatccaaaattgacaccctaacatcacaattaaaagaactagagaagcaagagcaaacacattcaaaagttagcagaaggcaagaaataactaagatcagagcagaactgaaggagatagagacacaaaaaacccttcaaaaaatcaatgaatccaaaatacaaactaccatcagagaatactataaacacctctatgcaaataaactagaaaatttagaagaaatggataaattccttgacacatacaccctcccaagactaaatcaggaagaagtagaatctcttaatagaccaataacaggctctgaaattgaggcaataattaacagcttaccaaccaaaaaaagtccaggaccagatggattcacagccgaattctaccagaggtataaggaggagctgaccaatatccttgatgaacatcgatgcaaaatcctcaataaaatactggcaaatggaatccagcacgacatcaaaaagcttatccacgatgatcaagtgggcttcatccctgggatgcaaggctggttcaacatacgcaaatcaataaacgtaatccagcatgtaaatagaaccagagacaaaaaccacatgattatctcaatagatgcagaaaaggcctttgacaaaattcaacagcccttcatgctaaaaactctcaataaattaggtattgatgggatgtatctcaaaataataagagctatgtatgacaaacccacagccaatatcatactgaatgggcaaagactggaagcattccctttgaaaactggcacaagacagggatgccctctctcaccactcctattcaacatagtgttggaagttctggccagggcaatcgggcaagagaaagaaataaagggtattcaattaggaaaagaggaagtcaaattgtccctgtctgcagatgacatgattgtatatctagaaaaacccatcatctcagcccaaaatctctttaagctgataagcaacttcagcaaagtctcagatacaaaatcaatgtacaaaaatcacaagcattcttatacaccaataacagacaaacagagagccaaatcatga

SEQ ID NO: 8660 - DNA, 2982 bp, Homo sapiens
  SIMILAR (2810)..(2980): 801254mologous to Homo sapiens putative p150,accession number U93563,Smith-Waterman Score=245.
atgggcaattacaacctctacccaataattaccatcctaagccatgaagtggagcaggccatgtccctgtgtgttcatccaaagacaatagtgtcccaagatgaggtggaaagtgagaaatggtacctgtctacagacttcccttcaacatccatcaagacagagccaattacagacgaaccacccccaggactcgttccgtctgtcactctgaccatcacagccatctccaccccgttggaaaaggaggaacctcctctggaaatgaacactggggttgattcctcgtgccagaccattattcctaaaattaagctggagcctcatgaagtggatcagtttctaaacttctctcctaaagaagccccagtggaccacctgcatttgccgcccacccctccgagcagtcacggcagtgactcagagggcagcctgagtcccaacccacgcctgcaccccttcagcctgcctcagacccacagcccctccagagctgcaccccgggccccctccgccctctccagctcccctctcctcacggctcctcataaactgcagggatcaggccctctggtcctgacagaggaggagaagaggaccctgatcgctgagggctatcccatccccaccaaattgcccctgtcaaaatcagaggagaaggccctgaagaaaattcggaggaagatcaagaataagatttctgctcaggaaagtaggagaaagaagaaagaatacatggacagcctggagaaaaaagtggagtcttgttcaactgagaacttggagcttcggaagaaggtagaggttctagagaacactaataggactctccttcagcaactccagaagcttcagactttggtgatgggcaaggtttctcgaacctgcaagttagctggcacgcagactggcacctgcctcatggttgtggtgctgtgctttgccgttgcattcggcagcttctttcaaggctacgggccctatccttctgccaccaagatggctctgcccagccagcattccctgcaggagccctacacagcctccgtggaaaatctagaagaaatggataaattcttggacaaatccacccttccaagactaaaccaggaagaagatgaatctctgaatagacaagtaacaggctctgaaattgaggcaataattaatagcctaccaaccaaaaagagtccaggaccagatggattcacagacaaattctgccagaggtacaaagaggagctggtaccattccttctgaaactattccaatcaacagaaaaagagggaatcctccttaactcattttatgaggccggcatcatcttgataccaaagcctggcagagacacaacaaaaaaagagaattttagaccaatatccctgatgagcatcaatgcaaaaatcctcaataaaatactggcaaaccgaatcctgcagcacatcaaaaagcttatccatcacgatcaagtcggcttcatccttgggatgcaaggctggttcaacatatgcaaatcaataaacataatccattgcataaacagaaccaatgacaaaaaccacatgattatctcaatagatgcagaaaaggccttcaacaaaattcaacagcccttcatgctaaaaactctcaataaactggtgttggaagttctggccaaggcaatcaggcaagagaaagaaataaagggtattcaattaggaaaagaggaagtgaaattgtctctgtttgcagatgacatcattgtatatttagaaaaccccatcgtctcagccccaaatctccttaagctgataagcaacttcagaaaagtctcaggatacaaaatcaatgtgcaaaaatcacaagcattcctatacaccaataacagacaaacagagagccaaatcatgagtgaactcccattcacaattgctacaaagagaataaaataccaaggaatccaacttacaagggatgtgaaggacctcttccaggagaattacaaaccagtgctcaacgaaataaaagaggacacaaacaaatggaagaacattccgtgctcatggttaggaagaatgaacatcgtgaaaatggccatactgcccaaggtaatttatagattcaatgccatccccatcaagctatcaatgactttcctcacagaattggaaaaaactactttaaagttcgtatggaaacaaaaaggagcccacattgccaagacaatcctaagcaaaaacaacaaagctggaggcatcatgctacctgacttcaaactatactacaaggctacagtaaccaaaacagcatggtactggtaccaaaacagagagatagaccaatggaacagaacagagccctcagaaataataccacacatctacaaccatctgatctttgacaaacctgacaaaaacaagaaatggggaaaggattccctatttaataaatggtgctgggaacactggctagccatatgtagaaagctgaaactagatcccttccttacaccttatacaaaaattaattcaagatggattaaagacttaaatgttagacctaaaaccataaaaactctagcaggacacctaggcaataccattcgggacataggcttgggcaaggacttcatgactaaaacaccaaaagcaatggcaacaaaagccaaaatagacaaatgggatctaattaaactaaagagcttctgcacagcaaaagaaacggccatcagagtgaataggcaacctacagaatgggagaaaatttttacaatctacccatctgacacagggctaatacccagaatctacaaagaacttaaacaaatttacaagagaaaacaaacagcccatcaagaactgggcaaaggatatgaacagatgtttctcaaaagaagacatttatgcagccaacagacacatgaaaaaatgctcatcatcactggccatcagagaaatgcaaatcaaaaccacaatgagataccagctcacaccagttag

SEQ ID NO: 8661 - DNA, 1155 bp, Homo sapiens
  SIMILAR (1)..(441): 951254mologous to Homo sapiens p40,accession number U93566,Smith-Waterman Score=713.
atggaggtgaaagccaaggctcgagaactacgtgaagaatgcagaagcctcaggagccgatgcgatcaactggaagaaagggtatcagtgatggaagatgaaatgaatgaaatgaagcgagaagggaagtttagagaaaaaataaaaagaaacgagcaaagcctccaagaaatatgggactacgtgaaaagaccaaatctacgtctgattggtgtacctgaaagtgacggggagaatggaaccaagttggaaaacactctgcaggatattatccaggagaacttcccaaatctagcaaggcaggccaatattcagatacaggaaatacagagaacgccacaaagatactcctcaagaagagcaactccaagacacataattgtcagattcactgaagttgaaatgaaggaaaaaatgttaagggcagccagagagaaagggtcggaaatacaaactaccatcagagaatactacaaacatccttacgcaaataaactagaaaatctagaagaaatggataaattcctcgacacatacaccctcctcccaagactaaacgaggaagaggctgaatctctgaatagatcaataagaggctctgaaattgtggcaataatcaatagcttaccaaccaaagagtccaggaccagatggattcacagccgaattctaccagaggcacaaggaggaactgctgataagcaacttcagcaaatctcaggatacaaaattgatgtgcaaaaatcacaagcattcttatacaccaataacagacaaacagagagccaaatcctgagtgaattcccattcacaattgcttcaaagagagtaggatacctaggaatccaacttacaagggacgtgaaggacctcttcaaggagaactgcaaaccactgctcaatgaaataaaaaaggatacaaagaaatggaagaacattccatgctcatgggtaggaagaatcaatatcatgaaaatggccatactgcccaaggtaatttatagattcaatgccatccccatcaagctaccaatgactttcttcacagaattggaaaaaaactactttaaggttcatatggaaccaaaaaagagaccacattgccaagtcaatcctaagccaaaagaacaaagctggaagcatcacgctacctga

SEQ ID NO: 8662 - DNA, 1827 bp, Homo sapiens
  SIMILAR (1207)..(1776): 901254mologous to Homo sapiens putative p150,accession number U93563,Smith-Waterman Score=847.
atggggaaaaaacagagcagaaaaactggaaactttaaaaagcagaggcacctttccttctccaaagggatcgcagttcttcaccagcaatggaacaaagctggacagagattgacttttgacgagttgagagaaggcttcagaccatcaaactattccaagctacagaaggaaattcaaaccaaaggcaaagaagttgaaaactttgaaaaaaattcagatgaatgtataactagaataaccaatacaaagaagtgcttaaaggagctgatggagctgaaagccaaggctcgagaactacgtgaagaatgcagaagcctcaggagccgatgtgatcaactggaagaaagggtatcagggatggaagatgaagcgaatgaaatgaagcgagaagggaagtttggagaaaaaagaataaaaagaaacgaacaaagcctccaagaaatatgggactatgtgaaaagaccaaatctacgtctgattggtgtacctgaaagtgacggagagaatggaaccaagttgaaaaacactctgcaggatattatccaggagaacttccccaatctagcaaggcaggccaacattcagattcaggaaatacagagaacgccacaaagatactcctcgagaagagcaactccaagacacataattgtcagattcaccaaagtcgaaggaaaaaatattaagggcagccagagagaaagggcggaaatacaaaccaccatcagagaatactacaaacacctctactcaaataaactagaaaatctagaagaaatggataaattcctcgacacatacaccctcccaagcctaaaccaagaagaagttgaatctctgaatagaacaataacaggatctgaaattgtggcaataattaatagcttaccaaccaaaaagagtccaggaccagatggatttacagctgaattctaccagaggtacaaggaggaagtggtaccattccttctgaaactattccaatcaatagaaaaagaggttatcctccctaactcattttatgaggccagaatcatcctgataccaaagcctggcagagacacaaccaaaaaagagaattttagaccaatatccttgatgaacattgatgcaaaaatcctcaataaaatactggcaaaccgaatccagcagcacatcaaaaagcttatccaccatgatcaagtgggcttcatccctgggatggcaattaggcaggagaaggaaagaaagggtattcaattaggaaaagaggaagtcaaattgtccctgtttgcagatgacgtgattgtatatctagaaaaccccatcgtctcagcccaaaatctcctcaagctgataagcaacttcagcaaagtctcaggatacaaaatcaatgtgcaaaaatcacaagcattcttatacaccaataacagacaaagagagagccaaataatgagtgagctcccatttacaattgcttcaaaaagaataaaatggctaggaatccaacttacaagggatgtgaaggacctcatcaaggagaactacaaaccactgctcaatgaaataaaagaggatataaacaaatggaagaacattccatgctcatgggtaggaagaatcagtatcgtgaaaatggccatactgcccaaggtaatttatagattcagtgccatccccatcaagctaccaatgactttctttacagaattggaaaaaactacttttaaacttcttatggaaaccaaaaaagagcccgccatcgccaagtcaatcctaagccaaaagaacaaactggaggcatcacgctacctgacttcaagctatactacaaggctacagtaa

SEQ ID NO: 8663 - DNA, 1554 bp, Homo sapiens
  SIMILAR (642)..(716): 361254mologous to Homo sapiens putative p150,accession number U93565,Smith-Waterman Score=40.
atggaaaaattcctcgacacatacaccctcccaagactaaaccaagaagaacttgaatccctgaacagaccaataacaggctctgaaattgaggcaataattaatagcctaccaaccaaaaaaagtccaggaccagacggattcagagccaaattctaccagaggtacaatgaggagctggtaccattccttctgaaaatattccaatcaatagaaaaagagggaatcctccctaactcattttatgaggccagcattatcctgataccaaagcctggcagagacacaaccaaaaaagacaattttagaccaatatccctgatgaacatcgctgtgaaaattctcaataaaatactggcaaaccaaatccagaagcacatcaaaaagtttatccaccatgatcaagttggcttcatcccagggatgcaaggctggttcaacatacgaaaatcaataaacgtaatccagcatataaacagaaccaaagacaaaagccacatgattatctcaatagatgaagaaaaggcctttgacaaaattcatctgcctttcatgctaaaaactctcagtaaattaggtattgatgggatgtatctcaaaataataagagctatttatgacaaacccacagccaatatcatactgaatgggcaaaaactggaagcattccctttgaaaactggcacaagacagagatgccctctctcaccactcctatgcaacatagtgttggaagttctggccagggcaatcaggcaggagaaagaaataaagggtattcaattaggaaaagaggaagtcaaattgtccctgtttgcagatgacatgattgtatatttagaaaaccccactgtctcagcccaaaatctccttaagctgataagcaacttcagcaaagtctcaggatacaaaatcaatgtgcaaaaatcacaagcattcttatacaccaataacagacaaacagagagccaaatcatgagtgaactcccatttacaattgcttcaaagagaataaaatacctaggaatccaacttacaagggatgtgaaggaactcttcaaggagaactacaaaccactgctcaacaaaataaaagaggatacaaacaaatggaagaacattccatcctcatggatgggaagaaaatatcatgaaaatggccatactgcccaagggacatggatgaagctggaaatcatcgttctcagcaaactaccccaagaacaaaaaaccaaacaccgcatgttctcactcacaggtgtatttatagaaggtagggcactacagaacaagtcagaaacatcccagtctagacaccctggagccactcattctctccctgaatatactataccaggttcttcaccaagtaatttctattggtttactttaggattaaaggaagaagtgacttcagggtggaagagagagaagaagaaaaggaagagagaaggagggaaagaaggaaggaaggaaggaaggaaggaaggaaggaaggaaggaaagaaggaaggaaggaagaaaggaaggaaggaagttcctttgataccctga

SEQ ID NO: 8664 - DNA, 1986 bp, Homo sapiens; identical to SEQ ID NO: 4451
  SIMILAR (100)..(1617): 881254mologous to Homo sapiens putative p150,accession number U93574,Smith-Waterman Score=2241.

SEQ ID NO: 8665 - DNA, 2439 bp, Homo sapiens
  SIMILAR (181)..(483): 931254mologous to Homo sapiens putative p150,accession number U93563,Smith-Waterman Score=476.
atggataaattcctcgacacatacactctcacaagactaaaccaggaagaagttgaatctctgaatagaccaataataggctctgaaattgaggcaataattaatagcttaccaaccaaaaaaagtccaggaccagatggattcacagctgaattctaccagaggtacaaggaggagctgctgataggcaacttcagcaaagtctcaggatacaaaatcaatgtgcaaaaatcacaagcattcctatacaccaataacagacaaacagagagccaaatcgtgagtgaactcccactcacaattgcttcaaagagaataaaatacctaggaatccaacttacaagggatgtgaaggacctctgcaaggagaactacaaaccactgctcaatgaaataaaagaggatacaaacaaacggaagaacattccatgctcatgggtaggaagaatcaatattgtgaagatggccatactgcccaagatcagctgcagcagcagtgcctggagcttgttagaaattctgattctcaggccccttcccccagacctgctggagcagtgtcttcaggttaacaagatctacgagtgtttcataaggaagttaaagatgaggcctggaatttccaccattaatgcttcatttcattggcttgagtggagaaggcccatgggcctccaatatgaaagcagttgtttcaggaatggtgagtacattgatacaggacagtctgaacaccttagtttgaattatctaagagtaagctatgtcacagggaatcgaatgaagctgcggaccctcacggtgagtgttacagctcttaaagatggtgtttctggagtttgctccttcagatgttcagatgtgtctggagtttcttccttccagtgggttcgtggtctcgctgacttcaggagtgaagctgcagacctttgcaattggtttccacatttacgaaaaggaaaaggcaggagaagaggggcatggctggccctctctaagatggagtggcaaatccacatggctttggagcacagtgggccagcaaatctgagaaacagctgtttctccgcacgatacccccagcacaccccagccaccctgtcatccccggaggctattcctcagaagccagctgttgtgagtgagaagatgaaagttgtgttgttgttattgccaaaaccatttatcttcatggagtcatctgagttctccacaagcaaagatggatggagaagtaaaagaaaagccatgggtgccatagctgagaggaagagcaagaatgaacagaatggtgatgggaagaagacactggagcccttcccagcagaatccaatggggaagaagagacaagggtcttgaattactttccatcccatttgtacagagtcagaactggggctattagagagtatggatcaattgctactctacagaaagcaggtaacaccaagccagagggcgctcaattcattatcagccattatcaaacatcaaaatgtaagaagaaagggccttctcctgtggtagtgattccctccacaggtataacttatttctcaactgcaggtgctctgggctctgaacagggcaagggtagacacagggatggcatggttgaggcagaacctggaagggcatgggtttcaggaagtggggtttattacagtccaaatgacaaaaccttctgtgccgagttgcatgccgacagtgctcagactgcagcaaggggatggatgcagccccttctggcattctctgggttttacgaactcactacatcaccatgcatggagatggggcagacctctctctgggccttggttatcctctatgttagacgactaaccctcagttattgttacctcgttttggcctcatcaggaattcagagggccagttaccccaagagaagactacagaaaataacagcagtgaaagccaacatttgtgactgctgtctgtattccagatgcggcaccaaggcctttatatctgctgtttcatttgagctaggcttgctgaggctgaaggtggcacagtcatgtggtggggtatctgagtgtgaggtagtgcagacaagttatttgtttgcctatgagagaaatgagatagatattattcaccatcagaatgctaatgaaaaagtccttgcctgggaagaccacaggtgctttgtttttcagggagttgtaatttcacgtggaaagaaggaagtggattctgggtgggctttgagggagcactgccctttccccactcccctaactcagagctggattcctgtaagtgtggagattggctgggagatgagggtccatcaggggaagaccagtgtttatattgctgaagatgaagatgatggagatggtgatggagatggtgcagaagtagtaggagatggatttgattcctacaagacagaatgtgagaagttttga

SEQ ID NO: 8666 - DNA, 3139 bp, Homo sapiens
  SIMILAR (358)..(2970): 861254mologous to Homo sapiens putative p150,accession number U93565,Smith-Waterman Score=3900.
atggtaaagggatcaattcaacaagaggagctaactatcctaaacatttatgcacccaatacaggagcacccagattcataaagcaagtcctgagtgacctacaaagagacttagactcccacacattaataatgggagactttaacaccccactgtcaacattagacagatcaacgagacagaaagtcaacaaggatacccaggaattgaactcagctctgcaccaagcagacctaatagacatctacagaactctccaccccaaatcaacagaatatacatttttttcagcaccacaccacacctattccaaaattgaccacatagttggaagtaaagctctcctcagcaaatgtaaaagaacagaaattataacaaactatctctcagaccacagtgcaatcaaactagaactcaggattaagaatctcactcaaagccgctcaactacatggaaactgaacaacctgctcctgaatgactactgggtacataacgaaatgaaggcagaaataaagatgttctttgaaaccaacgagaacaaagacaccacataccagaatctctgggacgcattcaaagcagtgtgtagagggaaatttatagcactaaatgcctacaagagaaagcaggaaagatccaaaattgacaccctaacatcacaattaaaagaactagaaaagcaagagatcaacaaaattgatagaccgctagcaagactaataaagaaaaaaagagagaagaatcaaatagacacaataaaaaatgataaaggggatatcaccaccgatcccacagaaatacaaactaccatcagagaatactacaaacacctctacacaaataaactagaaaatctagaagaaatggatacattcctcgacacatacactctcccaagactaaaccaggaagaagttgaatctctgaatagaccaataacaggatctgaaattgtggcaataatcaatagtttaccaaccaaaaagagtccaggaccagatggattcacagccgaattctaccagaggtacaaggaggaactggtaccattccttctgaaactattccaatcaatagaaaaagagggaatcctccctaactcattttatgaggccagcatcattctgataccaaagccgggcagagacacaaccgaaaaagagaattttagaccaatatccttgatgaacattgatgcaaaaatcctcaataaaatactggcaaaccgaatccagcagcacatcaaaaagcttatccaccatgatcaagtgggcttcatccctgggatgcaaggctggttcaatatacgcaaatcaataaatgtaatccagcatataaacagagccaaagacaaaaaccacatgattatctcaatagatgcagaaaaagcctttgacaaaattcaacaacccttcatgctaaaaactctcaataaattaggtattgatgggatgtatttcaaaataataagagctatctatgacaaacccacagccaatatcatactgaatgggcaaaaactggaagcattccctttgaaaactggcacaacacagggatgccctctctcaccgctcctattcaacatagtgttggaagttctggccagggcaatcaggcaggagaaggaaataaagggtattcaattaggaaaagaggaagtcaaattgtccctgtttgcagacgacatgattgtttatctagaaaaccccatcgtctcagcccaaaatctccttaagctgataagcaacttcagcaaagtctcaggatacaaaatcaatgtacaaaaatcacaagcattcttatacaccaacaacagacaaacagagagccaaatcatgagtgaactcccattcacaattgcttcaaagacaataaaatacctaggaatccaacttacaagggatgtgaaggacctcttcaaggagaactacaaaccactgctcaaggaaataaaagaggacacaaacaaatggaagaacattccatgctcatgggtaggaagaatcaatatcgtgaaaatggccatactgcccaaggtaatttacagattcaatgccatccccatcaagctaccaatgactttcttcacagaattggaaaaaactactttaaagttcatatggaaccaaaaaagagcccgcatcgccaagtcaatcctaagccaaaagaacaaagctggaggcatcacactacctgacttcaaactatactacaaggctacagtaaccaaaacagcatggtactggtaccaaaacagagatatagatcaatggaacagaacagagccctcagaaataatgccgcatatctacaactatctgatctttgacaaacctgagaaaaacaagcaatggggaaaggattccctatttaataaatggtgctgggaaaactggctagccatatgtagaaagctgaaactggatcccttccttacaccttatacaaaaatcaatccaagatggattaaagatttaaacgttagacctaaaaccataaaaaccctagaagaaaacctaggcattacctttcaggacataggcgtgggcaaggacttcatgtccaaaacaccaaaagcaatggcaacaaaagccaaaattgacaaatgggatctaattaaactaaagagcttctgcacagcaaaagaaactaccatgagagtgaacaggcaacctacaacatgggagaaaattttcgcaacctacgcatctgacaaagggctaatatccagaatctacaatgaactcaaacaaatttacaagaaaaaaacaaacaaccccatcaaaaagtgggcgaaggacatgaacagacacttctcaaaagaagacatttatgcagccaaaaaacacatgaagaaatgctcatcatcactggccatcagagaaatgcaaatcaaaaccactatgagatatcatctcacaccagttagaatggcaatcattaaaaagtcaggaaagaacagacgcacagcaactttaagtttgctgccagctatacgtcatgaaagggaagcttttcatcaaagggaagaagaaaaggaagggggaagaatcctacctttacaaaacagagtaattctttgcttctgctccctttgcccacatctctcacctgcgtccaaaccaaaacaca

SEQ ID NO: 8667 - DNA, 3558 bp, Homo sapiens
  SIMILAR (649)..(2238): 911254mologous to Homo sapiens putative p150,accession number U93572,Smith-Waterman Score=2553.
atgttctttgaaaccaacgagaacaaagacacaacataccagaatctctgggacacattcaaagcagtgtgtagaggaaaatttatagcactaaatgcccacaagagaaagcaggaaagatctaaaattgacaccctaacatcacaattaaaagaactagagaagcaagagcaaacgcattcaaaagctagcagaaggcaagaaataactaagatcagagcagaactgaaggaaatagagaaacaaaaaacccttcaaaaaatcaatgaatccaggagctggttttttgaaaagatcaacaaaattgatagaccgctagcaagactaataaagaagaaaagagagaagaatcaaatagacacaataaaaaatgataaagatatcaccactgatcccacagaaatacaaactaccatcagagaatactataaacacctctatgcaaataaactagaaaatctagaagaaatggataaattcctcgacacatacaccctcccaagactaaaccaggaagaagttgaatctctgaatagaccaataacaggctctgaaattgaggcaataattaatagcttaccaaccaaaaaaagtgcaggaccagatggattcacagccgaattctaccagaggtacaaggaggagctgcatataaacagaaccaaagacaaaaaccatatgattatctcaacagatgcagaaaaggcctttgacaaaattcaacaactcttcatgctaaaaactctcaataaattaggtattgatgggacatatctcaaaataaaaagagctatctatgacaaacccacagccaatatcatactgaatgggcaaaaactggaagcataccctttgaatactggcacaagacagggatgccctctctcaccactcctattcaacatagtgtgggaagttctggccagggcaatcaggcaggagaaggaaataaagggtattcaattaggaaaagaggaagtcaaattgtccctgtttgcagatgacgtgattgtatatctagaaaaccccatcatctcagcccaaaatctccttaagctgataagcaacttcagcaaagtctcaggatacaaaatcaatgtgcaaaaatcacaagcattcttatacaccaataacagacaaacagagagccaaatcatgagtgaactcccattcacaattgcttcaaagagaataaaatacctaggaatccaacttacaagggatgtgaaggacctcttcaaggagaacaacaaatcactgctcaatgaaataaaacaggatacaaacaaatggaagaaccttccatgctcatgggtaggaagaatcaatatcgtgaaaatggccatactgcccaaggtaatttatagattcaatgccatccccatcaagctaccaatgactttcttcacagaattggaaaaacctactttaaagttcatatggaaccaaaaaagagcccgcattgccaagtcaatcctaagccaaaagaacaaagctggaggcatcacgatacctgacttcaaactatactacaaggatacagtaaccaaaacagcatggtactggtaccaaaacagagatctagaccaatggaacagaacagagccctcggaaataatgccgcatatctacaaccatctgatctttgacaaacctgacaaaagcaaggaatggggatatgattccctatttaataaatggtgctgggaaaactggctagccatatgtagaaagctgaaactggatcccttccttacactttatacaaaaattaattcaagatggattaaagacttaaatgttagacataaaaccataaaagccctagaagaaaacctaggcaataccattcaggacatagacatgggcaaggacttcatgtctaaaacaccaaaagcaatggcagcaaaagccaaaattgacaaatgggatctaattaaactaaacagcttctgcacagcaaaagaaactaccatcagagtgaataggcaacctacagaatgggagaaaatttttgcaatctactcatctgacaaagggctaatatccagaatctacaatgaactcaaacaaatttacaagaaaaaaacaaacaaccccatcaaaaagtggacgaaggatatgaacagacacttctcaaaagaagacttttacgcagcccaaagacacatgaaaaaatgttcatcatcactggccatcagagaaatgcaaatcaaaaccacataccatgctggaccagatggatttacagccgaattctaccagaggtacaaggaggaactggtaccattccttctgaaactattccaatcaatagaaaaagagggaatcctccctaactcattttatgaggccagcatcatcctgataccaaagcctggtagagacacaaccaaaaaagagaattttagaccaatatccttgatgaacattgatgcaaaaatcctcaataaaatactggcaaaacgaatccagcagcacatcaaaaagcttatccaccatgatcaagtgggtttcatccctgggatgcaaggctggttcaatatatgcaaatcaataaacgtaatccagcatataaacagaaccaaagacaaaaaccacatgattatctcaatagatgcagaaaaggcctttgacaaaattcaacaactcttcatgctaaaaactctcaataaattaggtattgatgggacgtatctcaaaataataagagctatctatgacaaacccacagccaatatcatactgaatgggcaaaaactggaagcattccctttgaaaactggcacaagacagggatgccctctctcaccactcctattcaacatagtgtgggaagttctggccagggcaatgaggcaggagaaggaaataaagggtattcaattaggaaaagaggaagtcaaattgtccctgtttgcagacgacatgattgtgtatctagaaaaccccattgtctcagcccaaaatctccttaagctgataagcaacttcagcaaagtctcaggatacaaaatcaatgtacaaaaatcacaagcattcttatacaccaataacagacaaacagagagccaaatcatgagtgaactcccattcacaactgcttcaaagagaataaaatacctaggaatccaacttacaagggatgagaaggacctcttcaaggagaactacaaaccactgctcaatgaaataagaggatacaaacaaatggaagaacattccatgctcacgggtaggaagaatcaatatcgtgaaaatgctcatactgcccaagctaaggcgaaccacaggccagccacatccaaaaaggtttacctgattacggcaatgaagccactgtccagtcctattcctgaaggtttggggctagaaaacagaacaggaaaggaaatcaagagtagagaatggaccaccatgttaagattggctgtagctgctgaactaacctttagagattggaaggagcggtctcggaggactttggacacacatgaaacaaaggggattcccttaagtaaaagcagagcaggcattctggtgattgacattagatag

SEQ ID NO: 8668 - DNA, 2133 bp, Homo sapiens; identical to SEQ ID NO: 3488
  SIMILAR (2)..(61): 651254mologous to Homo sapiens putative p150,accession number U93574,Smith-Waterman Score=61.

SEQ ID NO: 8669 - DNA, 3054 bp, Homo sapiens
  SIMILAR (1429)..(2772): 971254mologous to Homo sapiens putative p150,accession number U93564,Smith-Waterman Score=2301.
atgggagactttaacaccgcactgtcaacattagacagatcaatgagacagaaagttaataaggatatccaagaattgaactcagctctgcaccaagcagacctaacagacatctacggaactctccaccccaaatcaacagaatgtacattcttctcagcaccacaccacacctattccaaaattgtccacatagttggaagtaaagcactcctcagcaaatggaaaagaagagaaattataacaaactgtctctcagaccacagtgcaatcaaactagaactcaggattaagaaactcaatcaaaactgctcaactacatggaaactgaacaacctgctcctgaataattactggactaataaagaagaaaagagagaagaatcaaatagatgcaataaaaatgataaaggggatatcaccaccaatcccacagaaatacaaactaccatcagagaatactataaacacctctatgcaaataaactagaaaatctagaagaaatggataaattcctcgacacatacaccctcccaagactaaaccaggaagaagttgaatctctgaatagaccaataacaggctctgaaattgaggcaataattaatagcttaccaaccaaaaaaagtccaggaccagatggattcacagccgaattctaccagaggatgaactacatttctttcaaaagcacctggaaaattataaagaatgcatacagtttagcccatagccgagaactgagagatggaggtcaaagtcagaaaatctgcgaacagttttatattttgttcctgacacacttctccagatatgagcgacatgttaaagaacatacagtggagaaatccaactcatacagtcctgaaaagattagaaaagaagaatctaaacaggatacaaagctcaatgatgaaaatgactctgaaaggaaagcctcagttcatctgctggaaacagacaactgtgcttctgcaatgcatcactgttttgttttgtttgtggcaaagccagtagctcattatgaagtgggtattgactttatgattgccaaacaaatgcacagggatattttatcaagagctgtggattcttatttactgaacagaattcgttccaatgtccagaataatatgctgaagcagccatttacaaaagcaagccacaaccctttaccattgtccttcagcaggcagccagcctcagggggtctgcagatagcaacttgtggcaccaatgtcttcctttatataatgcacgtatcaccatcacgatacgagagcaactcgaagaatcttaacgtataccacggtaaacacctacggcacccaactcagtctacagcaggacacccaaaagttaaattcactttggctgtggctgtgctccaggggtctgggactgtctgcatctctgaaacaactcctgtgttggaagttctggccagcgcaatcaggcaggagaaggaaataaagggtattcaattaggaaaagaggaagtcaaattgtccctgtttgcagacgacatgattgtttatctagaaaaccccatcgtctcagcccaaaatctccttaagctgataagcaacttcagcaaagtctcaggatacaaaatcaatgtacaaaaatcacaagcattcttatacaccaacaacagacaaacagagagccaaagcatgggtgaactcccattcacaattgcttcaaagagaataaaatacctaggaatccaacttacaagggatgtgaaggacctcttcaaggagaactacaaaccactgctcaaggaaataaaagaggacacaaacaaatggaagaacattccatgctcatgggtaggaagaatcaacatcgtgaaaatggccatactgcccaaggtaatttacagattcaatgccatccccatcaagctaccaatgactttcttcacagaattggaaaaaactactttaaagttcatatggaaccaaaaaagagcccgcatcgccaagtcaatcctaagccaaaagaacaaagctggaggcatcacactacctgacttcaaactatactacaaggctacagtaaccaaaacagcatggtactggtaccaaaacagagatatagatcaatggaacagaacagagccctcagaaataatgccgcatacctacaactatctgatctttgacaaacctgagaaaaacaagcaatggggaaaggattccctatttaataaatggtgctgggaaaactggctagccatatgtagaaagctgaaactggatcccttccttacaccttatagaaaaatcaattcaagatggattaaagatttaaatgttagacctaaaaccataaaaaccctagaagaaaacctaggcattaccattcaggacataggcgtgggcaaggacttcatgtccaaaacaccaaaagcaatggcaacaaaagccaaaattgacaaatgggacctaattaaactaaagagcttctgcacagcaaaagaaagtaccatcagagtgaacaggcaacctacaacatgggagaaaattttcacaacctactcatctgacaaagggctaatatccagaatctacaaagaactcaaacaaatttacaagaaaaaaacaaacaaccccatcaaaaagtgggtgaaggacatgaacagacacttctcaaaagaagacatttatgcagccaaaaaacacatgaaaaaatgctcatcatcactggccatcagagaaatgcaaatcaaaaccactatgagatatcatctcacaccaacccagaaagaagagggcagcacacctcagggccagcaggaggaaggggagtcatccaggacatgtactctcaactggcggttgggaagaagacagaaagagatagacatgtgggtcgaagtctttactggggtccgtcgtgttacccaaggtacagttgtcagagaaggctgtggtgaagttgtgctgagatccgggatgccagtcttcaggcttcagtggtggcagcagggagctgactgtgcctgcccttgggcccaaggtggcatacattggtaccagtgttag

SEQ ID NO: 8670 - DNA, 2709 bp, Homo sapiens
  SIMILAR (1135)..(2523): 951254mologous to Homo sapiens ORF2 contains a reverse transcriptase domain.; ORF2,accession number M80341,Smith-Waterman Score=2316.
atgggagactttaacaccccactgtcaacattagacagatcaatgagacagaaagtcaaaaaggatacccaggaattgaactcagctctgcaccaagcagacctaatagacatctacagaactctccaccccaaatcaacagaatatacatttttttcagcaccacaccacacctattccaaaattgaccacatacttggaagtaaagctctcctcagcaaatgtaaaagaacagaaattataacaaactatctctcagacggcagtgcaatcaaactagaactcaggattaagaatctcactcaaaaccgctcaactacatggaaactgaacaacctgctcctgaatgactactgggtacctaacgaaatgaaggcagaaataaagatgttctttgaaaccaacgagaacaaagacacaacataccagaatctctgggacgcattcaaagcagtgtgtagagggaaatttatagcactaaatgcccacaagagaaagcaggaaagatccaaaattgacaccctaacatcacaattaaaagaactagaaaagcaagagcaaacacattcaaaagctagcagaaggcaagaaataactaaaatcagagcagaactgaaggaaatagagacacaaaaaacccttcaaaaaattaatgaatccaggagctggttttttgaaaggatcaacaaaatagatagaccgctagcaagactaataaagaaaaaaagagagaagaatcaaatagatacaataaaaaatgataaaggggatatcaccaccaatcccacagaaatacaaactaccatcagagaatactacaaacacctctacgccaataaactagaaaatctagaagaaatggataaattccttgacacatacactctcccaagactaaaccaggaagaagttgaatctctgaatagaccaataacaggatctgaaattgtggcaataatcaatagcttaccaaccaaaaagagtccaggaccagatggattcacagccaaattctaccagaggtacaaggaggaactgcatataaacagagccaaagacaaaaaccacatgattatctcaatagatgcagaaaaggcctttgacaaaattcaacaacgcttcatgctaaaaactctcaataaattagtgttggaagttctggccagggcaattaggcaggagaaggaaataaagggtattcaattaggaaaagaggaagtcaaattttccctgtttgcagacgacatgattgtatatctagaaaaccccattgtctcagcccaaaatctccttaagctgataagcaacttcagcaaagtctcaggatacaaaatcaatgtacaaaaatcacaagcattcttatacaccaacaacagacaaacagagagccaaatcatgagtgaactcccattcataattgcttcaaagagaataaaatacctaggaatccaacttacaagggatgtgaaggacctcttcaaggagaactacaaaccactgctcaaggaaataaaagaggatacaaacaaatgcaagaacattccatgctcatgggtaggaagaatcaatatcgtgaaaatggccatactgcccaaggtaatttacagattcaatgccatccccatcaagctaccaatgcctttcttcacagaattggaaaaaactactttaaagttcatatggaaccaaaaaagagcccgcatcgccaagtcaatcctaagccaaaagaacaaagctggaggcatcatgctacctgacttcaaaccatactacaaggctacagtaaccaaaacagcatggtactggtaccaaaagagagatatagatcagtggaacagaacagagccctcagaaataacgccgcatatctacaactatctgatctttgacaaacctgagaaaaacaagcaatggggaaaggattccctatttaataaatggtgctgggaaaactggctggccatatgtagaaagctgaaactggatcccttccttacaccttatacaaaaatcaattcaagatggattaaagacttaaacgttagacctaaaaccataaaaaccctagaagaaaacctaggcaataccattcaggacataggcatgggcaaggacttcatgtctaaaacaccaaaagcaatggcaacaaaagacaaaattgacaaatgggatctaattaaacttaagagcttctgtacagcaaaagaaactaccatcagagtgaacaggcaacctacaaaatgggagaaaattttcacaacatactcatctgacaaagggctaatatccagaatctacaatgaactcaaacaaatttacaagaaaaaaacaaacaaccccatcaaaaagtgggcaaaggatatgaacagacacttctcaaaagaagacatttatacagccaaaagacacatgaaaaaatgctcatcatcactagccatcagagaaattcaaatcaaacccacaatgagatactatctcacaccagttagaatggcgatcattaaaaagtcaggaaacaacagaataaccattgttctgctccccggttcactaatagtgcggtcatttcacgtaactttaaatgcgattcttcttcatccgggtctcaccctctttagtccgtctgctggccgcagagatatcccaagagtagcattctcctacttggctttttcagctcaaccttctcacaacaccccagttaattaa

SEQ ID NO: 8671 - DNA, 2573 bp, Homo sapiens
  SIMILAR (196)..(2379): 981254mologous to Homo sapiens putative p150,accession number U93569,Smith-Waterman Score=3713.
atgtcaagtgaatgggagtggttgaggtgctcagaagttaaaggtcagagagacgtgaggccagggtgtttggggtgggactttcgtgtgtatattgttgaggacacccaggatgaggacagaacttggagtgtcaaggaagcctgtgagctggtccttagagttcaggaaatgatcatcacaagggtggtagatgctgcaccacaccacacctattccaaaattgaccacatagttggaagtaaagctctcctcagcaaatgtaaaagaacagaaattataacaaactgtctctcagaccacagtgcaatcaaactagaactcaggattaagaatctcactcaaagccgctcaactacatggaaactgaacaacctgctcctgaatgactactgggtacataacgaaatgaaggcagaaataaagatgttctttgaaaccaacgagaacaaagacaccacataccagaatctctgggacgcattcaaagcagtgtgtagagggaaatttatagcactaaatgcctacaagagaaagcaggaaagatccaaaattgacaccctaacatcacaattaaaagaactagaaaagcaagagcaaacacattcaaaagctagcagaaggcaagaaataactaaaatcagagcagaactgaaggaaatagagacacaaaaaacccttcaaaaaatcaatgaatccaggagctggttttttgaaaggatcaacaaaattgatagaccgctagcaagactaataaagaaaaaaagagagaagaatcaaatagacgcaataaaaaatgataaaggggatatcaccaccgatcccacagaaatacaaactaccatcagagaatactacaaacaactctacgcaaataaactagaaaatctagaagaaatggatacattcctcgacacatacactctcccaagactaaaccaggaagaagttgaatctctgaatagaccaataacaggctctgaaattgtggcaataatcaatagtttaccaaccaaaaagagtccaggaccagatggattcacagccgaattctaccagaggtacaaggaggaactggtaccattccttctgaaactattccaatcaatagaaaaagagggaatcctccctaactcattttatgaggccagcatcattctgataccaaagccaggcagagacacaaccaaaaaagagaattttagaccaatatccttgatgaacattgatgcaaaaatcctcaataaaatactggcaaaccgaatccaacagcacatcaaaaagcttatccaccatgatcaagtgggcttcatccctgggatgcaaggctggttcaatatacgcaaatcaataaatgtaatccagcatataaacagagccaaagacaaaaaccacatgattatctcaatagatgcagaaaaggcctttgacaaaattcaacaacccttcatgctaaaaactctcaataaattaggtattgatgggacgtatgtcaaaataataagagctatctatgacaaacccacagccaatatcatactgaatgggcaaaaactggaagcattccctttgaaaactggcacaagacagggatgccctctctcaccgctcctattcaacatagtgttggaagttctggccagggcaatcaggcaggagaaggaaataaagggtattcaattaggaaaagaggaagtcaaattgtccctgtttgcagacgacatgattgtttatctagaaaaccccatcgtctcagcccaaaatctccttaagctgataagcaacttcagcaaagtctcaggatacaaaatcaatgtacaaaaatcacaagcattcttatacaccaacaacagacaaacagagagccaaatcatgggtgaactcccattcacaattgcttcaaagagaataaaatacctaggaatccaacttacaagggatgtgaaggacctcttcaaggagaactacaaaccactgctcaaggaaataaaagaggatacaaacaaatggaagaacattccatgctcatgggtaggaagaatcaatatcgtgaaaatggccatactgcccaaggtaatttatagattcaatgccatccccatcaagctaccaatgactttcttcacagaattggaaaaaactactttaaagttcatatggaaccaaaaaagagcccgcattgccaagtcaatcctaagccaaaagaacaaagctggaggcatcacactacctgacttcaaactatactacaaggctacagtaaccaaaacagcatggtactggtaccaaaacagagatatagatcaatggaacagaacagagccctcagaaataacaccgcatatctacaactatctgatctttgacaaacctgagaaaatgagtataatagatacagggggatggtatgaggcaccagtcagttccttcttcaaggagggactatgccgcacaggtactgagaatcaggttaacagacagcctccagctgccagtcccttcaaggtttacgtcagctgcacggggtcacttcaccctaggccacactacttcttggagcatccatatccaag

SEQ ID NO: 8672 - DNA, 2036 bp, Homo sapiens
  SIMILAR (604)..(1839): 951254mologous to Homo sapiens putative p150,accession number U93572,Smith-Waterman Score=2005.
ggtattttactggatgaagcctcaggtgtaaacaagaatcaacagcctgtcctccctgccggcttgcaggtccccaaaacggtagtgtccagctggaaccgtaaggcagcagaatatggcaaaaaagcaaaatctgaaactttccggctgcttcatgcaaaaaatatcatccgacctcagctcaagtttcgagagaagattgacaattccaacacaccatttcttcctaaaatcttcatcaaacccaatgctcagaaacctctccctcaagctctctctaaggaaaggcgggaacgcccacaggatcgtcctgaggacttggacgtcccccctgcactggctgatttcatccatcagcagagaacccagcaggttgagcaagacatgtttgcacatccttatcaatatgaactaaatcactttaccccagcagatgcagtgcttcaaaagccacaaccccagcaccactcttacaggagcttcctgggactgacctgcctgatgcaaatttctactcggacggaagacttcatcattgacaccctcgagcttcgaagtgacatgtacattctcaatgagagcctcacagacccagccatcgttaagaagaatcaaatagacgcaataaaaaatgataaaggggatatcaccactgatcccacagaaatacaaactaccatcagagattactacaaacacctctacgcaaataaactagaaaatctagaagaaatggataaattcctcgacacatacactcttccaagactaaaccagaaagaaattgaatctctgaatagaccaataacaggagctgaaattgtggcaataatcaatagcttaccaaccaaaaagagtctaggaccagatggattcacagccgaattctaccagaggtacaaggaggaactggtaccattccttctgaaactattccaatcaatagaaaaagagggaatcctccctaactcattttatgaggccagcatcatcctgataccaaagccgggcagagacacaaccaaaaaagagaattttagaccaatatccttgatgaacattgatgcaaaaatcctcaataaaatactggcaaaccgaatccagcagcacatcaaaaagcttatccaccatgatcaagtgggcttcatccctgggatgcaaggctggttcaacatacgcaaatcaataaatgtaatgcagcgtataaacagaaccaaagacaaaaaccacgtgattatctcaatagatgcagaaaaggcctttgacaaaattcaacaacgcttcatgctaaaaactctcaataaattaggtattgatgggacgtatctcaaaataataagagctatctatgacaaacccacagccaatatcatactgaatgggcaaaaactggaagcattccctttgaaaactggcacaagacagggaggccctctctcaccactcctattcaacatagtgttggaagttctggccagggcaatcaggcaggagaaggaaataaagggtattcaattaggcaaagaggaagtcaaattgtccctgtttgcagatgacatgattgtatatctagaaaaccccattgtctcagcccaaaatctccttaagctgataagcaacttcagcaaagtctcaggatacaaaatcaatattcaaaaatcacaagcattcttatacaccaacaacagacaaacagagagccaaatcatgagtgaactcccattcacaattgcttcaaagagaataaaatacctaggaatccaacttacaagggatgtgaaggacctcttcaaggagaactacaaaccactgctcaatgaaataaaagaggatacaaatggaagaacattccatgctcatggggtaggttcagaaatgccatacaaaagtcaagtgctggaattggggaccccaaaagcctgtttggtgctctaccctcctgttggcatcctggtacctgaaaccaggaagtctcaagaggctcatccaaagcccttaatgtacctgggtgttgtggctgtttattcaggtcccac

SEQ ID NO: 8673 - DNA, 740 bp, Homo sapiens
  SIMILAR (5)..(460): 361254mologous to Homo sapiens hypothetical protein,accession number AL110151,Smith-Waterman Score=263.
attcgacgtcctaaaacggatggtcatcgtcttcaccaggaaggaggacctgtccgggggctccctgcacgattacgtgagcaacacagagaaccgggccttgcgcgagctggtggccgagtgcgggggccgggtctgtgcctttgataaccgggccaccggccgagagcaggaagcccaggtggagcagctgctggggatggtcgagggcttggtgctggagcacaagggcgcccattactccaacgaggtgtatgagctggcgcaggtgctgcgctgggcaggccctgaggagcggctccggcgggtggcggagcgcgtggcagccagggtgcagaggaggccatggggcgcctggctgtcggcccggctgtggaagtggctgaagtcccccaggagctggaggctgggcctggccctgctgctggggggcgcgctcctgttctgggtggtgctccacaggcggtggtcggaggccgttgcggaggtcgggcctagctgacagcgcaggtcctaaaactgaaggcaccttggttaagggaggctgaattcttggagctgaagggaaagcttcattccaacggaaggaatcctgtagtttcaggcatagttttaatgccacagaacgccctcttgcatcacctttgcgacttcgccaaaaaaaagggttcactttttaagaaaataacgcgtcgtccgctatggggggtcccagcattacgtacggttgctactacgtc

SEQ ID NO: 8674 - DNA, 527 bp, Homo sapiens
  SIMILAR (490)..(290): 371254mologous to Homo sapiens ABC transporter,accession number AF091073,Smith-Waterman Score=85.
catagaccacgaggatctgagtctgaattggtgattattagaacaatgacttccatggggtgatacattagaagtgctccagggtccagagatttaaatgtaatgaaagatgaacaaaaaaaataaatgaaaaaaaagtatgctgcacaacaaatagaaaaacaaaaatctccataatgcaaaagcatcaagtgttcgcctctgagaagcgcctcgtatgcccagttactctcgttctccctcagctcttgcttgtgcttctccacctgccattccactttggcttggtactgcctgtagtcttcctggcaggccccagctccagttcttgggagcagctgggcatccaagaagaggtcattgctgtggaaggagccctctcgctccctccccagcttttcaatcacagccaggagctaggcctgctgctgcctctgctcctccacagagccccagttgttgaaggcacagtaccttctctcacactcccgcaccaggtctttcaggctgcagtagtccgagtgtgc

SEQ ID NO: 8675 - DNA, 4208 bp, Homo sapiens
  SIMILAR (2)..(2200): 961254mologous to Homo sapiens putative p150,accession number U93567,Smith-Waterman Score=3585.
agacacacataggctcaaaataaagggatggaggaagatttaccaagcaaatggaaaacagaaaaaggcaggggttgcaatcctagtctcagataaaacagaatttaaaccaacaaagatcaaaagagacaaagaaggccattacataatggtaaagggatcaattcaacaagaagagctaactatcctaaatatatatgcacccaatacaggagcacccagattcacaaagcaagtccttagagacctacaaagagacttagactccaacacaataataacgggagactttaacaccccactgtcaacattagacagatcaatgagacagaaagttaacaaggatatccaggaattgaactcagctctgcaccaagcagacctaatagacatctacagaactctccaccccaaatcaacagaaaatacattcttttcggcaccacaccacacctattccaaaattgaccacatagtgggaagtaaagcactcctcagcaaatgtaaaagaaaagaaattataacaaactgtctctcagaccacagtgcaatcaaactagaactcaggattaagaaactccctcaaaactgctcaactatatggaaactgaacaacctgctcctgaatgactactgggtacataacgaaatgaaggcagaaataaagatgttgtttgaaaccaatgagaacaaagacacaacataccagaatctctgggacacattgaaagcagtgtgtagagggaaatttatagcactaaatgcccacgggagaaaacaggaaagatctaaaattgacaccctaacatcacaattaaaagaactagcaaagcaagagcaaacacattcaaaagctagcagaaggcaagaaataactaagatcagagcagaactgaaggaaatagagacacaaaaaacccttcaaaaaattaatgaatccaggagctggttttttgaaaggatcaacaaaattgatagaccactagcaagactaataaagaaaaaaagagagaagaatcaaatagacacaataaaaaatgataaaggggatatcaccaccgatcccacagaaatacaaactaccatcagagaatactacaaacacctctacgcaaataaactagaaaatctagaagaaatggatacattcctcgacacatacactctcccaagactaaaccaggaagaagttgaatctctgaatagaccaataacaggctctgaaattgtggcaataatcaatagtttaccaaccaaaaagagtccaggaccagatggattcacagccgaattctaccagaggtacaaggaggaactggtaccattccttctgaaactattccaatcaataggaaaagagggaatcctccctaactcattttatgaggccagcatcattctgacaccaaagccgggcagagacacaaccaaaaaagagaattttagaccaatatccttgatgaacattgatgcaaaaatcctcaataaaatactggcaaaccgaatccagcagcacatcaaaaagcttatccaccatgatcaagtgggcttcatccctgggatgcaaggctggttcaatatacgcaaatcaataaatgtaatccagcatataaacagagccaaagacaaaaaccacatgattatctcaatagatgcagaaaaagcctttgacaaaattcaacaacccttcatgctaaaaactctcaataaattaggtattgatgggacgtatttcaaaataataagagctatctatgacaaacccacagccaatatcatactgaatgggcaaaaactggaagcattccctttgaaaactggcacaagacagggatgccctctctcaccgctcctattcaacatagtgttggaagttctggccagggcaatcaggcaggagaaggaaataaagggtattcaattaggaaaagaggaagtcaaattgtccctgtttgcagacgacatgattgtttatctagaaaaccccatcgtctcagcccaaaatctccttaagctgataagcaacttcagcaaagtctcaggatacaaaatcaatgtacaaaaatcacaagcattcttatacaccaacaacagacaaacagagagccaaatcatgggtgaactcccattcacaattgcttcaaagagaataaaatacctaggaatccaacttacaagggatgtgaaggacctccttcaaggagacctacaaaccactgctcaatgaaataaaagaggacacaaacaaatggaagaacattccatgctcatgggtaggaagaatcaatatcgtgaaaatggccatactgcccaaggtaatttatagattcaatgccatccccatcaagctaccaatgactttcttcacagaattggaaaaaactactttaaagttcatatggaaccaaaaaagagcccgcattgccaagtcactcctaagccaaaagaacaaagctggaggcatcacgctacctgacttcaaactatactacaaggctacagtaaccaaaacagcatggtactggtaccaaaacagagatatagatcaatggaacagaacagagccctcagaaataatgccgcctatctacaactatctgatctttgacaaacctgagaaaaacaagcaatggggaaaggattccctatttaataaatggtgctgggaaaactggctagccatatgtagaaagctgaaactggatcccttccttacaccttatacaaaaatcaattcaagatggattaaagatttaaacgttagacctaaaaccataaaaaccctagaagaaaacctaggcattaccattcaggacataggcgtgggcaaggacttcatgtccaaaacaccaaaagcaatggcaacaaaagccaacattgacaaatgggatctaattaaactaaagagcttctgcacagcaaaagaaactaccatcagagtgaacaggcaacctacaacatgggagaaaatttttgcaacctactcatctgacaaagggctaatatccagaatctacaatgaactcaaacaaatttacaagaagaaaacaaacaaccccatcaaaaagtgggcgaaggacatgaacagacacttctcaaaagaagacatttatgcagccaaaaaacacatgaagaaatgctcatcatcactggccatcagagaaatgcaaatcaaaaccactatgagatatcatctcacaccagttagaatggcaatcattaaaaagtcaggaaacaacagctcgagggaagcagccccgaagcctccgcggcggcggcggcggcggtcgcggatcctctccaggctgctcgcaaagtccggccggccggaggcagccgccaactcctctcaacttctgccgatccgctgggcgaagcaacacgcttcctgcgcgtctctcctaggggctgagccggtctccgagggtctcggccgcctccactccctggcgctgcacacaacttacgtggaggccaggcccgcgcggggggcccagagaaagccggcgccgggcgaggctcttgcaggttctcagacccgaacacagacctgggttagagttggggacttgcctgtaataagtgacttacccattgccctcaacctaaggaagccttgccatttaaaacctcccaatggagcctatcaaagcgtgcttcaaagtgtgagggaggctgagagaggaattacagaaccgcctgacattggctgcaacctgatggggagatctgactcaaggaacagtacgatggccattgatgtccccgcccacgcactctgtagaagccttgggaatcttttcaaagcactgcccccacccgagagcatcatgacttctgttgctgggacaaaggtaagaatcattaggaaacacgatcacagtagtgcacctgcttacgcacgatatccagcccagagaaggtcccgcttcctaagccctcctgagactcaccagccacaagcccacatctatactaagttctttcgaaggccctctttactgctggacattcttcctttgtgcaacacgttaataaacccaacttggttcagccacagcgctgcaatgaacattcacggcataaaaaggaatgagagcatgtcttttgcaggagcatggatggagctggaggttatcatccttagcaaactaacacaagaacagaaaaccaaataccgcaagttctcacttataagtgggcactaa

SEQ ID NO: 8676 - DNA, 2770 bp, Homo sapiens
  SIMILAR (712)..(1656): 991254mologous to Homo sapiens putative p150,accession number U93572,Smith-Waterman Score=1602.
atggggaaaaaacagaacagaaaaactggaaactctaaaacgcagagcgcctctcctcctccaaaggaacgcagttcctcaccagcaacagaacaaagctggatggagaatgattttgacgagctgagagaagaaggcttcagacgatcaaattactctgagctacgggaggacattcaaaccaaaggcaaagaagttcaaaactttgaaaaaaatttagaagaatgtataactagaataaccaatacagagaagtgcttaaaggagctgatggagctgaaaaccaaggctcgagaactacgtgaagaatgcagaagcctcaggagccgatgcgatcaactggaagaaagggtatcagcaatggaagatgaaatgaatgaaatgaagcgagaagggaagtttagagaaaaaagaataaaaagaaatgagcaaagcctccaagaaatatgggactatgtgaaaagaccaaatctacgtctgattggtgtacctgaaagtgatgtggagaatggaaccaagttggaaaacactctgcaggatattatccaggagaacttccccaatctagcaaggcaggccaacgttcagattcaggaaatacagagaacgccacaaagatactcctcgagaagagcaactccaagacacataattgtcagattcaccaaagttgaaatgaaggaaaaaatgttaagggcagccagagagaaagaaatacaaactaccatcagagaatactacaaacacctctacgcaaataaactagaaaatctagaagaaatggatacattcctcgacacatacactctcccaagactaaaccaggaagaagttgaatctctgaatagaccaataacaggctctgaaattgtggcaataatcaatagtttaccaaccaaaaagagtccaggaccagatggattcacagccgaattctaccagaggtacaaggaggaactggtaccattccttctgaaactattccaatcaatagaaaaagagggaatcctccctaactcattttatgaggccagcatcattctgataccaaagccgggcagagacacaaccaaaaaagagaattttagaccaatatccttgatgaacattgatgcaaaaatcctcaataaaatactggcaaaccgaatccagcagcacatcaaaaagcttatccaccatgatcaagtgggcttcatccctgggatgcaaggctggttcaatatacgcaaatcaataaatgtaatccagcatataaacagagccaaagacaaaaaccacatgattatctcaatagatgcagaaaaagcctttgacaaaattcaacaacccttcatgctaaaaactctcaataaattaggtattgatgggacgtatttcaaaataataagagctatctatgacaaacccacagccaatatcatactgaatgggcaaaaactggaagcattccctttgaaaactggcacaagacagggatgccctctctcaccgctcctattcaacatagtattggaagttctggccagggcaatcaggcaggagaaggaaataaagggtattcaattaggaaaagaggaagtcaaattgtccctgtttgcagacgacatgattgtttatctagaaaaccccatcgtctcagcccaaaatctccttaaagctgataagcaacttcagcaaagtctcaggatacaaaatcaatgtgcaaaaatcacaagcattcctatacaccaacaacagacaaacagagagccaaatcatgagtgaactcccattcacaattgcttcaaagagaataaaatacctaggaatccaacttacaagggatgtgaaggacctcttcaaggagaactacaaaccactgctcaaggaaataaaagaggatacaaacaaatggaagaacattccatgctcatgggtaggaagaatcaatatcgtgaaaatggccatactgcccaagaattggaaaaaaactactttaaagttcatatggaaccaaaaaggagcccgcattgccaagtcaatcctaagccaaaagaacaaagctggaggcatcacactacctgacttcaaactatactacaaggctacagtaaccaaaacagcatggtactggtaccaaaacagagatatagatcaatggaacagaacagagccctcagaaataacgccgcatatctacaactatctgatctttgacaaacctgagaaaaacaagcaatggggaaaggattccctatttaataaatggtgctgggaaaactggctagccatatgtagaaagctgaaactggatcccttccttacaccttatacaaaaatcaattcaagatggattaaagacttaaacattagacctaaagccataaaagccctagaagaaaacctaggcaataccattcaggacataggcatgggcaaggacttcatgtctaaaacaccaaaagcaatggcaacaaaagacaaaattgacaaatgggatctaattaaactaaagagcttctgcacagcaaaagaaactaccatcagagtgaacaggcaacctacaaaatgggagacaattttcgtaacctactcatctgacaaagggctaatatccagaagctgcaaagaactcaaacaaatttacaagaaaaaaacaaacaaccccatcaaaaagtgggcgaaggacatgaacagacacttctcaaaagaagacatttatgcagccaacagacacatgaaaaaatgctcatcatcactggccatcagagaaatgcaaatcaaaaccaca

SEQ ID NO: 8677 - DNA, 3068 bp, Homo sapiens
  SIMILAR (847)..(1884): 941254mologous to Homo sapiens putative p150,accession number U93574,Smith-Waterman Score=1650.
actttaaaccaacaaagatcaaaagagaaaaagaaggccattacataatggtaaagggatcaattcaacaagaagagctaactatcctaaaaatatatgcacccaatacaggagcaccaagattcacaaagcaagtcctgagtgacctacaaagagacttagactcccacacattaataatgggagactttaacaccccactgtcaacattagacacatcaacgagacagaaagtcaagaaggatacccaggaattgaactcagctctgcaccaagcggacctaatagacatctacagagctctccaccccaaatcaacagaatatacatttttttcagcaccacaccacacctattccaaaattgaccacatagttggaagtaaagctctcctcagcaaatgtaaaagaacagaaattataacaaactatctctcagaccacagtgcaatcaaactagaactcaggattaagaatctcactcaaaaccactcaactacatggaaactgaacaacctgctcctgaatgactactgggtacataacgaagtgaaggcagaaataaaggtgttctttgaaacgaaggagaacaaagacacaacataccagaatctctgggacgcattcaaagcagtgtgtagagggaaatttatagcactaaatgcccacaagagaaagcaggaaagatccaaaattgacaccctaacatcacaattaaaagaactagaaaagcaagagcaaacacattcaaaagctagcagaaggcaagaaataactaatatcagagcagaactgaaggaaatagagacacaaaaaacccttcaaaaaattaatgaatccaggagctgaaatacaaactaccatcagggaatactacaaacacctctatgcaaataaactagaaaatctagaagaaatggataaattcctggacacatacactctcccaagactaaaccaggaagaagttgaatccctgaatagaccaataacaggctctgaaattgtggcaataatcaatagcttaccaaccaaaaagattccaggaccagatggattcacagccgaattctaccagaggtacaaggaggaactggtaccattccttctgaaactattccaatcaatagaaaaagagggaatcctccctaactcattttatgaggccagcatcattctgataccaaagccaggcagagacacaacaaaaaaagagaattttagaccaatatccttgatgaacattgatgcaaaaatcctcaataaaatactagcaaaacgaatccagcagcacatcaaaaagcttatcccccatgatcaagtgggcttcatccctgggatgcaaggctggttcaatatacgcaaatcaataaatgtaatccagcatataaacagagcaaaagacaaaaaccacatgattatctcaatagatgcagaaaaagcctttgacaaaattcaacaacccttcatgctaaaaactctcaataaattaggtattgatgggacgtatttcaaaataataagagctatctatgacaaacccacagccaatatcatactgaatgggcaaaaactggaagcattccctttgaaaactggcacaagacagggatgccctctctcaccactcctattcaacatagtgttggaagttctggccagggcaattaggcaggagaaggaaataaagggtattcaattaggaaaagaggaagtcaaattgtccctgtttgcagatgacatgattatatatctagaaaaccccattgtctcagcccaaaatctccttaagctgataagcaacttcagcaaagtctcaggatacaaaatcaatgtacaaaaaatcacaagcattcttatacaccaacaacagacaaacagagaaccaaatcatgagtgaactcccattcccaattgcttcaaagagaataaaatacctaggaatccaacttacaagggatgtgaaggacctcttcaaggagaactacaaaccactgctcaacgaaataaaaagaggacacaaacaaatggaagaacattccatgctcatgggtaggaagaatcaatattgtgaaaatggccatactgcccaagctgataggcaactgcagcaaaatctcaggatacaaaatcaatgtgcaaaaatcacaagcattcttatacaccaataacagacaaacagagagccaaatcatgagtgaactcgcattcacaattgcttcaaagaaaatcaaatacctaggaatccaacttacaagggatgtgaaggacctcttcaaggagaactacaaaccactgctcaatgaaataaaagaggatacaaacaaatggaagaacattccatgctcatgggtaggaagaatcaatatcgtgaaaatggccatactgcccaagagcagagtttgtgatcttcggtatttgcactggatctacggatctgtgtcctatggaaaaggcaatgcgtggatcacaagaaagagaagcaccacccaaaagtggacaggtgcagcactacagcccctttccaggacatccctgaaagacaccggagaaggggaatcttcccagtgggcagaacttcgagcagtgtacctgttggttcactttgcatggaaggagaaatggccacatgtgtggttatatactgattcatgggctgtatccagtggttcggctggatggtcaggaacttggaagaagcatgattggaaaattggtgacaaagaaatttggagaagagccagctacctggtggcagattatattggacctcttccatcatggaaagggcagagatttgtcctcactggaatagacacttactctggatatgggtttgcctatcctgcatgcaatgcttctgccaagactaccatccgtggattcatggaatgccttatccaccatcatggtattccacacagcattgcctctgaccaaggcactcacttcatggctaaagaagtgcagcagtgggctcattctcatggaattcaccggtcttatcatgttctccatcacccagaagcagctggattgatagaacgatggaatggccttttgaagtga

SEQ ID NO: 8678 - DNA, 5169 bp, Homo sapiens
  SIMILAR (2803)..(3534): 961254mologous to Homo sapiens putative p150,accession number U93565,Smith-Waterman Score=1265.
atggggaaaaaacagaacagaaaaactggaaactctaaaacgcagagcgcctctcctcctccaaaggaacgcagttcctcaccagcaacagaacaaagctggatggagaatgattttgacgagctgagagaagaaggcttcagacgatcaaattactctgagctatgggaggacattcaaaccaaaggcaaagaagttgaaaactttgaaaaaaatttagaagaatgtataactagaataaccaatacagagaagtgcttaaaggagctgatggagctgaaaaccaaggctcgagaactacatgaagaatgcagaagcctcaggagccgatgcgatcaactggaagaaagggtatcagcaatggaagatgaaatgaatgaaatgaagcgagaagggaagtttagagaaaaaagaataaaaagaaatgagcaaagcctccaagaaatatgggactatgtgaaaagaccaaatctacgtctgattggtgtacctgaaagtgatgtggagaatggaaccaagttggaaaacactctgcaggatattatccaggagaacttccccaatctagcaaggcaggccaacgttcagattcaggaaatacagagaatgccacaaagatactcctcgagaagagcaactccaagacacataattgtcagattcaccaaagttgaaatgaaggaaaaaatgttaagggcagccagacagaaagcaccacaccacacctattccaaaattgaccacatagttggaagtaaagctctcctcagcaaatgtaaaagaacagaaattataacaaactatctctcagaccacagtgcaatcaaactagaactcaggattaagaatctcactcaaagccgctcaactacatggaaactgaacaacctgctcctgaatgactactgggtacataacgaaatgaaggcagaaataaagatgttctttgaaaccaacgagaacaaagacaccacataccagaatctctgggacacattcaaagcagtgtgtagagggaaatttatagcactaaatgcctacaagagaaagcaggaaaagatccaaaattgacactctaacatcacaattaaaagaactagaaaagcaagagcaaacacattcaaaagctagcagaaggcaagaaataactaaaatcagagcagaactgaaggaaatagagacacaaaaaacccttcaaaatatcaatgaatccaggagctggttttttgaaaggatcaacaaaattgatagaccgctagcaagactaataaagaaaaaaagagagaagaatcaaatagacacaataaaaaatgataaaggggatatcaccactgatcccacagaaatacaaactaccatcaggagaatactacaaacacctctacgcaaataaactagaaaatctagaagaaatggataaattcctcgacacatacactctcccaagactaaaccaggaagaagttgaatctctgaatagaccaataacaggctctgaaattgtggcaataatcaatagtttaccaaccaaaaagagtccaggaccagatggattcacagccgaattctaccagaggtacaaggaggaactggtaccattccttctgaaactattccaatcaatagaaaaagagggaatcctccctaactcattttatgaggccagcatcattctgataccaaagccgggcagagacacaaccaaaaaagagaattttagaccaatatccttgatgaacattgatgcaaaaatcctcaataaaatactggcaaaccgaatccagcagcacatcaaaaagcttatccaccatgatcaagtgggcttcatccctgggatgcagggctggttcaatatacgcaaatcaataaatgtaatccagcatataaacagagccaaagacaaaaaccacatgattatctcaatagatgcagaaaaagcctttgacaaaattcaacaacccttcatgctaaaaactctcaataaattaggtattgctgggacgtatttcaaaataataagagctatctatgacaaacccacagccaatatcatactgaatgggcaaaaactggaagcattccctttgaaaactggcacaagacagggatgccctctctcaccgctcctattcaacatagtgttggaagttctggccagggcaatcaggcaggagaaggaaataaagggtattcaattaggaaaagaggaagtcaaactgtccctgtttgcagacgacatgattgtttatctagaaaaccccatcgtctcagcccaaaatctccttaagctgataagcaacttcagcaaagtctcaggatacaaaatcagtgtacaaaaatcacaagcattcttatacaccaacaacagacaaacagagagccaaatcatgggtgaactcccattcacaattgcttcaaagagaataaaatacctaggaatccaacttacaagggatgtgaaggacctcttcaaggagaactacaaaccactgctcaaggaaataaaagaggacacaaacaaatggaagaacattccatgctcatgggtaggaagaatcaatagcgtgaaaatggccatactgcccaaggtaatttacagattcaatgccatccccatcaagctaccaatgactttcttcacagaattggaaaaaagtactttaaagttcatatggaaccaaaaaagagcccgcattgccaagtcaatcctaagccaaaagaacaaagctggaggcatcacactacctgacttcaaactatactacaaggctacagtaaccaaaacagcatggtactggtaccaaagacagagatatagatcaatgggacagaacagagccctcagaaataatgccgcatatctacaactatctgatctttgacaaacctgagaaaaacaagcaatggggaaaggattccctatttaataaatggtgctgggaaaactggctagccatatgtagaaagctgaaactggatcccttccttacaccttatacaaaaatcaattcaagatggattaaagatttaaacgttaaacctaaaaccataaaaaccctagaagaaaacctaggcattaccattcaggacataggcgtgggcaaggacttcatgtccaaaacaccaaaagcaatggcaacaaaagacaaaattgacaaatgggatctaattaaactaaagagcttctgcacagcaaaagaaactaccatcagagtgaacaggcaacctacaacatgggagaaaattttcgcaacctactcttctgacaaagggctaatatccagaatctacaatgaactcaaacaaatttacaagaaaaaaacaaaaaaccccatcaaaaagtgggcaaaggacatgaacagacacttctcaaaagaagacatttatgcagccaaaaaacacatgaagaaatgctcatcatcactggccatcagagaaatgcaaatcaaaaccactatgagatatcatctcacaccagttagaatggcaatcattaaaaagtcaggaaacaacagaaacatggatggagctggaggccattatcctaagcaaactaatgaaggaacagaaaaccaaataccagatgttctcacttgtaagtgggagctaaatgataagaacatatggacacaaagaggggaacaacacaccctggagcctgttggaggagaaggtgaattaagaaaagataatcactcaaccaaaaatgaccagtacgataataggcattttcaactggctgtaggaaatggccttatggctaagaccttcatggtcagtttcttctataaagccagtgcctacgttgtacccacaggagaattgccagatttagatataattcagttaaaacaatttggaaacgcattgtcacatctaacagtaggaacctcagtcactcaaatacaaaatttaaatacaatgggaataattggatcccaagatagcagggaccaactggccacactcaaatgtcaaggtaaaggggacccaaaatatcaatgtgatcctccagttaaagtaggtgctaatggaggtcagataattaatgaagttttagctcaggtccaacttacagtgggtccaaagacaaatggatattggagaatgacagtggattatcataagcttaaccaagatgtgactccaattgtagctgctgtaccagatgtggtttcattgcttgaggttatatcaactcttcaaaaagacttctattgctttttccttctgcaaaatatcacactggtccattatattgatggcattatgctgactgaatccagtgagcaagaagtagcagacacactggacttattgactagtatacgtggactcatggaatgccttatccaccatcatggtatcccacacagcattgcctctgaccaaggccctcactttatggctaaagaattgtgggagtgggctcatgctcatggaattcactggtcttaccatattccccatcatcctgaagcagctggattgatagaatggcggaatgaccttttgaagtcacaattacaacaccaactaggtgacaatgctttgcagggctggggcaaagttctccagaaggccatgtatgctctgaatcagcatccaatatatgttactgtttttcccattgccaggattcataagtcctggaatcaaggggtggaagtagaagtggcatcactcaccatcacccctagtgatccactagcaaaatttttgctttccgttcccacaacattacattctcctggcctagaggtcttagttccagctggaggaatgctgccaccaggagacacaacaatcccattgaactggaagttaatattgccacctggacactttgggctcctcctacctttaagtcaacaggctaagaaggcagttacagtgttggctagggtgattgacccagactatcaggatgaaatcagtctactactccacaatggaggtaaggaagagtatgcatggaattcaggagatccattaggtgtctcttggtattaccatgccctgtcattaaggtcaatgagaactacaacagtgcaatccaggcaggattacaaatggcccagatacctcaggaatgaagatttgggtcatgttaccagggaaaaaaaacacaacctgctgaggtgcttgctgaaggctaagggaatatag

SEQ ID NO: 8679 - DNA, 4555 bp, Homo sapiens
  SIMILAR (936)..(1982): 911254mologous to Homo sapiens putative p150,accession number U93567,Smith-Waterman Score=1597.
atgggcaggaagaacaggaagctggacagccggcagcacagctacacttccccacagagcaggtcccatgaggaccctgcagctgtcctgcaagccctgagctcgtcgggggtggtcatctaccagtctctggtggcagtgcagagccccctggctgccccaggttgtgacggcagccggtgtgaggtcaggggcctgactgtgggcagcaggtatggcagctggaggctggctggatgcagggacaatgagatggtaaatgcctgccaatcagggtggtgctaccagaacctcacagttcttagaggatggaaggtgctgcttgagatgacaccacaccacacctattccaaaattgaccacatacttggaagtaaagctctcctcagcaaatgtaaaagaacagaaattataacaaactatctctcagatcacagtgcaatgaaacgagaactcaggattaagaatctcactcaaaaccgctcaactacatggaaactgaacaacctgctcctgaatgactactgggtacataacgaaatgaaggcagaaataaagatgttctttgaaaccaacgagaacaaagacacaacataccagaatctctgggacatattcaaagcagtgtgtagagggaaatttatagcactaaatgcccacaagagaaagcaggaaagatccaaaactgacaccctaacatcacaattaaaagaactagaaaagcaagagcaaacacattcaaaagctagcagaaggcaagaaataactaagatcagagcagaactgaaggaaatagagacacaaaaaacccttcaaaaaaatcaatgaatccaggagctggttttttgaaaagatcaacaaaattgatagactgctagcaagactaataaagaagaaaatagagaagaatcaaatagatgcaataaaaaatgataaagggaatatcaccaccaatcccacagaaatacaaaactaccatcagagaatactataaacacctctacgcaaataaactagaaaatctagaagaaatggacaaattcctcgacacatacaccctcccaagactaaaccaggaagaagttgaatctctgaatagatcaataacaggctctgaaattgaggcaataattaatagcttaccaaccaaaaaaagtccaggaccagacggattcacagccgaattctaccagaggtacaaggaggagctggtaccattccttctgaaactattccaatcaatagaaaaagagggaatcctccctaactcattttatgagtccagcagcatcctgataccaaagcctggcagagacacaaccaaaaaagagaattttagaccaatatccttgatgaacatcgatgcaaaaatcctcaataaaatactggcaaaccgaatccagcagcacatcaaaaagcttatccaccatggacaagaaggcttcatccctgggatgcaaggctggttcaacatacgcaaatcaataaatgtaatccagcatataaacagaaccaaagacaaaaaccacatgattatctcaatagatgcagaaaaggcctttgacaaaattcaacagcccttcatgctaaaaactctcaatagattaggtattgatgggacatatctgacatatctcaaaataataagagctatttatgacaaacccacagccaatatcatactgaatgggcaaaaactggaagcattcccttttaagactggcacaagacagggatgtcctctctcaccactcctattcaacatagtgttggaagctctggccagggcaatcaggcaagagaaagaaataaagggtattcaattaggaaaagaggatgtcaaattgtccctgtttgcagatgacatgattgtatatttagaaaaccccatcgtctcagcccaaaatctccttaagctgataagcaacttcagcgaagtctcaggatacaaaatcaatgtgcaaaaaatcacaagcattcttatacaccaataacagacaaacagagagccaaatcatgagtgaattcccattcacaattgcttcaaagagaataaaatacctaggaatccaacttacaagggaagtgaaggacctcttcaaggagaactacaaaaccactgctcaaggaaataaaagaggatacaaacaaatggaagaacattccatgctcatggataggaagaatcaatatcacgaaaatggccatactgcccaaggtaatttatagattcaatgccattcccatcaagctaccaatgactttcttcacagaattggaaaaaactactctaaagttcatatggaaccaaaaaagagcccacattgccaagtcaatcctaagccaaaagaacaaagctggaggcatcacgctacctgacttcaaactatactacaaggctacagtaaccaaaacagcatggaatccatatggagccactaccaccatccctgctctcctactgcataacccaacaggccaaagtgcagtgctcacacctgtaatccgagtgctttgcaaggccatagaggaagatcacttgagctcttcaaggaataaagacttgaatgtgaaacccaaagctataaaagccctggaaggcaacctaggcgacaccctcctggacaaaggaagggacaaagatttcattacaaggacaccaaaagcaattgcaacaaaagcaaaaattgacaaatgggatctaattaaacttaagagcttctgcacagcaaaagaaactatcaacagagcatacagacagcctacagaatgggaggaaatatttgtaaactatccatctgacaacggtctaatatccagcatctcagaacaatctgtgctcctgttctatcccatcactggacggtacatggccatcatacatcccctccagccccggctgtcagccacagccaccaaagtggtcatctgtgtcatctgggtcctggctctcctgctggccttcccccagggctactactcaaccacagagaccatgcccagcagagtcgtgtgcatgatcgaatggccagagcatccgaacaagatttatgagaaagtttcatattttggtcagccttcaggtaatcagccagagatgctagcattgtatactgctctctttccacagcctccattagaggagggaattcactggaggatgctccaggtggtacagctacaagatgcagagcctccatcacctaagttcctgactaaggagaaagattctcctggcctgggcgggacttacactggtaaggagtatcggcgagttgaccatagtgtccctcccatcacactcagacccaatcttgctcagtgccctgtagcaatgtctcggcaaagctcagctaacatgttttggtcacaaactattagtctgcatgaggcagggctgttctttcaggactccccattggctgacccctcccagaagccagaaagcaagggagtcctttggtgtggtccatatagcacccacctggatgcagaagaggataaagacagagaggctctggagagggcagtggctgccaatgccttgaaaccgagtggccatcccatagccacgaagtctagtcacttgggcaaatatgtcatgggccgataccatgaccctagtgtttgtaccaaggctcctgtagctattccttttcttttatggacatacagccccttgaagagccacaaggaatctgtttggaatcttcataatgaaaacttggtggagtttctggaggtaaggtccattagagttacggctcccctaaagagagttgactccagaagttccttactctcatgctattccagtcagcctctagtaattgcgcaaacttcccatggacatgtttccctaccaattaaggattatgtgtcttctgctccagggatctatgaggaagaattgcctatgtcatcaataggaagcactgaggactccacaaaactcccggttctcaggtatcaacttgaactaacagatgactacatcattagaattaatcgactgaagatgaaaggaagaataaaagtgatgtttggatgcgccctgcaggcagtcagaccttatggttatctcctttgttccctgaacattgctgttatcctgttctttttcaagctgcccagatttcataacgctcaaacacacatgttttacaaacaatttgtgcaggaagccacttatgcagaacactttcttcatctctgctctaacgagcagcagctgcatccaggcttgatatggaagacagacagaaatagtggaagaccttgcagagaagagctaattgatgagatctctgcttatcccggcataggtgaaggcagaacaggaagagtgtgtaatgacgacatacagctcatcgataccgtccgaatccctgtgggagttcactggccctgcctgacggtacaggctggtgctatatctccacccctccctcgggtagccctatcagatctgccacgccctggccggctcatccactcactgagaacttccagctgcaagtttctgccctcctggggtctttgctttggtggttaa

SEQ ID NO: 8680 - DNA, 4331 bp, Homo sapiens
  SIMILAR (1)..(1155): 981254mologous to Homo sapiens putative p150,accession number U93563,Smith-Waterman Score=1958.
atggtgaagggatcaattcaacaagaggagctaactatcctaaatatttatgcacccaatacaggagcacccagattcataaagcaagtcctgagtgacctacaaagagacttagactcccacacattaataatgggagactttaacaccccactgtcaacattagacagatcaacgagacagaaagtcaacaaggatacccaggaattgaactcagctctgcaccaagcagacctaatagacatcaacagaactctccaccccaaatcaacagagtatacatttttttcagcaccacaccacacctattccaaaattgaccacatagttggaagtaaagctctcctcagcaaatgtaaaagaacagaaattataacaaactatctctcagaccacagtgcaatcaaactagaactcaggattaagaatctcactcaaagccgctcaactccatggaaactgaacaacctgctcctgaatgactactgggtacataacgaaatgaaggcagaaataaagatgttctttgaaaccaacaagaacaaagacaccacataccagaatctctgggacgcattcaaagcagtgtgtagagggaaatttatagcactaaatgcctacaagagaaagcaggaaagatccaaaattgacaccctaacatcacaattaaaagaactagaaaagcaagagcaaacacattcaaaagctagcagaaggcaagaaataacgaaaatcagagcagaactgaaggaaatagagacacaaaaaacccttcaaaaaatcaatgaatccaggagctggttttttgaaaggatcaacaaaattgatagaccgctagcaagactaataaagaaaaaaagagagaagaatcaaatagacacaataaaaaatgataaaggggatatcaccaccgatcccacagaaatacaaactaccatcagagaatactacaaacacctctacgcaaataaactagaaaatctagaagaaatggatacattcctcgacacatacactctcccaagactaaaccaggaagaagttgaatctctgaatagaccaataacaggctctgaaattgtggcaataatcaatagtttaccaaccaaaaagagtccaggaccagatggattcacagccgaattctaccagagagctatctatgacaaacccacagccaatatcatactgaatgggcaaaaactggaagcattccctttgaaaactggcacaagacagggatgccctctctcaccgctcctattcaacatagtgttggaagttctggccagggcaatcaggcaggagaaggaaataaagggtattcaattaggaaaagaggaagtcaaattgtccctgtttgcagatgacatgattgtttatctagaaaaccccatcgtctcagcccaaaatctccttaagctgataagcaacttcagcaaagtctcaggatacaaaatcaatgtacaaaaatcacaagcattcttatacaccaaaaacagacaaacagagagccaactcatgagtgaactcccattcacaattgcttcaaagagaataaaatacctaggaatccaacttacaagggatgtgaaggacctcttcaaggagaactacaaaccactgctcaacgaaataaaagaggacacaaacaaatggaagaacattccatgctcatgggtaggaagaatcaatatcgtgaaaatggccatacttgcccaaggtaatttacagattcaatgccatccccatcaagctaccaatgactttcttcacagaattggaaaaaactactttaaagttcatatggaaccaaaaaagagcccgcatcgccaagtcaatcctaagccaaaagaacaaagctggaggcatcacactacctgacttcaaactatactacaaggctacagtaaccaaaacagcatcggtactggtaccaaaacagagatatagatcaatggaacagaacagagccctcagaaataatgccgcatatctacactattctgatcctttggacaaacctgagaaaaacaagcatgggggaaaggcatccctaatttataaaatggctgctggggaaaactggctagcccatatgtaggaagctgaaactggatcccttccttacacattatacaaaaattaattcaagttggattaaagacttaaacgttagacctaaacccataaaaaccctagaagaaaacctaggcattaccattcaggacataggcatgggcaaggatttcatgtctaaaacaccaaaagcaatggcaacaaaagccaacattgacaaatgggatctaattaaactaaagagcttctgcacagcaaaagaaactaccatcagagtgaaaaggcaacttacaaaatgggagaaaattttcgcaacctactcatctgacaaagggctaatatccagaatctacaatgaactcaaacagatttacaagaaaaaaacaaacaaccccatcaaaaagtgggcaaaggatatgaacagacacttctcaaaagaagacatttatgcagccaaaagacacatgaaaaaatgctcatcatcactggccatcagagaaatgcaaatcaaaaccacaatgagataccatctcacaccagttagaatggcaatcattaaaaagtcaggaaacaacaggagagacagaacagctgaggaaacagcagaacggtggaaaatttttgaaagtgttttgagcccacccaacctgaggagagcattcaaagaaaaacaggaagaagaagtcggcttcagaaggtgggttataacaaactcctccaagctaaaacagcatgttttaacccaatgcaaggaagctaagaaccttgaaaaaaggttagaggaatttctaactagaataaccagtttagagaagaacataaatgacctaatggacctgaaaaacacagcacgagaacttcttgacgcctacacaagtatcaatagccaaattaatcaagcggaagaaaggttatcagagactgaagatcaacttaatcaaataaagcatgaggacaagattagagggaaaaaaatgaaaaggaacaaacaaagcctccaagaaatatgggactatgtgaaaaggccaaatctacgtctgattggtgtagctgaaagtgacagggagaatggagccaagttagaaaacactcttcagtatattatccaggagaacttccccaacctagcaagacaggccaacactcaaattcaggaaacacagagaccaccacaaagatactccttgagaaaagcaaccccaagacacataattgtcagattcaccaaagttgaaatgaaggaaaaaatgttaagactaaaccacgaagaacttgaatccctgaatagaccaataacaggttctgaaattcaggcaattattaatagcctaccaaccaaaaaaagtccagaatcagatggattcacagccaaattctaccagagccaatatcatactgaatgggcaaaaactggaagcattccctttgaaaaccggcacaaaacaggatgccctctctcaccactactattcaacatagtggtggatgttccggctagggcaatcaggcaggagaaagaaataaagggtattcaattaggaaaagaggaagccaaattgtccctgtttgcagatgacatgaatgtatatttaaaaatccccatcgtctcagtccaaaatctccttaagctgataagcaacttcagcaaagtctcaggatacaaaatcaatgtgcaaaaatcacaagcattcctatacactaataacagacaaacagagagccaaatcatgagtgaactcccattcacaattgcttcaaagagaataaaatacctaggaatccaacttacaagggatgtgaaggacctcttcaaggagaactacaaaccactgctcaacgaaataaaagaggacacaaacaaatggaagaacattccatgctcatggataggaagaatcaatatcatgaaaatggccatactgcccaaggtaatttatagattcaatgccatccccatcaagctaccaatgactttcttcacagaattggagaaaactgctttaaagttcatatggaaccaaaaaagagcctgcattgccaagacaatcctaagccaaaagaacaaagctggaggtatcacactacctgacttcaaactgtactacaaggctacagtagccaaaacagcatggtactggtaccaaaacagcatggtactggtaccaaaacagagatatagaccagtggaacagaatagagcccttggaaataataccatacacctacaaccatctgatcttcgaaaaacctga

SEQ ID NO: 8681 - DNA, 2816 bp, Homo sapiens
  SIMILAR (1544)..(2812): 841254mologous to Homo sapiens putative p150,accession number U93574,Smith-Waterman Score=1856.
atggataaattcttcgacacatacaccctcccaagactaaaccaggaagaagttgaatctctgaatagaccaataacaggctctgaaattgaggcaataattaatagtgtaacaaccaaaaaaagtccaggaccagatggattcacagccgaattctaccagaggtacgaggaggagctgaaaaagagggaatcctccctaactcattttatgaggagcatcatcctgataccaaagcccggcagagacataacaaaaaaagagaattttagaccaatatccctgatgaacatcgatgcaaaaatcctcaataaaatactggcaaaccaaatccagcagtacatcaaaaagcttatccaccatgatcaagtgggcttcatccctgggatgcaaggctggttcaacatacgcaaatcaataaaggtaacccagcatataaacagaaccaaagacaaaaaccacatgattatctcaatagatgcagtaaaggcctttgacaaaattcaacagcgcttcatgctaaaaactctcaataaattaggtattgatgggacatatctcaaaataataagagctatctatgacaaacccacagccaatatcatactgaatgggcaaaaactggaagcattccctttgaaaactggcacaagacagggatgccctctctcaccactcctattcaacatagcgttggaagttctgtccagggcaatcaggcaggagaaggaaataaaggatattcaattaggaaaagaggaagtcaaattctccctgtttgcagatgacatgattgtatatctagaaaaccccatcgtctcagcccaaaatctccttaagctgataggcaacttcagcaaagtctcaggatacaaaatcaatgcgcaaaaatcacaagcattcttatacaccaataacagacaaacagagagccaaatcatgagtgaactcccattcacaattgcttcaaagagaataaaatatctaggaatccaacttacaatggacgtgaaggacttcttcaaggagaactacaaaccaatgctcaatgaaataaaagaggatacaaacaaatggaagaacattccatgctcatgggtaggaagaatcaatatcgtgaaaatggccatactgcccaagatccactccagagtgacagttctgctgcgctcagatactgtgctgcatattgtgaagcttgcagtgaaaattcctacaattgtcctgcttctggaggggagccccagggccttgaggaaacacaggcagaagccagggagtggttccagcaggcctcgagtgagacccagtgctgtgctggcatcaggtctgagtcaatgcagtcatagtggtggtggcaacaggggtgcttatgtcactccaccccaagctttagcagaaaaggcctttgacaaaattcaacaacccttcatgctaaaaactctcaataaattaggtattgatgggacatatctcaaaataataagagctatcctatgacaaaaccccacagccaatatcatactgaatcgacaaacacccagaagcattccctttgaaaactggcacaagacagggatgctctctctcaccactcctattcaacatagtgttggaatttctggccagggcaatcaggcaggagaaggaaataaagggcattcaattaggaaaagaggaagtcaaattgtccctgtttgcagatgacatgattgtatatctaggaaaccccatcacctcagcccaaaatatccttaagctgataggtaacttcagcaaagtctcaggatacaaaatcaatgtacaaaaatcacaagcattcttagacaccaataacagacaaacagagagccaaatcatgagtgaattcccattcacaattgcttcaaagagaataaaatacctaggaatccaacttacaagggacctgaaggacctcttcaaggagaactacaaagcactgctcaatgaaataaaagaggatataaacaaatggaaaaacattccatgctcatgggtaggaagaatcaatatcgtgaaaatggccatactgcccaaggtaatttatagattcaatgccatccccatcaagctaccaatgactttcttcacagaattggaaaaaactactttaaagtttatatggaaccaaaaaagtgcccgcatcgccaagtcaatcctaagccaaaagaacaaagctggaggcatcatgctacctgacttcaaactatactacaaggctacagtaaccaaaacagcatggtactggtaccaaaacagagatatagatcaatggaacacaacagagccctcagaaataatgccacacatctataactatctgatctttgacaaacctgagaaaaacaagcaatggggaaaggattccctatttaataaatggtgctgggaaaactggctaaccatatgtagaaagctgaaactggatcccttccttacaccttatacagaaataaattcaaggtggattaaagacttaaatgttagacctaaaaccataaaaactctagaagaaaacctaggaaataccattcaggacataggcatgggcaaggacttcatgtctaaaacaccaaaagcaatggcaacaaaagccaaaattgacgaatgggatctacttaaactaaaagagtttctgcacagcaaaagaaactaccgtcagagtgaacaggcaacctacagaatgggagacaatttttgcaatctactcatctgacaaagggctaatatccagaatctacaatgaactcaaacaaatttacaagaaaaaaacaaccccatcaaaaagtgggtga

SEQ ID NO: 8682 - DNA, 739 bp, Homo sapiens
  SIMILAR (157)..(492): 831254mologous to Homo sapiens Bet1p homolog,accession number AF007551,Smith-Waterman Score=465.
tgaccgcaccggaacggaatgtcccgacccgacccacgcgtccgagttggtgtttcgctgggccctggtactgatagacgcggtccgggtcgcccctagctgtttcctactcacccaaagccccgcacccgccttttctctctctcctctggcaggatgaggcgtgcaggcctgggtgaaggagtacctcctggcaactatgggaactatggctatgctaatagtgggcatagcgcctgtgaagaagaaaatgagaggctcactgaaagtctgagaagcaaagtaactgctataaaatctctttccattgaaataggccatgaagctaaaacccagaataaattattagctgaaatggattcacaatttgattccacaactggatttctaggtaaaactatgggcaaactgaagattttatccagagggaagccaaacaaagctgctgtgctatatgaatgctgttttctttatttgtcttttttatcatttattggattattaaactgaggtgatgcatgtaattgtgaatttggaatttgttccaacttaatggcttgcagtgcagtaccactttgataaaaatcagcatcaaaacattcccagtgttcaaatactgtggcattttccattgaaaattgctgaattttgcttattttataaatcacattagttaatacaggggtctttgaatactgtttcttaatgactcattttagcccctattttcaggggtagg

SEQ ID NO: 8683 - DNA, 3870 bp, Homo sapiens
  SIMILAR (1643)..(2524): 831254mologous to Homo sapiens putative p150,accession number U93569,Smith-Waterman Score=1235.
atgatcctatgtttagaaaaccccatcatctcaactcaaaagctccttaagctgataagcagcatcggcaaagtctcaggatacaaaatcaatgtgcaaaagacacaatcatttctacacaccaacaatagacaagcagagagccaaatcatgtatgaactcccattcacaattgctacaaagaataaaatacctaggaattcagctaacaaggaacatgaaggacctcttcaagaactacaaaccattgctcaaggaaataagagaggacacaaacaaatggaaaagcaatccatgctcttggataggaagaatcgatatcatgaaaatggccctactgcccaagatgcagaaaaggccattgacaaaattcaacaacgcttcatgctaaaagccctcaataaattaggtattgatgggatgtatctcaaaatactaagagctttttatgacaaacccacagccaatatcatactgaatgggcaaaaactggaagcattccctttgaaaactggcacaagacagggatgccctctctcaccactcctattcaacatagtgttggaagttctggccagggcaatcaggcaggagaaggaaataaagggtattcatttaggaaaagaagaagtcaaattgtccctatttgcagatgacatgattgtatgtctagaaaaccccattgtctcagcccaaaatctccttaagctgataggcaacttcagcaaagcctcaggatacaaaatcaatgtgcaaaaatcacaagcattcttatacagcaataacagacaaacagagagccaaatcatgagtgaattcccattcacaattgcttcaaaaagaataaaatacctaggaatccaacttacaagggacgtgaaggacctcttcaaggagaactacaaaccactgctcaatgaaataaaagaagatacaaacaaatggaagaacattccatgctcatgggtaggaagaatcaatattgtgaaaatggccatactgcccaaggcagaggcgcctcaccccagggccaccaccatgacagtcccatgggaagtaccaccaggctacgaccaatgttcccttaaggcccaagaactcttcagtcagcttgtggtgaatgctgccaagactgggactcacccttcagaaacacagattctcattgccacgcagcttcagccacaggatgggaaaggagtggtgtcagcaattcaagactgcctttcctaccctcttcagtgtctctttcagcaacacaaagttaaaaccagtgcaatcaaattggaactcaagattaagaaattcactcaaaaccacaaaactacagggaaattgaacaagctgctcctgagtgactccttggtaaatgatgaaattcaggcagaaatcaagaagttctttgaaactactgagaacaaagagacaatataccagagtctctgtgacacagctaaaacagtgttaagagggaaatttatagcactaaatggccacatcaagaagcttgaaagatctcaaatcaacaccctaacatcacaactaaaagaactagagaaccaggagcaaacaaaccccaaagctagcagaagacaagaaataaccaagatcagagtggaactgaaggagatagagaaacacaaaacccttcaaaaaatcaatgaatccaggagctggttttttgaaacgatcaacaaaattgatagatagatcactagcaagagtaataaagaagaaaggagagaagaatcaaatagacacaataaaaaatgataaaggggatatcaccaccgatcccacagaaatacaaactaccatcagagaatcctataaacacctctatgcaaataaactagaaaatctagaagaaatggataaattcctcgacacatacaccctcccaagactaaaccaggaagaagttgaatctctgaatagaccaataacaggctctgaaattgtggcaatagtcaatagcttaccaaccaaaaagagtccaggaccagatggattcacagccgaattctaccagaggtacaaggaggaactagtacccttccttctgaaactcttgcaatcaatagaaaaagagggaatcctccctcactcattttatgaggccagcatcatcctgataccaaagcctggcagagacacaacaaaaaaagagaattttagaccaatatccttgatgaacattgatgcaaaaatcctcaataaaatactggcaaaccaaatccagcagcacatcaaaaagtttatccaccatgatcaagtgggcttcatccctgggatgcaaggctggttcaatacatgcaaatcaataaatgtaatccagcatataaacagaaccaaagacaaaaaccacatgattatctcaatagatgcagaaaaggcctttgacaaaattcaacaacccttcatgctaaaaactctcaataaattagatattgatgggttggaagttctggccagggcaatcaggcaggagaaggaaataaagggcattcaatcaggaaaagaggaagtcaaattgtccctgtttgcagatgacatgattgcatatctagaaaaccccatcgtctcagcccaaaatctccttaagctgataagcaacttcaacaaagtctcaggatacaaaatcaatgtgcaaaaatcacaagcattcttatgcaccaataacagacaaacagaaagccaaatcatgagtgaactcccatttcacaattgcttccaagagaattaaatacctaggaatccaccttacaagggacgtgaaggacctcttcaaggagaactacaaaccactgctcaatgaaataaaagaggacacaaacaaatggaagaacattccatgctcatgggtaggaagaatcaatatcgtgaaaatggccatactgcccaaggtaatttacagattcaatgccatccccatcaagctaccaatgactttcttcacagaattggaaaaaactactttaaagttcatatggaaccaaaaaagagcccgcattgccaagtcaatcctaagccaaaagaacaaagctggaggcatcacactacctgacttcaaactatactacaaggctacagtaaccaaaacagcctggtactggtaccaaaacagagataatagatcaatggaacagaacagagccctcagaaataacgccgcatatctacaactatctgatatttgacaaacctgacaaaaacaagaaatggggaaaggattccctatttaataaatggtgctgggaaaactggctagtcatatgtataaagctgaaactggatcccttccttacaccttatacaaaaattaattcaagatggattaaagacttaaatgttagacctaaaaccataaaaaccatagaagaaaacctaggcaataccattcaggacataggcatgggcaaggacttcatgtctgaaacactaaaagcaagggcaacaaaagccaaaattgacaaatgggatctaattaaactaaagagcttctgcacagcaaaagaaactaccatcagagtgaacaggcaacctacaaaatgggagaaaatttttgcaatctactcatctgacaaagggttaatacccagaatctacaaagaactcaaacaaatttacaagaaaaaaacaaacagccccatcaaaaagtgggtgaaggatatgaacagacacttctcaaaagaagacatttatgcagccaaaaaacacatgaaaaaatgctcatcatcactggccatcacagaaatgcaaatcaaaaccacaatgagataccatctcacaccagttagaatggcaatcattaaaaagtcaggaaacaacagggacatggatgaaattggaaatcatcattctcagtaa

SEQ ID NO: 8684 - DNA, 6080 bp, Homo sapiens
  SIMILAR (4549)..(5793): 921254mologous to Homo sapiens putative p150,accession number U93572,Smith-Waterman Score=1955.
ccccactgtcaacattagacagatcaacgagacagaaagttaacaaggatatccaggaattgaactcagctctgcaccaagtggacctaatagatatctacagaactctccaccccaaatcaacagaatatacattcttttcagtaccacaccacaactattccaaaattgaccacatagttggaagtaaagcactcctcagcaaatgtaaaagaacagaaattataacaaactgtctctcagactacaatgcaatcaaactagaactcaggactgagaaactcactcaaaaccgctcaactacatggaaactgaacaacccgctcctgaatgactactgggtacataaggaaatgaaggcagaaataaagatgttctttgaaaccaacgagaacaaagacacaacataccagaatctctgggacgcattcaaagcagtgtgtagagggaaatttatagcactaaatgcccacaagagaaagcaggaaagatctaaaattgacaccctaacatcacaattaaaagaactagagaagcaagagcaaacacattcaaaagctactagaaggcaagaaataactaagaccagagcagaactgaagaagatagagacacaaaaaacccttcaaaaaatcaatgaatccaggagctggttttttgaaaagaccaacaaaattgatagactactggcaacactaataaagaagaaaagagagaagaatcaaataggtgcaagaaaaaatgatgaaggggctatcaccaccaatcccacagaaatacaaactactatcagagaatactataaacacctctacacaaataaactagaaaatctagaagaaatggataaattccttgacacatacaccctcccaagaccaaaccaggaagaagttgaattgctgactagtccaataagaggctctgaaattgaggcaataattaatagcttaccaaccaaaaaaaagtccaggaccagatggttacacagccgaattctaccagaggtacaaggaggaactggtaccattccttctgacagggcaatcaggcaggagaaggaaataaaaggcattcaattaggaaaagaggaagtcaaattgtccccgtttgcagatgacatgattgtatatctagaaaaccccatcgtctcagcccaaaatctccttaagctgataagcaacttcagcaaagtctcaggatacaaaatcaatgtgcaaaaatcacaagcattcttatacagcaataaaagacaaacagagaaccaaatcatgagtgaactcccattcacaattgcttcaaagagaataaaatacctaggaatccaacttacaagggatgtgaaggacctcttcaaggagaactacaaaccactgctcaatgaaataaaagaggataaaaacaaatggaagaacattccatgctcacgggtaggaagaatcaatatcgtgaaaatggccatactgcccaaggtaatttatagattcaagtttccattgacaacagatcaagaaaatgtggtcagattaacgagacagaaagttaacaagggtatccaggaattgaactcagctctgccccgagtggacctaatagacatctacagaactctccagcccaaatcaacagaatatacattcttttcagtaccacaccacaactattccaaaattgaccacatagttggaagtaaagcactcctcagcaaatgtaaaagaacagaaattataacaaactgtctctcagaccacagtgcaatcaaactagaactcaggattaagaagcacactcaaaaccgctcaactacatggaaactgaacaacctgctcctgaatgactactgggtacataacaaaatgaaggcagaaataaagatgttctttgaaaccaatgagaacaaagacacaacataccaaaatctctgggacacattcaaagcagtatgtagagggaaatttatagcactaaatgcccacaagagaaagcaggaaagatctaaaattgacaccctaacatcacaattaaaagaactagaaaagcaagagcaaacacattcaaaagctagcagaaggcaacaaataactaagatcagagcagaactgaaggaaatagagacacaaaaaaacccttcaaaaaatcaatgaatccaggagctggttttttgaaaagaacaacaaaattgatagaccactagcaagactaataaagaagaaaagagagaagaatcaaatagatgcaacaaaaaatgataaaggggatatcaccaccgatcctacagaaatacaaactatcatcagagaatactataaacacctctacacaaataaactagaaaatctggaaaaaatgcataaattcctcgacacatacaccctcccaagactaaaccaggaagaagttgaatctctgaatagaccaataataggctctgaaattgaggcaataatcagtatagcataccaaccaaaaaaagtccaggaaccaggtggattcacagccgaattctaccagaggtacaaggaaggagctgtgttggaagttctggccagggcaatcaggcaggagaaggaaataaagggtattcaattaggaaaagaggaagtcaaattgtcccctctttgcagatgacatgattgtatatgtagaaaacccccttccgtctcagcccccatatctccctcaagctgataagcaacttcagcaaactcctcaggatacaaaatcaatgtacaaaaatcacaagcattcttatacaccaataacagacaaacagagagccaaatcatgagtgaactcccattctgttattgcttcaaagagaataaaatacctaggaatccaacttacaagggatgtgaaggacctcctcaaggagaactacaaaccactgctcaatgaaataaaagaggatacaaacaaacggaagaacattccatgctcgtaggtaggaagaatcaatatcgtgaaaatggccatactgcccaaggtaatttacagattcaatgccatccccatcaagctaccaatgactttcttcacagatttggaaaaaaactacttaaaagttcatatggaaccaaaaaaggagcctgcattgccaagtcaatcctaagccaaaagaacagagctggaggcatcacgctatctgacttcaaactgtactacaaggctacagtaaccaaaacagcatggtactggtaccaaaacagcatggtactggtaccaaaacagagatatagatcaatggaacagaacagagccctcagaaataacgccgcatgtctacaactatctgatctttgacaaacctgacaaaaacaagaaatggggaaaggattccctgtttaataaatggtgccgggaaaactggctagccatatgtagaaagctgaaactggatcccttccttacaccttatacaaaaattaattcaagatggattaaagacttaaatgttagacctaaaaccataacaaccctagaagaaaaactaagcaataccattcaggacataggcatgggcaaggattccatgtctaaaacaccaaaagcaatggcaacaaacgtcaaaattcaaaaatgggatctaataaaactaaagagcttctgcacagcaaaagaaactaccatcagagtgaacaggcaacctacaacatgggagaaaattttcgcaacctactcatctgacaaagggctaatatccagaatctacaatgaactcaaacaaatttacaagaaaaaaacaaacaaccccatcaaaaagtgggtgaaggacatgaacagacacttctcaaaagaagacatttatgcagccaaaaaacacatgaaaaaatgctcaccatcactggccatcagagaaatgcaaatcaaaaccacaatgagataccatctcacaccagttagaatggcaatcattaaaaagtcaggaaacaacaggtgctggagaagatgtggagaaataggaacacttttacactgttggcgggactggaaactagttctaccattgtggaagagcctaactccatggctaccaccatcacaggtccacagagagtactgccaaactactgcttatgttctcttaaggctcttcagtcagcttatgactgtgctgagacacacctttcagggcagtgggctccactctggcccaaggcagctttgaagacagtagaggttctcccagaatgcagctggagatctgagaatggacagactgcctccgcaagtgggtccatgacccccaagtatcctaactgggaggcaccccacagtaggggcacactgacacctcacatggccaggtactcctctgagaaaaaacttccagaggaacgttcaggcagcaacatttgctgctcaccagtattaactgttctgcagcctctgctgctgatacccaggcaaacagggtctggagtggaccaaaagcaaactccaacagacctgcagctgagggtcctgactgttagaaggaaaactaacaaacagaagggacatccacaccaaaaccccatctgtatgtcaccatcatcaaagaccaaagaaatacaaactaccatcagagagtactataaacacctctatgcaaataaactagaaaatctagaagaaatggataaattcctcaacacatacaccctcccaagactaaaccaggaagaagttgaatctctgaatggaccaataacaggctctgaaattgaagcaatagttaatagcttaccaaccaaaaaaagtcgaggaccagatggattcacagccgaattctaccagaggtacaaggaggagctagtaccattccttctgaaactattccaatcaatagaaaaagagggaatcctccctaactcattttatgaggccagcatcatcctgatacaaaagcctggcagagacacaacaaaaaaagagaattttaggccaatatccctgatgaacatcgatgctaaaatcctcaataaaacaatggcaaacctaattcagcagcacatcaaaaagtttgtccactatgatcaggtgggcttcatccctgggatgcaagactggttcaaaatacgcaaatcaataaacataatccagcatataaacagaaacaatgacaaaaatcatatgattgtctcaatagatgcagaaaagtcctttgacaaaattcaacaacgcttcatgctaaaaattctcaataaattaggtattgatggcacatatctccaaataataagagctatctatgacaaacccacatccaatatcatactgaatgggcaaaaacaggaagcattccctttgaaaactggcacaagacagggatgccctctctcaccactcctattcaacatagtgttggaagttctggccagggcaatcaggcaggagaaggaaataaatggtattcaattaggaaaagaggaagtcaaattgtccctgtttgcagttgacatgattgtatatctagaaaaccccattgtctcagcccaaaatctccttaagctgataggcaacttcagcaaagtctcaggatacaaaatcaatgtgcaaaaatcacaagcatttttatacaccaataacagacaaacagaaagtcaaatcatgagtgaactcccattcacaattgcttcaaagagaataaaatacctaggaatccaacttacaagggatgtcaaggacctcttcaaggagaactacaaaacactgctcaatgaaataaaagaggatacaaacaaatggaagaacattccatgctcatgggtaggaagaatcaatatcgtgaaaatggccatactgcccaagccatatgtggatggcaaagctgaaagagcactgattgtaacactctttctggggcttcaggggtcatggccccacccccgccagatgctgctgcagatccacatgaagttttgctcctgccagcacccaaaagcactcgccctggttcctgcacctgctcacctgcactccccgtcctgtgatgggtggaaggcagtgggaccaagcaagtggagtccatccctgccagcactgaagcagccagctagttctagcacccctgcactcgagttcctgcctgcaaaggg

SEQ ID NO: 8685 - DNA, 4447 bp, Homo sapiens
  SIMILAR (1082)..(1162): 291254mologous to Homo sapiens putative p150,accession number U93572,Smith-Waterman Score=44.
atgaaggtggaaataaagacattctttgaaaccaatgagaacaaagacacaacataccagaatctctgggacacattcaaagcagtgtgtagagggaaatttatagccctaaatgcccacaagagaaagcaggaaagatctaaaattgacaccctaacatcacaattaaaagaactagaaaagcaagagcaaacacattcaaaagctagcagaagacaaatacaaactaccatcggagaatactataaacacctctacacaaataaactagaaaatctagaagaaatggataaattcctggacacatacacccttccaagactaaaccaggaagaaggtgaatccctgaagagaccaatggcaggttctgaaattgaggcaataattaatagcctaccaaccaaaaacagtccaggaccagacagattcacagctgaattctaccagaggtacaaagaggagctgctgataagcaacttcagcaaagtctcaggatacaaaatcaatgggaaaaaatcacaagcattcctatacatcaataacagacaaacagagagccaaatcatgagtgaactcccattcacaattgcttcaaagagaataaaatacctaggaatccaacttacaagggatgtgaaggacctcttcaaggagaactacaaaccactgctcagcgaaataaaagaggacacaaacaaatggaagaacattccatgctcatggataggaagaaccaatattgtgaaaatggccatactgcccaagaggaaacagccttctgcactcacagccgaagggaaagcagcaggttggggcttcttgtggccaacttcagagcctgtcaccaggaaaggtttagaagagaacgctcagtcccggcaggagtccacgcggaggctcatccttgttgggagaacaggggccgggaagagcgccactgggaacagcatcctgggccagagacggttcttctccaggctgggggccacgtctgtgaccagggcctgcaccacgggcagccgcaggtgggacaagtgccacgtggaagtcgtggacactccggacattttcagctcccaagtgtccaagacagatcctggctgtgaggagagaggtcactgctacctgctctcggcccccggaccccacgcgctgctcctggtgacccagttgggtcggttcaccgcccaggaccagcaggcggtgaggcaggtgagggacatgttcggggaggacgtcctaaaatggatggtcatcgtcttcaccaggaaggaggacctggccgggggctccctgcacgattacgtgagcaacacagagaaccgggccttgcgcgagctggtggccgagtgcgggggccgggtctgtgcctttgataaccgggccaccggccgggagcaggaagcccaggtggagcagctgctggggatggtcgagggcttggtgctggagcacaagggcgcccattactccaacgaggtgtatgagctggcgcaggtgctgcgctgggcaggccctgaggagcggctccggcgggtggcggagcgcgtggcagccaggggagaatggacagaagaaatatttgaaaaggaaatggttaagacttttctaaaagtattgaaggacaccaaactacagatccaagaaacagagagctccaagcagggctcccctttgtcttccacaatgattggaagcctcctgaggccctcaccagaagaagatgccagcactgtgaggccctcaccagaagaagatgccagcactgtgcttcctgcacagcctgcaaactggtgggctccatcacgtgccagacagcttaccagggtcagtcacgagcccagagtcaaaccctgcaagggcttgttctggtcctctttggaccagagtgcctttctgatcctggttagcagaaactttccagaagcagagcctctgagtcatggagctttcagccccagcacatggctcctccttaactgcgtctgctcaacctccctcagccctgtgaacaagcatccccgcacacagacgcagagcaggactctctctgctgccacttcaccttcctgagagaggaccagcggccagagcctcagtgactgccaccctggaggacagggcacaacaaccgtttctggagagaatgggaggattccagaaggggcaaatatggaactatggctgaaggtagatcagaagataactttgtctgcaacaccaccggcattgaggattatcctagtgggcaaaacaggctgcgggaaaagtgccacaagggaacagcatccttggccagcccgtgtttgagtccaagctgagggcccagtcagtgaccaggacgtgccaggtgaaaacaggaacatggaacgggaggaaagtcctggtggttgacacgccctccatctttgagtcacaggctgatacccaagagctgtacaagaacatcggggactgctacctgctctctgccccggggccccacgtcctgcttctggtgatccagctggggcgtttcactgctcaggacacagtggccatcaggaaggtgaaagaggtctttgggacaggggccatgagacatgtggtcatcctcttcacccacaaagaggacttagggggccaggccctggatgactatgtagcaaacacggacaactgcagcctgaaagacctggtgcgggagtgtgagagaaggtactgtgccttcaacaactggggctctgtggaggagcagaggcagcagcaggcagagctcctggctgtgattgagaaggctggggagggagcgagagggctccttccacagcaatgacctcttcttggatgcccagctgctccaaagaactggagctggggcctgccaggaagactacaggcagtaccaggccaaagtggaatggcaggtactgcctgtagtcttcttggcaggccccagccctgcctctctggagcagctgggcatccaggaagaggttattgctgtagaaggagccctctcgctccctccccagcctctcgatcgcagccaggagctctgcctgctgctgcctctgctcctccccggcagcccggttgttgaaggcacagtaccttctctcacattcctgcaccagtgctcgggtagaaaatccacccaggccccacagaagaataacttctcaggcttcgctactatgaaaaacccatacaacccattccagagcaacatgaggaccttgctgtgtgcaaagtttcacacaatgaagcatgcaggcctgggtgaaggaatacctcctgacaactccgggaatgatggctatgctaataatgggtatagtgcccgtgaagaagaaaatgagacactcactgaaaatctgagaagcaaagtaactgctataaaatctttttccattgaaataggccatgaagttaaaacccaaaataaattattagctgtaatggattcacaatttgattctacaactggatttctagtgttggaagttctggccagggcaatcaggcaggagaaagaaataaagggtattcaattaggaaaagaggaagtcaaattgtccctgtttgcagatgacatgattgtacatttagaaaaccccatcgtctcagcccaaaatctctttaagctgataagcaacttcagcaaagtctcaggatacaaaatcaatgtgcaaaaatcacaagcattcttatacaccaataacagacaaacaaaggctgaatacaagaaaaacatagctcccaccttcctccagcccatggagaagctcaggattatgagccgagaaactgtgacatcttccctcgcctccagtctggaccaggtcaacaagtcagtctgccacagtttcatggatgctggtagaagccacaaaaccccgagttatgacaaaaaacaatttattacacacggcaatagcagtggccacggtagcagcatttttgcgtgggttctaggaccccagttcccacagacaatgcaaagaggcattgcaggtgacaccagcacagccggcttctttacaagcctctatgtaaagcacaggctggtgagggccccccaggaaaagcagcaaccgccctcggcacaggccccctactcccaagtcctgtgcaggagcaggtcttgcccagcgcagcagctctgcacctctgtgggcaccgctctgccaagagggaaggtgcaggccctgcagcccatcgccttgggatctgaagaccagccctgtggggctgcttaaggtcatgaaactgggcctcatgggagatttcataaaggcccctaccagctttcctgcccttcagaaatgcttacatctatatatttatgttatatcttcatatataaagaaaatggaaaaagtcaaaatcagtttgctatcatttacaatgaaaggaaggaagactaaggatgtgtttatgtgtgtgtggagacaggaaaagagac

SEQ ID NO: 8686 - DNA, 5656 bp, Homo sapiens
  SIMILAR (3295)..(3813): 801254mologous to Homo sapiens putative p150,accession number U93574,Smith-Waterman Score=727.
atgaggaaaaaacagagcagaaaaactggaaactctaaaaagcagagcacctctcctcctccaaaggaacgcagttcctcaccagcaatggaacaaagctggacggagaatgactttgacgagttgagagaagaaggtttcagacgatcaaactactccaagctacaggaggaaattgaaaccaaaggccaagaagttgaaaacttggaaaaaaatttagacaaatgtataactagaataaccaatatagagaagtgcttaaaggagctgatggagctgaaagccaaggctcgagaactacatgaagaatgcagaagcctcaggagccgatgcgatcaactggaagaaagggtatcagtaatggaagatgaaatgaatgaaatgaagcaagaagggaagtttagagaaaaaagaataaaaagaaatgaacaaagcctccaagaaatatgggactatgtgaaaagaccaaatctacctccgattgatgtacctgaaagtgacagggagaatggaaccaagttggaaaacactctgcaggatgttatccaggagaacttccccaacctagcaaggcaggccaacattcagattcaggaaatacagagaatgccacaaagatactcctcgagaagagcaactccaagacacataattgtcagattcaccaaagttgaaatgaaggaaaaaatgttgagggcagccagagagaaagcattcaagcaggcctcccggagagaagatgacattgccaaggtaaccagtggcatgagagttttattcaagccaggaaccacagaggtacaggagctggccctttgctatggtggaatggccaacagaaccatctcagccctcaagaccactcagaggcagctttccaagctctggaaggaggagctgctgcaggacgtgtgtgcaggactggcagaggagctgcatctgcctcccgatgcccctggtggcatggtggacttccggtgcaccctcaccctcagcttcttcttcaagttctacctgacagtccttcagaagctgggccaagagaacctggaagacaagtgtggtaaactggaccccactttcgccagtgcaactttactgtttcagaaagaccccccagccgatgtccagctcttccaagaggtgcccaagggtcagtctgaggaggacatggtgggccggcccctgccccacctggcagcggacatgcagcctctggtgaggccgtgtactgtgacgacattcctcgctacgagaatgagctgtctctccggctggtcaccagcacccgggcccacgccaagatcaagcatcgagatgaagttcaagaatatgctgtttcctatgattgtctgcccagcctggatccctgagctgaattcggtagaacatggacccgacggtatctcctttggagctgcttgccccctgagcattgtggaaaaaaccctggtggatgctgttgctaagcttcctgcccaaaagacagaggtgttcagaggggtcctggagcagctgcgctggtttgctgggaagcaagtcaagtctgtggcgtccgttggagggaacatcatcactgccagccccatctccgacctcaaccccgtgttcatggccagtggggccaagctgacacttgtgtccagaggtgagctgcctgaagcagaggtccaggaagaaggacttgggggagaaaagtctcaccagataggtcattttctggagaaacagagctcaaagttcagtgacccagctttccctgtgatttggatccagggaagcatggagaatgtacctggtttggtggacgggaaagctggatattttctctgtagagaattcacagcaggaactgctacctgcatgccttacctagtggggcaccaggagaactgtccagatggaccacaccttcttccctggctacagaaagaccctgctgagcccggaggagatactgctctccatagagatcccctacagcagggagaaatacaaactacccatccagagattactacaaacacctctacgccaaataaacttgaaaatcctagaagaaatggataaattccttgacacatacaccctccccaagactaaacccaggaagaagttgaatctctgaatagaccaataacagggctctgaaattgtggcagtaatcaatagcttaccaaccaaaaagagtccaggaccagatggattcacagccaaattctaccagaggtacaaggaggaactgcatataaacagaaccaaagacaaaaaccacatgattatctcaatagatgcagaaaaggcctttgacaaaattcaaccacagccctttcatgctaaaaactctcaaatgaattaggtattgatgggacatattcttcaaaataataagagctatctatgacaaacccaccagccaatatcagacttgaatggggccaaaaactggaagcattcccctttgaaaaactggcacaagaacaggggatgcccctcctcctcaacccactcccccagtccaacatagtggttgggaagttcctggcccagggcaatccaggcaggagaaagaaataaagggtattcaagtagaaaaacaggaagtcaaattgtccctgtttgcagatgacatgattatatgtttagaaaaccccatcggtctcagctcaaaatctcccttaagctgataagcaacgtcagccaaagtctgaggatacaaaatcaatgtgcaaaaatcacaagcattcttatacaccactaacagacagacagagagccaaatcatgagtgaactcccattgacaattgcttcaaagagaataaaatacctaggaatccaacttacaagggatgtgaaggacctcttcaaggagaactacaaaccactgctcaaccgaaataaaagaggacacaaacaaatggaagaacattccatgctcatggataggaagaatcaatattgtgaaaattggccataatgcccaaggtaatttatagattcaatgccatccccatcaagctaccaatgactttcttcacagaattggaaaaaaaaactgctttaaagttcatatggaaccaaaaaaagagcccgcatcgccaaggcaatcctaagccaaaagaacgaagctggaggcatcacactacctgacttcaaactatactacaaggctacagtaaccaaaacaacatgatactggtaccaaaacagagatatagaccaatggaacagaacagaggcctcagaaataatgccacacatctacaacaatctgatctttgacaaacctgagaaaaacaagcaatggggaaaaggattccctatttaataaatggtgctgggaaaactggctagccatatgtagaaagctgaaactggatcccttccttacaccttatacaaaaatgaattcaagatggattaaagacttaaacgttagacctaaaaccataaaaaccctagaagaaaacctaggcattaccattcaggacataggcatgggcaaggacttcatgtctaaaacaccaaaagcaatggcaacaaaagccaaaattgacaaatgggatctaattaaactaaagagcttctgcacagcaaaagaaactaccatcagagtgaacaggcaacctacaaaatgggagaaaatgttcacaacctactcatctgacaaagggctaatattcagaatctacaatgaactcaagcaaatttacaagaaaaaaacaaaaaaaccccatcaaaaagtgggcaaaggatgtgaacagacacttctcaaaagaagacatttatgcagccaaaaaacacatgaaaaaatgctcatcatcactggccatcagagaaatgcaaatcaaaaccacaatgagacaccatctcacaccagttagaatggcaatcattaaaaagtcaggaaacaacagctggaggtcatgcctgcaaccatgggcagcacattcaacaacttaccggcacccaggaaccatggagaaaaaaaccagcagcggggacacccccactgtcttcccatccaccctgggtcgcaagaaaagcacaagtgctcaactaactgaactgacagctcttacacttgagttaagcaagggaaaggtaagaaacgccccttcaaagttagatctaagcccttttgagatgctgtatggatggccttttctcaccaatgatttcttattagaccaagagacctctgaattgggcaagcatgtaaactctctggctcgttttcaacaggaattaactcaagtagcagaagcccaaccccaagaagtaggaccacctttatttaacccaggatatttggtattgcccaagcagggagggccttacaccattctcctttcaatgccctcagcagtaaaagttacaggtattgattcctggatacatcatgctcaagttaaagcctggaaaactgagagagcaatccccggcagcccagcggaatgtcttggataccaatgtgaggaaataagagacctgaagctgaaaatcaaaagagataagaaaatgagcaagggctactcatcctactcagttccagtcatccattcagtcatccagtcatccagtctttgtacaactggtacacagaagtcaagaattgaggtttgggaacctctgcctagatttccgaagatgtatggatatgcctggattcctagacaaaagtttgctgcaggggcagggccctcatggagaacctctgttaaggcagtgcagaagggaaatgtggggtcgaagccccaccacagagaccctactggggcactgcctagtggagctgtgagaagaggaccaccatcctccagacctcagaatggtagatccactggcagcttgcaccgtgtgcctggaaaagccagacctcaacaccagcctgtgaaagcagccaggagggaggccgtgccctacaaagccacaggggtagagctgcccaagaccatgggaacccacctattgcatcagtgtgacctggatctacctgccaccttctctctcagccttcacatcaagtacctcaaacatcgacattcttattccccacatctccacctcctattcaccgtcatgggcccccatgccaggcaaatgattcgcatctctggcatagatgttgacaccaggaacctgtataagctgaatttgaaagtaaagtggctggaggttttggatcaagaggaacctgaatacagtagaacaacctccaggaagaagcagggattccctaacagcgatgaagaagatgtattgtggatggagaagcagctgtcctgcttctgtgacaagtaccaaaaatggataccaaccagacagctgaagggacagctcagttacgttaaggaagcagatctgattccagatgtaatgcccccacaagctttgttccatgatgatgatgagatggaaggcaatggagccatagacgcagggatggagtatgtctacaacattgacacgttgcttagatggtctgatggtgaggaggaaggagaaggaggagaagaaggaagaggaggaggaagaggaggagaaggaggaggaaagagggaggagggagaaggaaaaaaagaagaagaacaaggaggatggggaggaggacaggaagtggaagaagaaggaggaggaggagggggaaattaa

SEQ ID NO: 8687 - DNA, 8551 bp, Homo sapiens
  SIMILAR (7352)..(8479): 901254mologous to Homo sapiens putative p150,accession number U93564,Smith-Waterman Score=1787.
atgacaggatcaaattcacacataacaatattaactttaaatataaatggactaaattctgcaattaaaagacacagacgggcaagttggataaagagtcaagacccatcagtgtgctgtattcaggaaacccatctcacgtgcagagacacacataggctcaaaataaaaggatggaggaagatctaccaagcaaatggaaaacaaaaaaaggcaggggttgcaatcctagtctctgataaaacagactttaaaccaacaaagatcaaaagagacaaagaaggccattacataatggtaaagggatcaattcaacaagaggagctaactatcctaaatatttatgcacccaatacaggagcacccagattcataaagcaagtcctgagtgacctacaaagagacttagactcccacacattaataatgggagactttaacaccccactgtcaacattagacagatcaacgagacagaaagtcaacaaggatacccaggaattgaactcagctctgcaccaagcggacctaatagacatctacagaactctccaccccaaatcaacagaatatacattttttttagcaccacaccacacctattccaaaattgaccacatagttggaagtaaagctctcctcagcaaatgtaaaagaacagaaattataacaaactatctctcagaccacagtgcaatcaaactagaactcaggattaagaatctcactcaaagccgctcaactacatggaaactgaacaacctgctcctgaatgactactgggtacataatgaaatgaaggcagaaataaagatgttctttgaaaccaacgagaacaaagatacaacacacataccagaatctctgggacacattcaaagcagacaacataccagaatctctgggacacattcaaagcagtgtgtagagggaaatttatagcactaaatgcccaaaagagaaagcaggaaagatctaaaattgaaaccctaacatcacaattaaaagaactagaaaagcaagagcaaacaacattcaaaagctagcagaaggcaagaaataactaaaatcagagcagaactgaaggaaattggggacacaaaaaaaccccttcaaaaaattaatgaatcccaggagctgggttttttgaaaggatcaacaaaattgatagaccgcttagcaaggacttaataaagaaaaaaagagagaagaatcaaatagacgcaataaaaaatgataaaggggatatcaccaaccgatcccacagaaatacacactaccatcagagaatactatagaatacacttctacgccaataaactagaaaatgaagaagaaatggataaattcctcgacacgtatgtgtctctcccaagactaaaccaggaagaagttgaatctttgaatagaccaataacaggatctgaaattgtggcaataatcaatagtttaccaaccaaaaagggtccaggaccagatggattcacagccgaattctgccagaggtacaaggaggaactggtaccattccttctgaaactattccaatcaatagaaaaagaaggaatcctccctaactcattttatgagggccagcatcattctgataccaaagccaggcagagacacaacaacaaaaaaagaattttagaccaatatccctgatgaacatcgatgtgaaaatcctcaataaaatactggcaaaccaaatccagcagcacatcaaaaagcttatccactgtgatcaagtaggcttcatccctgggatgcaaggctggttcaacatatacaaatcaataaacgtaatccagcatataaacagaaccaaagacaaaaaccacatgattatctcaatagatgcagaaaaggccttcgacaaaattcaacagctcttcatgctaaaaactctgaatcaactaggtattgatgggacatatatttcaaaataataagaagagctatctataacaaacccacaggccaatatcattactgaatggacaaaaaactggaggcattcccctttggaaaactggcacaaggacagggatgccctctctcaccactcttattcaacatagtgttggaagttctggccagggcaatccgtcaggagaaagaaagaaagggtattcgattaggaaaagaggaagtcaaatttgtccctgttggcagatgacatgatggtatatcttagaaaatcccaatgtctcagccccaaaatcttctttaaggctggttaagcaacttcagcaaaagtcttcaggttacaaaatcaatgtgcaaaaatcaccaagcattcttatatacaccaataatagacagacaaacagagaagccaaatcatgactgatgagtgaactcatgagtgaactcccagttcacaattgcttcaaagagaataaaatacctaggaatccaacttacaagggatgtgaaggacctcttcaaggagaactacaaaccactgctcaaggaaataaaagaggatacaaacaaatggaagaacattccatgctcatgggtaggaggaagaatcaatctcgtgaaaaatggccatactgcccaaggtaatttatagattcaatgccacccccatcaagctaaccaatgactttcttcacagaattggaaaaaaactactttaaaggttcatatggaaccaaacaagagcctggtttcgccaaatcaatcttaagccaaaagaacaaagccagaggcattacgctacctgacttcaaactatactacaaggctacagtaaccaaaacagcatggcactggtaccaaaacagcatggtactggtaccaaaacagagatatagaccaagggaacggaacagaacagagccctcagaaataatgccgcatatctacaactatctgatctttgacaaacctgagaaaaaacaagcaatggggaaaaggattccctatttaataaatggtgctgggaaaactggctagccatatgtagaaagctgaaactggatccctttcttacaccttatacaaaaatcaattcaagatggattaaagacttaaatattagacctaaaaccataaaaaccctagaagaaaacctaggcatttaccattcaggacataggcatgggcaaggacttcatgtccaaaacaccaaaagcaatggcaacaaaggacaaaattgacaaatgggatctaattaaactcaagagcttctgcacatctgcacagcaaaagaaactaccatcagagtgaacaggcaacctacagaatgggagaaaatttttgcaatctactcatctgacaaagggctaatacccagaatctacaatgaactcaaacaaatttacaagaaaaaaatcaaacaaccccatcaaaaagtggacgaaggcacatgaacagacacttctcaaaagaagacatttatgcagccaaaaaacacatgaaaaaatgctcaccatcactggccatcagagaaatgccaatcaaagcctcaatgagataccgtctcacaccagttagaatggcaatcattaaaaagtcaggaaacaacaggagctggtattttgaaaagatcaacaaaattgatagactgctagcaagactaataaagaaaaaaagagagaagaatcaaatagacgcaataaaaaatgataaaggggatatcaccactgatcccacagaaatacaaactaccaccagagaatactataaacacctctatgcaaataaactagaaaatctagaagaaatggataaattcctcgacacatacaacctcccaagactaaagcaggaagaagttgaatctctgaatagaccaataagaggctctgaaattgtggcaataatcaatagcttaccaaccaaaaaaagtccaggaccagatggattcacagccgaattctaccacaggtacaaagaggagctggtaccattgcttctgaaactattccaatcaatagaaaaagaggtaatcctccctaactcattttatgaggccagcatcatcctgataccaaagcctgacagagacacagcaaaaaaagagaattttagaccaatatccttgatgaacatcgatgcaaaaatcctcaataaaatactggcaaaccgaatccagcagcacatcaaaaagcttatccaccatgatcaagtgggcttcatccctgggatgcaaggctggttcaacatacgcaaatcagtaaatgtaatccagcatataaacagaaccaaagacaaaaaccacatgatcatctcaatagatgcagaaaagtcctttgataaaattcaacaacacttcatgctaaaaactctcaataaattaggtattgatgggtcatatctcaaaataataagagctacctatgacaaacccacagccaatatcatactgaatgggcaaaaactggaagcattccctttgaaaactggcacaagacacggatgccccctctcaccactcctattcaacatagtgttggaagttctggccagagcaatcaggcaggagaaggaaataaagggtattcaattaggaaaagaggaagtcaaattgtccctgttcatagatgacatgattgtatatctagaaaaccctaaagcctcatccaaaaagcttccagaactaaacaaagacacaatataccagaatctctgggatgcattcaaagcagtatgtagagggaaatttacagcactaaatgcccacaagagaaagcaggaaagatccaaaattgacaccctaacatcacaattaaaagaactagaaaagcaagagcaaacacattcaaaagctatcagaagacaagaaataactaaaatcagagcagaactgaaggaaatagagacacaaaaaacccttcaaaaaattaatgaatccaggagctggttttttgaaaaagatcaacaaaattgatagaccgctagcaagaataataaagaagaaaagagagaagaatcaaataaacacaatcggaaatgataaaggggatatcaccaatgaccccgcagaaatacaaactaccatcagaaaatactacaaacaactctatgaaaacaaactagaaaatctagaagaaatggataaattcctcaacacatacaccctccaaagaatgaaccaggaagaagttgattccctgaatagaccaacaatgagctctgaaattgaggcaataatcaatagcttaccaaccaaaaagagtctaggagctgatggattcacagctgaattctaccagggcccaaaatctccttaagctgataagcaacttcagcaaagtctcaggatacaaaatcaatgtgcaaaaatcacgggcattcttacacaccaataatagacaaacagagagccaaatcatgagtgaactcccattcacaattgctttaaagagaataaaatacctaggaatccaacttacaagggacgtgaaggacttcttcaaggagaactacaaaccactgctcaatgaaataaaagaggatacaaacaaatggaagaacattccacgctcatgggtaggaagaatcaatattgtgaaaatggccatactgcccaaggtaatttatagattcaatgccatccccatcaagctactaattactttcttcacagaattggaaaaaaactactttaaagttcatatggaaccaaaaaagagcccgcatagccaagtcaatcctaagccaaaagaacaaagctggaggcatcacactacctgacctcaaactataccacaaggttacagtaaccaaaacagcatggtactagtatcaaaacagagatataagatcaatggaacagaacagagccctcagaaataacaccacatatctacaactatctgatctttgacaaacctgagaaaaccaagcaatggggaaaggattccctatttaataaatggtgctgggaaaactggctagccatatgtagaaagctgaaactggatcccttccttacaccttatacaaaaatcaattcaagatggattaaagacttaaacgttagacctaaaaccataaaaaccctagaagaaaacctaggcattaccattcaggacataggcatgggcaaggacttcatgtctttgcccaaacaccagaagcaatggcaacaaaagccaaaattgacaaatgggatctaattaaactaaagagcttctgcacagccaaagaaactaccatcagagtgaacaggcaacctacagaatgggagaaaatttttgcaatctacccatctgacaaaggactaatatccagaatctacaatgaactcaaacaaatttacaagaaaaaaacaaacaaccccatcaaaaagtgggcgaaggacatgaacagacacttctcaaaagaagacatttatgcagccaaaaaacacatgaaaaaatgctcatcatcactggccatcagagaaatgcaaatcaaaaccacagtgagataccatctcacaccagttagaatggcgatcattaaaaagtcaggaaacaacagaccaaaagtagataaaaccacaaagatggggaaaaaacagagcagagaaactggaaactctaaaaagcagagtgcctctcctcctccaaaggaacgctgttcctcaccagcaacggaacaaagctggatggagaatgactttgatgagctgagagaagaatggttcagacgatcaaattactctgagctacaggacgatattcaaaccaaagtcaaagaagttgaaaactttgaaaaaaatttagaagaatgtatagctagaataaccaatacagagaagtgcttaaaggagctgatggagctgaaaaccaggctcaagaactacgtgaagaatgcagaagcctcaggaaccaatgcaatcaactggaagaaaggaactagaaaagcaagagcaaacacattcagagctagcagaaggcaagaaataactaagatcagagcagaactgaaggaaatggagacacaaaaaacccttcaaaaaattaatgaatccaggagctggttttttgaaaagatcgacaaaattgatagaccgctagcaagactaataaagaaaaaaagagagaagaatcaaatagacacaataaaaaatgataaaggggatatcaccaccgatccaaaagaaatacaaactaccatcagagaattctacaaacacctctatgcaaataaactagaaaatctagaagaaatggataaattccttgacacatacactctcccaagactaaaccaggaagaagttgaatctctgaatagagcaataacaggagctgaaattgtggcagtaatcaatagcttaccaaccaaaaagagtccaggaccagatggattcacagccgaattctaccagaggtacaaggaggaactgctgataagcaacttcagcaaagtctcaggatacaaaatcaatgtgcaaaaatcacaagcattcttatacaccaacaacagacaaacagagagccaaatcatgagtgaactcccattcacaattgcttcaaagaaaataaaatacctaggtatccaacttacaagggatgtgaaggatctcttcaaagagaactacaagccactgctcaatgaaataaaagaggatacaaacaaagggaagaacattccatgcctatgtgtagaaggaatcaatatcgtgaaaatggccacactgcccaaggtattttacagattcaatgccattcccatcaagctaccaatgactttcttcacagaattggaaaaaactactttaaagttcatatggaaccaaaaaagagcccacatcaccaagtcaatcctaagccaaaagaacaaagctggaggcatcacattacctgacttcaaactatactacaaggctacagtaaccaaaacagcatggtactgggaccaaaacagagatatagatcaatggaacagaacagagccctcagaaataataccgcatatctacaactatctgatctttgacaaacctgagaaaaacaagcaatggggaaaggattccctatttaataaatggttctgggaaaactggctagccatacgtagaaagctgaaactggatcccttccttacaccttatacaaaaatcaattcaaggtggattaaagacttaagcattagacctaaaactataaaaaccctagaagaaaatctaggcattaccattcaggacataggcatgggcaaggacttcatgtctataacaccaaaagcaatgacaacaaaagccaaaattgacaaatgggatcaaattaaactaaagagcttctgcacagcaaaaaaaaaaaaaactactaacagactgaacaggcaacctgcaaaatgggagaaaattttcacaacctactcatctgacaaagggctaatatccagaatctacaatgaactcaaacaaatttacaagaaaaaaacaaacaaccccatcaaaaagtgggcaaaggacatgaacagacacttctcaaaagaagacatttatgcagccaaaaaaacacatgaaaaaatggtcaccatcactggccatcagagaaatgcaaatcaaaaccacaatgagatatcatctcacaccaattag

SEQ ID NO: 8688 - DNA, 3408 bp, Homo sapiens
  SIMILAR (257)..(1600): 701254mologous to Rattus norvegicus ankyrin repeat-rich membrane-spanning protein,accession number AF313464,Smith-Waterman Score=1469.
cagcgcatctgtggtccccgcatctggcctgcgtccatcgtccaccagtctgctcacctccaggcagccccgttttctagggctgctccggtcccacccagcgctcctggtggctgtgcctggtgactgggacgacttggcagtgtgctgcattgtggctccctctcacgtttgccgcatggtcttcgtcatggacagaactttggggatctctcttccagggcttctcaaaagggaggaagatgcctgctgggtagaggcaaacataaatggccgtgtgttagctcagtgtaacattgatgagctgaagaaagagatgaatatgaattttggagactggcaccttttcagaagcacagtactagaaatgagaaacgcagaaagccacgtggtccctgaagacccacgtttcctcagtgagagcagcagtggcccagccccgcacggtgagcctgctcgccgcgcttcccacaacgagctgcctcacaccgagctctccagccagacgccctacacactcaacttcagcttcgaagagctgaacacgcttggcctggatgaaggtgcccctcgtcacagtaatctaagttggcagtcacaaactcgcagaaccccaagtctttcgagtctcaattcccaggattccagtattgaaatttcaaagcttactgataaggtgcaggccgagtatagagatgcctatagagaatacattgctcagatgtcccagttagaagggggccccgggtctacaaccattagtggcagatcttctccacatagcacatattacatgggtcagagttcatcagggggctctattcattcaaacctagagcaagaaaaggggaaggatagtgaaccaaagcccgatgatgggaggaagtcctttctaatgaagaggggagatgttatcgattattcatcatcaggggtttccaccaacgatgcttcccccctggatcctatcactgaagaagatgaaaaatcagatcagtcaggcagtaagcttctcccaggcaagaaatcttccgaaaggtccagccctgttccaggcgagtttgaagacttaagggaagagggttgcggctgtcaaaacttcccaagtgaggaggatgaatgtggcgcagaagagtcagataacactccacgtgctcaaaggatgacaaagacagaaaacccgaagggaaagtagagagagtgccgaagtctccagaacacagtgttgagccgatcagaaccttcattaaagccaaagagtatttatcgggatgcgctccttgacaataaagggaattcatcggattcatggagtgtagatccacgtgaaagcttctcccaatcacgtctctgcacaatgtaagtgtgcggatgatctcccagacctgaaaaggcataatctcatagagactggaagatgacagtcacagcggaaagcgggggaatcccacatagcctgagtggcctgcaagatccaattatagctcggatgtccatttgttcagaagacaagaaaagcccttcccgaattgcaagcttggattagcccagcagcccttgaagaaaactgggccttgcatgccagaaagcctacaacctggaaccgaactcccagcaccgtgactctgaacaacaatagtgctccagccaacagagccaatcaaaatttcgatgagatggagggaattagggagacttctcaagtcattttgaggcctagttccagtcccaacccaaccactattcagaatgagaatctaaaaagcatgacacataagcgaagccaacgttcaagttacacaaggctctccaaagaatctccggagctccatgcagcaacgctcttctgagagcacaggctttggagaagaaagagaaagcattctttgagaaaaacaagcaaaggagaagagtgttactgtacccttatgacagaattgtcctggattttgactccatccacgcccatcacctttctacattttgctgacagataactaaccgatgatgaggccgaggtaaaagagacatctgcagtgtgacagaagggagcatgagaagcatggctcaccagccaggcctctgtggtctttgtaattagaagcttcagaaactcactaatactactgtacctttcattggcgcattaccccatcaaaactttttgagacgaggtgagatctgagtataaagataggtttttatgtattttaaagggctgaatgtgccaaaaagaaaaaaagctagagaccctttttgcaaacatttggtgaccacacatttgagggaagacgtggcgttaggtgaagcaagaaaccaaaccctgctcttaggggctcacctaggtgagtggcacagcctgtgacgctacagggagaggctgagtaaaccgagatccagcgttctgtatggcaggggtattgcttattcacagaggttctgaaggagtagggaagtacataatgaagagggcttttaaaatttgccaacaaagtgagttcaccggggctgggcagttagtgtgacggggcttgtcctgagctgttaggagagtaaatgcggggagggctggggacctccgtgggtttatatgttcggaaacttttctctccaaatcccagggcctgggctttcccagcaccatccagctgttgccccaaggaagccaccctggtctgttactccaactcttttaaatggtgcccaacttttctaagtgagcttagcaatgagaacgaaaaaaaaacatgaattctttttctggaaaatcagggagacatgggtaataataggtactaataaatatttataagatgagtgaatgaggaaataattacatcaaaaaaggtcagtgacaattgataaatgacaaggaaatatttaattagggtaaaactaaatcattgctctctatactagggatagacttttatctactttcatctggttcctaaggtcaggcatggttagttctgggggaagggatcataaggaaagggaaatacttttttaaaaaaaaatttggaaacatgtaacaaagcaagggtaaaatatatatatatatctatataagtgctgtgactgtaaaagtgtactttccattaattattagcccgagttaagagaatggtcacattgaagtactgtgtggactagaaatgtaccctgtcatcatgcaatgaaatattgttatcgttttaacatagctccatttatgtaggaatgaattctggtggtttaccccaagtcacagttagggacggtagatgggtgaggtccgcaggtgcgcttatttatcctaggattccagtgttacattttccgatgtttatcacttcagtgggtttttattaatatgctgattaagttatttactgggccagtcattgtgctaaatagttgctcctt

SEQ ID NO: 8689 - DNA, 507 bp, Homo sapiens
  SIMILAR (12)..(182): 1001254mologous to Homo sapiens dipeptidyl-peptidase III,accession number AJ271216,Smith-Waterman Score=289.
gaaggtaatgaggctcagacgtgcagcttctggaatacgaggcgtcagctgctggcctcatccgatccttctctgagcgtttcccagaggatggacccgagttggaggagatcctcacacagctggccacagccgatgcccgattctggaagggccccagtgaggccccatctggccaagcttgaggaagatgtgtggccttgcccccaattccatcagaccaaggctgcaagtggccctccattcgtcactttccagcctgccaattgcttcccctctgtgatctcatttcatctgcactgccatacgtggagtgagcaagacagggcttaccatcctgtctaccagatgaggaaatggcagttctgagaagtcactggtctagatcccgcaggtggcacatgacagctagggttcaaaacgttctcaccaaatccaatgctcctcacatattaattttataaccagacaaataaatttttggggcaacccccctcaaaaaaaaaa

SEQ ID NO: 8690 - DNA, 2129 bp, Homo sapiens
  SIMILAR (174)..(1682): 741254mologous to Homo sapiens dipeptidylpeptidase III,accession number BC001446,Smith-Waterman Score=1770.
ccaggactttctggactcacagaacctcagtgcctacaacacccggctcttcaaagaggtcgatggagaagggaagccctactacgaggtgcggctggcttctgtgcttggctcagagccttccctggactctgaggtgacttccaagctgaagagctatgaattccggggaagcccctttccaggtgacccggggggactacgcgcccatcctccagaaggtggtggagcagctggagaaagccaaggcctattgcagccaacaagccaccaggggcagatgcttggcccagtatatagagagcttcacccagggctccatcgaggcccacaagaggggctcccgcttctggatccaggacaaaggccccatcgtggagagttacatcgggttcatcgagagctaccgcgacccctttggttcccgaggagaatttgaaggtttcgtagctgtggtgaacaaggccatgagtgccaagtttgagcggctggtggcgagcgcagagcagctgctgaaggagctgccctggcccccaacctttgagaaggacaagttcctcacccctgacttcacctccctggatgttctcaccttcgctggctccggcatccctgccggcatcaacatccccaactacgatgatctgaaggcagacggaaggctttaaagaacgtgttcgctgggggaattgtgctgggctgtggcctaacgccacgcaagcgggagaaagcttacctttctggaggaggatgacaaggacctgtacatcctctggaaggggccctccttcgatgtgcaggtgggcctgcacgaagcttgctgggccatggcagtggcaagctctttcgtacaggacgaaaaaggagcattcaactttgaaccaggaaacaagggatccaccccaaaaacggggcgagcagattcaaagctggaatcggaccggggaaacctgggaatagcaagttcagcaccatcgcctccagctacgaagcagtgccgggctgagagcgtgggtctctacctctgtctccacccgcaagtgctggagatctttggctttgagggggctgatgcggaggacgtgatctacgtgaactggctcaacatggttcgggccgggctgctcgctctggagttctacacacctgaggccttcaactggcgacaggcccatatgcaggcccggtttgtgatcctgagagtcttgctggaggctggcgagggactcgttaccatcactcccaccacaggctccgatgggcgcccagatgcccgggtccgcctcgaccgcagcaagatccggtctgtgggcaagcctgctctagagcgcttcctgcggagacttcaggtgctgaagtccacaggggaatgtgacggaaggacgggccttgtacgaggggtatatcaacggtcactgatgcgccccccgagatgcttcctcaccctcaggggacacggtgctgctgcgtaaggaatctcggaagctcagtgtacagcccaacactcaccttgaaggtaatgaggctcagacgtgcagcttctggaatacgaggcgtcacgtgctggcctcatccgatccttctctgagcgtttcccagaggatggacccgagttggaggagatcttcacacaggctggccacagccgatgcccgattctggaaaggcccccagtgaggcccccattctggcccaagcttgaggaagattgttgttgccttgccccccaaattccatcagaccaaggctgcaaagtggcccctcccattcggtgtgtgtatttaggggctggggagggggaggggcaggagcttggaccttggtacttacctcagcttgaggggtggtgacacaacccccttccaatttgtcagcacgtttccagcctgccaaattgcttcccctctgtgatcctcatttcatctgcactgcccatacgtggagtgagcaagacagggcttaccatcctgtctaccaagatgaggaaatggcagttctgagaagtcactggtctagatcccgcaggtggcacgtgacagctagggttcaaaacgttctcaccaaatccaatgctcctcacatattaattttataacccagacaaataaatattagagacaaccaccatc

SEQ ID NO: 8691 - DNA, 522 bp, Homo sapiens; identical to SEQ ID NO: 638
  SIMILAR (337)..(468): 461254mologous to Human T-cell lymphotropic virus type 1 Gag,accession number S74562,Smith-Waterman Score=136.

SEQ ID NO: 8692 - DNA, 864 bp, Homo sapiens; identical to SEQ ID NO: 1393
  SIMILAR (151)..(783): 791254mologous to Cloning vector pZC320 SopA,accession number U26464,Smith-Waterman Score=871.

SEQ ID NO: 8693 - DNA, 471 bp, Homo sapiens; identical to SEQ ID NO: 1394
  SIMILAR (277)..(417): 471254mologous to Human T-cell lymphotropic virus type 1 Gag,accession number S74562,Smith-Waterman Score=146.

SEQ ID NO: 8694 - DNA, 687 bp, Homo sapiens
  SIMILAR (345)..(509): 551254mologous to Bovine leukemia virus gag,accession number K02120,Smith-Waterman Score=195.
gttgttgtggctccattgggccttcaggggtcaaatctgctatagagtctgaccattgtgcttttcccagccattccttagctttagcttctgagaccaacatgtggactagctgataaaagtctgaatgacctggggcacggtcccccttttccacatcttccagatgagatgttgccattggagctgtcagggaatcatgagggggtggggtctttgcagtcagactctgaactgccttctgttgagcaagtgttagacatgcagtagaggcggcggacagatctggtccaggaagttcagattggtcagggtagagtaggggtgtagggaacttcaaaacacctgaactgcagcagccaggcgttcctccaggactgccacccccaggatcttgcttcaagtgccggaaatctggccactgggccaaggaatgcccgcagcccgggattcctcctaagccatgtcccatctgtgcgggaccccactggaaattggactgtccaactcgcctggcagccactcccagatcccctggaactctggcccaaggctctctgactgactccttcccagatattcgtggcttagcagttgaagactgacactgcctaatcgcctcggaaacctcctggaccatcacagacactttgggtaactcttacagtggagggtaagtccgtcccc

SEQ ID NO: 8695 - DNA, 615 bp, Homo sapiens; identical to SEQ ID NO: 8284
  SIMILAR (370)..(570): 471254mologous to Human T-cell lymphotropic virus type 1 Gag,accession number S74562,Smith-Waterman Score=188.

SEQ ID NO: 8696 - DNA, 1767 bp, Homo sapiens; identical to SEQ ID NO: 599
  SIMILAR (728)..(684): 661254mologous to Homo sapiens Human secreted protein sequence SEQ ID NO:103,accession number Y87064,Smith-Waterman Score =57.

SEQ ID NO: 8697 - DNA, 438 bp, Homo sapiens
  SIMILAR (65)..(157): 901254mologous to Human endogenous retrovirus tripartite fusion transcript PLA2L,accession number Z14310,Smith-Waterman Score=156.
atgtgcatgaaatttggtgccgtgactcggatcgggggacctcccttgggagatcaatcccctgtcctcctgttctttgctccatgagaaagatccacctacaacctcaggtcctcagactgaccggcccaaggaacatctcatcaattttaaatcaggagcttgctacacgtgccggaaatctggccactaggccaaggaatgcctgcagcctgggattcctattaagccgcatctcatctgtgtgggaccccactgaaaatcggactgttcaactcacctggcagccactcccagagcccctggaactctggcccaaggctctctgactgactccttcccagatcttctcggctcagcagctgaagactgacactgcttgattgcctgggaagcctataggaccatcacagacactttggataactcttacagtgg

SEQ ID NO: 8698 - DNA, 1500 bp, Homo sapiens; identical to SEQ ID NO: 7943
  SIMILAR (1240)..(1497): 861254mologous to Homo sapiens ribosomal protein L19,accession number X63527,Smith-Waterman Score=364.

SEQ ID NO: 8699 - DNA, 693 bp, Homo sapiens
  SIMILAR (600)..(692): 641254mologous to Drosophila melanogaster ribosomal protein L19,accession number X74776,Smith-Waterman Score=102.
gccgtggaattccacaaaaaagtcatggtttaggaagtaattcatgcagcaataggagaaaagaaaggaagctacaagcttagtgaccttgggtggaggaacagctcacaaggcagcctctgatccatcaccaaccagcatctcttcactccgtgtaccctgcaggtatcacagcctgtacctgaaggtgaaggggaatgtgttcaaaaacaagcggattctcatggaacacatccacaagctgaaggcagacaaggcccgcaagaagctcctggcgtaagtttcttttcagagtcttaggggaacattcttagacctttgagagttgttcttagatacttaaaatgtgccaatgcctaagtcttgacttgcacgtagtctgtcttaggaatacagctgttcccttagaggcacccactcctctgtcctgtacacacccactcttcctgtctcgtagggactagaggttagttgaagcaggagcctttggtgggcccagcaactcattccagaagctgactaggctcaaagggagaggtctggggatgtgcttctgtctccctagcatctcatctcttcccaaactgacccgtcttttctcttccctgaccagagaccaggctgaggcccgcaggtctaagaccaaggaagcacgcaagcgccgtgaagagcgcctccaggccaagaaggagg

SEQ ID NO: 8700 - DNA, 879 bp, Homo sapiens
  SIMILAR (239)..(724): 351254mologous to Homo sapiens Human secreted protein, SEQ ID NO: 7925,accession number G03844,Smith-Waterman Score=111.
  misc_feature (1)...(879): n = a,t,c or g
gctttcctgctacaagaattatgtttaaaaagctccacaggggagctctttcctttcgctgctgtggctgcagccttgagtatgctcaggcttcagaagaggcttgcctctagtgtcctctgctgtggcaagaagaatatctggttagaccccaatgagaccaatgaaatcaccaatgccaactcccgtcagcagatccggaagctgatcaaagatgggctgatcatccgcaagccttgtgacggtccattcccggcttcgttgccggaaaaacacctttggcccggcgnaaagggcaggcacatgggcataggtaagcggaaggtaccagccaatgccccgaatgcccagagaaggtcacattggatgagggagaatgagggattttgccgccggcttgcttcagaagatacccgtgaatcctaagaagatcgatcgcccacatgtagtcacagccttgtacctggtaggtgaaggggaatgtgttcaaaaacaagcggattcttcatggaacacatccacaagctgaaggcagaacaaggcccgcaagaagctccctggctgacctaggctgaggcccgcaggtctaagaccaaggaagctaccaagcgccgtgaagagcgcctccctccaggccaagaaagagggagatcatctagactttatccaaggaggaagagaccaagaaataaaaccttcccattttgtctgtacattactgccctctgttgattacataggttcagccctaaaataaaacaagccttaatctgcaaaaaaaaaaaaaaaagtcggcgcggccgcaaatttgtaggggtagttgcgcccgggatttggtgcgggggttgcggggtgggagaaggttgtccccagggggga

SEQ ID NO: 8701 - DNA, 266 bp, Homo sapiens
  SIMILAR (6)..(116): 431254mologous to Mycoplasma pneumoniae similar to single stranded RNA(DNA) processing enzymes,accession number AE000054,Smith-Waterman Score=77.
gcagatcggcaggtcaagaaataatagacacacacaagataatgaaagctgggtccaggggggtcatcgccttctggtactgtgatgccgccaatgcactggatataccagcatttattattaagtttataacagttgcagcaaaagctggttacaaacaatccatagaaacaggacgtgaagctagacaacctgttagaccagaaattctcagaaaggagtatgccttaaccctaaagaggcctagaagagccgtggcaagatga

SEQ ID NO: 8702 - DNA, 447 bp, Homo sapiens
  SIMILAR (444)..(4): 361254mologous to Xenopus laevis alpha-1 type II' collagen,accession number M63596,Smith-Waterman Score=118.
gtagcctgcgacggaactcccgggtctaccgacgcgtccggggatgctttgtatctggagaggcgctcctgattggcctgaggggccccccagctccggggagttgtcctccattcagcccactcaagggttgcacaactgcttccagccggacggagctcggccggctgcgccggggcctgtcccaggtcagctcggtgcccttccttggagctgccggccaccagcagagcctaccctcttcatggaaagcctcgtgcagtggccccctggtgatggcatccgacagtgatgtgaagatgctgctgaacttcgtgaacctggcgtccagcgacatcaaggcagccctggataagtccgcaccctgccgccgctccgtggaccatcgcaagtacctgcagaagcagctcaagcgcttctcccagaagtattcccggctcccgcggg

SEQ ID NO: 8703 - DNA, 1245 bp, Homo sapiens
  SIMILAR (814)..(1029): 521254mologous to Homo sapiens Gag protein,accession number AF164612,Smith-Waterman Score=232.
atgccgaacatatacaccatggaatactatgcagccgtaaaaaaggatgagttcatgtcctttgtagggacatggatgaagctggaaaccatcattctcagcaaactatcacaaggacagaaaaccaaacaccgcatgttctcactcatagggacacggatgaagctggaaaccatcattctcagcaaactattgcaaggacaaaaaaaccaaacaccgtatattctcactcatagaatcagttttgaggatgtgaggaattacatgccactggcagtaattcactcagatgagagtccaattcttcctctccatgaacagcaagatgccagtgagaatggatggattaaggatacagagagggatgcggatttggagatatatattgtgtctggaattggttcctttcggtgggttcttggtctcgctgacttcaagagtgaagccgcagacccttgcggaatgaagctgcagaccttcgcagtgagtgttacagctcttaaaggtggcgcatccagagttgttcattcctcctggtgggtttgtgttctcactgacttcaggagtgaagctgcatacctgagcgttacagctcttgaaggtggcgcatccagagttgctcattcctcccggttcgtggtctcactgacttcaggagtgaagctgcagaccttcaccgtgaatgctacagctcataaaggtagtgcggacccaaagagtgagcagcatcaagatttattgcaaagagcgaaaaaacacaccttccacagcatgaaaggggaaccaaggcgtgttgttgctgctggctgggggggtgcaatcaaggctgattccaataaccttattctcttatttcagactattgaaaaatattgtccttggttccctgacaaaggttctgtggacctgttagactgggatagagttggcaccactctctgccaactcatgagagatggtgttttacttcctatttctgtttggactgactgggctcttattcgtgttgctttacttccttttcagtctggtgatactcttcaactgccacaagttaacgcggatgttgaaccactccctttacctcggtgcattggcggcatcacgggaccagaaggcggtgacccccctggacccagctttcactatcttgtgggtgtctattatttcttgacctgccgatccacctgggaacaaagaaagagccccgttgcattgcgggctgctggccagatcccgcaataa

SEQ ID NO: 8704 - DNA, 570 bp, Homo sapiens
  SIMILAR (127)..(2): 461254mologous to Homo sapiens pot. ORF III,accession number X03145,Smith-Waterman Score=78.
tttttttttttttttttgctcttgccaggatttccagcactatgttgaataaaggtggtaaaggtgagcatttctatcttgtttcagatcttagagaacataccttattgcgggatctggccagtagcctgcaatgcaacggggctctctctttgttcccaggcggatcggcaggttgagaaataatagacacacacaagatagtgaaagctgggtccggggcgggtcactgccttctggtcctggggtgccaacaatgcactgaatataccagcatttattattaagtttagtgagggcaggggtaggttagtgagggatttatggtcatttgattatgaggtgagatggtcacgtggggatgaagtaatgctttaacataacatttgtatgcagaagtacagtatacagggataagaatttacaatatagtgtgtgcatcagtaatttctaacagagccttaaaacagaaacacattctttccataacctatgattagcaagatattaatcagcagtaacagttgcagcaaaagctggttgcaaacaatccatagaaacaggacgtga

SEQ ID NO: 8705 - DNA, 3673 bp, Homo sapiens
  SIMILAR (601)..(1023): 321254mologous to Herpesvirus papio NTR,accession number AF200364,Smith-Waterman Score=95.
ctagaggtagccaaagacattgaagatgggtgggggcacggctggcttggtggggatgggtttcagcaccacgggcctgcacaccttctgccccaggccgtccacatccttgcagaggtgcgccagctccccgggaaaggctgggctcttcctccaaaggcccaggctggggacaggactctgaggcagtgcccccagggggcccggatagatgggctgtccatggtactggaaggggcagcaactccaggcattgacgcggcccaccaaggagaccccaggcatcttgagcggctccttttcagccagggcccttggagacatggacaccagggtagtctcaggtcccaggggctccaagcccttgcaatttttcttaccctcatagggaggtccctccctggggcccagtcccccctccagccccacatggtagctgtgggtgggccttggctcttcccagaaggaagcgggcagctgtcttttcctcatgggcacctggccaggctgggcagcttctggatgctgcctctgtgggagctgctccttagcaagacattcctccctgtaggggttcctcagcaccttctccttgcagcccccaccccccgccggggctggaatcagggcccaaatccaggagcagcctcctgggccggtcctcagacccccttttcaggtagggctcagcagctctgccaggaaggccccgcgggagccgggaatacttctgggagaagcgcttgagctgcttctgcaggtacttgcgatggtccacggagcggcggcagggtgcggacttatccagggctgccttgatgtcgctggacgccaggttcacgaagttcagcagcatcttcacatcactgtcggatgccatcaccagggggccactgcacgaggctttccatgaagagggtaggctctgctggtggccggcagctccaaggaagggcaccgagctgaccagctcggggaacataacaaaggccacgcggaggacagagtggcctggcagcgcctcttgagtcaaggcactgagacggagagtgttaggcattttggagagcggagacagtgagaagctcagtgcagcggcgaagagagttcgcgacagggctatcgggtccttcttcgtaaccccgctggagtacctgctcagtgccgggtcatctcctggaggtggggatgtggcaggaccccaggaaggccccagatcattccactgcctcccctcctgcctgtgagtgcgtccatcacatcctgaaggtgatgccgcctccttgaggggctcttcacaagtgaaggatgcacgaagaaggtcgtccagggccatgtggagggtggggtttggttgaagctgggaaccagtgcagggttgccgcaggaatctggcgagatggggcagagcatggaactgcctgcagttcccagagtagccaccaggtggcccaggccttgccgactctggcttcataatccaaacagcccggctcaacttccagggctgggcctctgtctctttctccataaagcggccaggacgagccattctgaggccttgtccaacttctgagttcttattgccagaatcatttgtctctggaaattgcagcagcaccgagagggccatgtggcctttctgggctcctcccagatcagccccaggagctgagaattttccttgtgcttctgtgccttgtaagctgtaaacacgctgcaccacgaggtcccgctgtccatcatcgggtgtgtgagttgatatctgccttcttgagtccaggaggttgaggctgccatgagccatgttcacgatgccactgcactccagcttgggtgacacagcaagaccctggcatgggcttaggtctggtttataatttgttatcttattgccacaacgagtccattctgtcagtcttttggtctctgtgttaacattcatgctggtcagttgttgtgtcaccaccagcagcagcaaaaactcagcacttcgacatgtgctgacagcaagattcagagggaaacagataccaggggtactcatgaggccattatctcccatgttcccggtaaacacgggacattccttcggcaccggcatgacattctgcttggccaactctgaccataactcacagctgagctgtgctctgctctgcatgtcaccccatgagccactcacactcagcatcctacccagcggacgcttggcataaccatctgcagccctgggtccatggacaacttcatggagcagaaccacctgcccatcctggattgtcactttacagaaggctggaggtttattctccaaagaggatgaaatagaaggttgtaggactggggacaccagggagaacacgaggacaaattcggtaaaatttgcatagtgaaggtagagatccctggattttatgcctgcctggctccgagcatcctggccactagcattaaccttttccaggtaagggatagggaatctgagaagagtggaaacatcatctttagatgccagcacacctcgactctgcaccagctctgccacgtagcagctgtgtgtccttgaataacgcagaagctctctgagcctcagtctttccttctgtaaaatggtcagagaacactggaatctgggtggacttgccatggctttaatcccatccagtagggcagaagtgacatcatgtaattttggaggctggctcagagaaggccatgcatctttcactgtttgctctgggacccctgagccatcattatttgccaaaataccctgaagcccgaagtcacagtgctggtgaggccatgtggtgataccacatggaggccctgagaccattttcactctctgcgccccctctcttatccgcatcccgtctgccttgtagggaacgtgcagaaggctgtggcgtgtgcttagtgcgttcttcacctcagtggcataggaatggtattcaagaaggaaatcgcatataaggaggattcgattgtagagggcaggaggcccaggcgggaggttgcggccgtggtccaggcgaaggatgaggaccagagtgatgctggcggagaggggacagcagtcatcccaggcacacactgcatgctggaggggaggtccatggctcctcctatccctgccctcactaaacttaataataaatgctggcatatacagtgcattggcggcattgcaggaccagaaggcggtgacccccctggacccagctttcactatcttgtgtgtgtctattatttctcgacctgccaatccgcctggagggtcttcggatgttgtaattgcttgttcacggctatctctgagcagagaatctcccacaaatcccagacgaccagatgtatttgtcagctcaggctgagttctggaggctgagcgttctagatcaaggttcagcagggccagtttctggtaaggattctcctgctggcttgtggacagccgctttgtcctcacatggcttttcctctgggtacccagagagagggagagagctctggtctctcttcctcttcttagagggacaacaatcctttcagaggattcaaggagattggggtccagattttcaggtttgtttacccgaaagtttccattccaggtcaccagctccaatcctttctttattagagctctgacttggacataagacat

SEQ ID NO: 8706 - DNA, 448 bp, Homo sapiens
  SIMILAR (1)..(405): 891254mologous to Escherichia coli phosphatidylserine decarboxylase,accession number J03916,Smith-Waterman Score=612.
cttacccatctcacggctcagaacgtgccgaatctgtttgcccgtaacgaacgcgtgatttgccttttcgataccgaatttggcccaatggcgcagattctggtcggagcgacgattgttggcagcattgagacggtctgggcgggcaccattacgccgccgcgcgaaggtatcatcaagcgctggacctggcctgccggggaaaacgacggttctgtggcactgctgaaaggccaggaaatgggtcgctttaaactcggttccaccgttatcaacctgtttgcaccgggtaaagtgaatctggttgagcaactggaaagcctgtctgtcacgaaaattggccagccgctggcagtatctatgtaatccaaggcgacacagttgggtaaccccagggtttttccagtctaaacgatgtacgggtacggacatggaatccgtaatgatg

SEQ ID NO: 8707 - DNA, 1569 bp, Homo sapiens
  SIMILAR (850)..(1347): 971254mologous to Escherichia coli phosphatidylserine decarboxylase,accession number J03916,Smith-Waterman Score=839.
atgacgtttgttaacgcccaggccgaagacagccaaatctttttatataagcgccgctatgttccggtagaaggctatgcaccgtggctggtttctggcaatgccagcgaactggaacgcattcattatgaaggcatggacgatgttattctgctggattttctgcccaaagagttaggctttgatatgaacatgcatatcctctcttttgcaccaggtgccaaccacggttatatcgaacacacgttcaaggaacacggaggagcgactcaagccttcgcgaaagaaaataaccataaagcatacaaagatacgtacggcgtctctcatattacacgccatgatatgctgcagatccctaaacagcagcaatacgaaaaataccaagatacccacgatacgccatattgtgaaccgctgccgggcgaaacgcgcctgtggggcgacaccgatgtgattggtctgttcgacgctgaaaccgatatgaacgacgtggtggcgattctggaaaaccatccgctgctcggcgcaggcttcgcgcataaaatcgaacaactagaagataaagactgggagcgcgaatggatggataatttccacccgatgcgctttggtgaacgactgtggatctgccctagctggcgtgatgtgccggacgaaaacgccgtcaacgtgatgttagatccagggctggcgtttggtacgggtaccatccaaacactctctgtgcctgcaatgctcgacagctcgacgcatacccgacgaatgcgttctacgctgaatctctacgaaatcacgagaatgagcactgtgtccacatctgagcatagtatgacgtatactctcgttcaggtcgacatgaaagaggcgcaaaagccggacaccgccagctaccgcacctttaacgaattctttgtccgtccgctgcgtgacgaagtacgcccaatcgataccgatccgaatgtactggtcatgcctgccgatggcgttatcagccagttgggtaaaatcgaagaagataaaatcctgcaagccaaaggccacaactacagcctcgaagccctgctggcaggcaactatctgatggcggacctgttccgcaacggtacgtttgtgaccacttacctctccccgcgtgactaccaccgcgtacacatgccgtgcaacggtattctgcgtgagatgatctacgtgccgggcgatctcttctccgttaaccatctcacggctcagaacgtgccgaatctgtttgcccgtaacgaacgcgtgatttgcctttctgataccgaatttggcccaatggcgcagattctggtcggagcgacgaatggtggcagcattgagacgccagaaagtgagggagccacggttgatgagagctttgttgtaggtggaccagttggtgattttgaacttttgctttgccacggaacggtctgcgttgtcgggaagatgcgtgatctgatccttcaactcagcaaaagttcgatttattcaacaaagccgccgtcccgtcaagtcagcgtaatgctctgccagtgttacaaccaattaaccaattctgattag

SEQ ID NO: 8708 - DNA, 822 bp, Homo sapiens
  SIMILAR (207)..(299): 611254mologous to Escherichia coli phosphatidylserine decarboxylase,accession number J03916,Smith-Waterman Score=81.
tcaaaactttaaagaaatctttgtccgtccgctgcgtgacgaatacgcccaatcgataacgatccgaatgtactggtcatgcctgccgatggggttatcagccagttgggtaaaatcgaagaagataaaatcgtgtcgaatctgtttgcccgtgacgaacgcgtgatttgccttttcgataccgaattttggcccaatgcgcagatctggtcggagcgacgattgtttgcagcattgagacggtctgggcgggcaccatacgccgccgcgcgaaggtatcatcaagcgctgggacctggcgaggccattgaggaagacagttggcagaatttgggcagggtcgcagggtgaaataagcttccaactgaactgtgtaataattttgactgggcgcaaactctgtcgagcagaaatcgggggtgaaagtgaactgtagtgctcgcgtgtgatgtattgacgtgtcatgactgctagtggcatctgatatgacggagctatgatgtcgtcgatgagtagtggtcgtagtgctacgtatgcgttgcgttctctggcgatgtagttggtcatagattgttccacgcactcgatcagcacagtcactgcggctgagtgaacatcgaggtctatgtcgcagttgacctccagggaacgtctcagttcttgtggctcggtgcaagtttcagatgtccggactccaagtgcctgttccttcccggtgttcagccactgcgttgatcctccaccggggcctgccacgcgctgctctggcaaggcgttccactggggcaaatgcctacccgggagcactctcaggatccgcat

SEQ ID NO: 8709 - DNA, 1347 bp, Homo sapiens
  SIMILAR (447)..(1088): 291254mologous to Homo sapiens spiceosomal protein,accession number L21990,Smith-Waterman Score=116.
atgcattttgctaaaaaagaagacgtcagtgagattgagacaggaagtgatggagagaaaccaaaggctcgagcaggttgtttaattggaaacagcgagaggctgttttcggtcacattttgtgtacagttccaggccacgctccctctctcatatacgatcatgaaacataaagacacgggaacaagttcagtgcctgagagcatcgacgcctcccttgaggccagccagcagaaccctgcttttctgaagaccctgaccaggagctgcagcccctcctggccctgtagccgcaactggccccatctcttgattccgcttacctgtccggcccaggctggagctaccccacagctgccagggctgggtcctccaggccacctgcccatgaaccagccagccagctccttcccacctagtgccaaacgcagcctctcagattctgacctccactttccacaagccgccccctggctcctccttggcgtgctgctgctgcccgggaccctgcgactggcaggaggacagtcagtgacccacaccggcctgcccatcatggcctccctggccaacacagctatctccttcagctgcaggatcacctatccatacactccccaattcaaggttttcacagtcagctactttcatgaagatctccagggacagaggagccctaagaagccaacaaactgccaccctggactgggcacagagaaccagagccacaccctggactgccaggtcacccttgtgctgccgggagcatcggccactggcacctactactgctctgtccactggccacactccacggtgagaggcagcggcaccttcatcctggtcagagacgcagggtaccgagagcccccgcagagtccacagaagctcctgctctttggcttcaccggcctcctgagtgtcctgagtgtagtgggcacggccctgctgctctggaacaaggtgcaggaatggcttgatgcaggtcttgtaggcatttgccatgtttccctggagaggaagcggatgcggggtccagggaaggaccccaccaggaagtgcccagatccaagatctgccagcagccccaagcagcatccttcagaatctgtctacacagcattttctgaaacaattttcctggagatgtgggtgcatctccaggaagtggaagagcctcctggcacccagcacacagctctgcagcgccgcgagaccgaggtctatgcctgcatcgagaatgaggatggcagctcacccaccgccaagcagagccccctctcccaggagagaccgcatagattcgaagatgatggcgaacttaacctggtctatgaaaatctctag

SEQ ID NO: 8710 - DNA, 1911 bp, Homo sapiens
  SIMILAR (505)..(1140): 1001254mologous to Escherichia coli Aconitate hydratase, mitochondrial precursor (EC 4.2.1.3) (Citrate hydro-lyase) (Aconitase),accession number D90715,Smith-Waterman Score=1106.
atgcctgtttcaactgccgttgcgacagtcattaaaactaaacaggttgaatttcaacttcaggttggtgttccactctattttcggcttcgggcaaatccgatcaaaactattctcgacaatcaaaagcgcctggacagtaaagggaatattaaacgctgtcgggttccgttaataaaagaagcagaacaaatcgcgtggttgcaacgtaaattgggcaatgcggcgcgcgttgaagatgtgcatcccatatcggaacggccacagtatttttctggtgatggtaaaagtggaaagatccaaacggtttgctttgaagttatcggttgccgagaagaaccagatgccgaggaatgccacggtgatagagaacagcgccgggtattcatacgggaagatggctttttcgtgaccaaggatctgtacccaaatcgtcgggccgaggatcatcagtactactgcggtaatcagccccagccagccacccatcatcgcgccacgcgtggcgcaatcatcagaaccgcgttctgcggcccatgctttggcgcgggcgatacgccaatcaacaacggtttgagtattcgccacaccacgcgtaacttcccgaaccgcgaaggctctaagccagctaatgggcagatgtcagcggtggcgttgatggacgctcgttctatcgctgcgactgcggcaaacggtggctatttaacctctgccagcgaacttgattgctgggacaacgtgccggagtacgccttcgatgtaacgccgtataaaaaccgtgtttatcagggctttgtgaaaggggcaactcagcaaccgctgatttacgggccgaacattaaagactggccggaattgggtgcgctgactgacaatatcgtcctgaaagtgtgctcgaagatcctcgacgaagtgaccaccaccgacgaactgattccttccggtgaaacctcttcttatcgttcaaatccgattggtctggcggagtttaccctgtctcgccgcgatcccggttatgttagcagaagtaaagcgactgctgagctggaaaatcagcgtctggcggggaatgtcagcgagctgacagaggtgtttgcgcgcattaagcagattgctggtcaggagcatattgatccgctgcatcgagtctacagacactgttcacgttctggcaattgtcccagtgatgtctttgatagcaaaaaggatccagtccaggatcaccgcccccaaaagcgagtgacattaatttggggttacgatattcacccacaaatcgaaattatccagacaggcgataatttcttccagtttcgcgccattgccaataattttggctttcttcgcttttaccagatccgccattttggcttgtccggtcagcacggcgtgcagatcttcacggctgatgtagaaagaggcgtcggcttgcggttgcagcgttttccggtagttaagcacgctatcgttcagcgtcaggttgaggttatcgccgttgctcatattgaagttcaggctgatatttttacccgcagctttcgcgctatcgaggcgaacggccataaagtcgaacagcatttcgaccgacatcccgcgaatggtgtccggggaaccggtggtgccgtggctgaacttatgcaccccttcgcgcagctctttcgcgccggtcaggtagaaaccgcgccatgtggcggactcggcctgatagcccagctgttcaaagttattcgcttgcagattcttcgcggagaatcgaagaaattcagcgccaatctgacggcactgaaattgccattacctatggtctacgaaggtgacaaggtgcttaagcatcttctgagaccgaaattcaatttgcctccattggtgcaaccaccgaagaagatgctgccaagacacttgagccgttaa

SEQ ID NO: 8711 - DNA, 1881 bp, Homo sapiens
  SIMILAR (727)..(1836): 721254mologous to Haemophilus influenzae Rd transcription accessory protein (tex),accession number U32738,Smith-Waterman Score=1355.
atggtcttttggtcagacctgccggctatcgcgcttcagcaatggtggtcgtctttgtcacttcgctcctgtctggctgctcgcctggcgctacggcatcgacaccgggcggttgattattatcggtatcggcgttcgcgccatgctgcgtcttttagaaacggcgctaacagcaggtttgtggaatgccggatcgctcaacggcctgacgtgggcagaaacctcgccttccgcacccatcattatattgatgctcattgccgccgccttactgtcgcaccgcacattgcccgacgcattagcggcaccgctcgctgggggctaacccaggcggcgctatgcggggcgctgttactgctggcggccgatctctgcgcccaacaactgtttatgccgtatcaacttccggttggcgtcgttaccgtcagcctcggcggagtctcgcaaaaaatgaccgaatcagtagcccgtttgcgcggcgaacagttaaccctgggatatggcaaatataccgttgcggaaaatctgactgtagaaatacctgatggtcacttcacggcaattatcgggccaaatggctgcggtaaatccacgttactgcgtaccttaagccgcctgatgacgcctgctcatgggcatgtctggctggatggcgagcacattcaacattacgccagtaaagaggttgcacgccggattggtctgttggcgcaaaatgctaccacgccgggcgatatcaccgtgcaggagctgtgccggggtcaagccaacggcaaacgggtggcgacggacacaagttacccgcacacgggacaggccgcaaaagcagcgatgaccgttgctgcgctgtgtgaaaaacataacgtggaactggtagcgatcggtaacggtacagcttcccgcgaaactgagcgtttctatctcgatgtgcagaagcagttcccgaaagtgaccgcgcagaaagtaatcgtcagcgaagcaggcgcgtcggtttactcggcttccgagctggctgcacaggagttcccggatctcgacgtttcgctgcgtggcgcggtgtctatcgcccgccgtttgcaggatccgctggcggagctggtgaaaatcgatccgaaatctatcggcgtaggtcagtatcagcatgacgtcagccagacgcaactggcccgcaaactggacgcagtagtagaagactgcgtaaacgccgttggcgtcgatctcaacactgcttctgttccgctgttaacccgcgtggcgggcctgacgcgcatgatggcgcaaaacatcgttgcctggcgcgatgagaacggtcagttccagaaccgtcagcaactgttaaaagtgagccgtctggggccgaaagccttcgagcagtgcgcgggcttcttgcgcattaaccacggtgataacccgctggacgcgtctaccgttcacccggaagcctatccggtggtggaacgcattctggcagcaacacagcaggcactgaaagatctgatgggtaacagcagcgaactgcgtaacctgaaagcgtctgactttactgatgagaaattcggtgtgccgacggtaaccgacatcatcaaagagctggaaaaaccgggtcgcgatccgcgtccggaatttaaaaccgctcagtttgccgatggcgtcgagacaatgaacgacctgcaaccgggtatgatcctcgaaggcgcagtgaccaacgtcaccaactttggcgcgtttgtcgatattggcgtgcatcaggacggcctggttcacatctcttcattgtcgaacaagtttgtggaagatccgcataccgtggtgaaagcgggcgacattgtgaacgttgacagtgctggaagtggattcttccgcgtaaacgtattgccttga

SEQ ID NO: 8712 - DNA, 2853 bp, Homo sapiens
  SIMILAR (2430)..(1795): 991254mologous to Escherichia coli trimethylamine-N-oxide reductase,accession number X73888,Smith-Waterman Score=1155.
ctacgctgtgtgttgcttgctgatctcacgccacaaaatccggcgaatcaacatcattgtattggtgccagttatcatcgcggcagcgaagatacggcgtacagtgaggacgatcagcagcagaatcgccagcggttgattgattgtttcccgcaggcacagtgggcaaaagaggttgatgtcagtgataaagaggcgcgctgcggtgtgcgttgtgccacccgcgatcatagcatggaagatatcaataacaccatcgatgctgcacgtcgggtgtttgcgaagttgtgatccagcatggtttgtcggatgcggcgtgaacgccttatccgacctacgattcggggccgtttgtaggcccgataagacgcgccagcgtcgcatcgggcatccgttgtcgcgtaaacgctttatccgtccaggcgtacagtggccgttatatggaaaaattaacggctctgctttctcaacaaatagataaaatatggcgcgccgataaaggttgacagcagccccgccgggatcagtcagcgaacaccagcagtaaaccacccgacgtgcagcatcgatggtgttattgatatcttccatgctgtgcgccacggacataaagcccgcttcaaacgctgacggtgccaggtaaacaccttcgtccagcatcatatggaagaaacgcttaaagcgttccacgtcacaggccatcacatcctgatagcacgtcacggactcggcgtcggtaaagaaaataccgaacatgccgccaacgtggttaacgaccagcggaattccggcttcttctgccgcttccagcagaccttctgccagacgtgttgtcagctcatccagcgtttcgtgaacgcccggctgcgcgacttcattcagacaggcgaaacccgctgccatcgcaatcgggttaccggaaagcgtacccgcctgatagaccggacccgtcggggccagcgcatccattacatcacgacgaccaccgaatgcgcctaccggcattccaccgccgatgattttgccgaggcaggttaaatctggcactacgccgtaataatcctgtgcgccagctagcgctacgcggaaaccggtcatcacttcatcgatgatcagcaacgcgccaaattcgtcgacagcgcgcgcggtcacggttaaatccataggttcatccatccctttccttctcagctgtgtggcataggggaggttgcttaattcctctgaaagatgactcaagttgagcgtcgtcgcgtaccgctgggggttattggcgtgatttatgaagcgcgcccgaacgtgacggttgatgccgccagttccgaggcctgaaacgctgtcaccggcaatcgcgcgcagtgcgtcatcaatgccgtaaacatctttaatcagttctgccaggccgtcctgatgcacgccaatatcgacaaacgcgccaaagttggtgacgttggtcactgcgccttcgaggatcatacccggttgcaggtcgttcattgtctcgacgccatcggcaaactgagcggttttaaattccggacgcggatcgcgacccggtttttccagctctttgatgatgtcggttaccgtcggcacaccgaatttctcatcagtaaagtcagacgctttcaggttacgcagttcgctgctgttacccatcagatctttcagtgcctgctgtgttgctgccagaatgcgttccaccaccggataggcttccgggtgaacggtagacgcgtccagcgggttatcaccgtggttaatgcgcaagaagcccgcgcactgctcgaaggataactgcgagtgaagtcggaaatccggatgcacagattgcagatgcaacggatacttttgcgagccaggcccaccgtgggagcgttcgattttctcaaaccacatcggatgcccctgacaatcgtcgtagttcatatcggcgatagttttcgagtagatctcaatcaggccactcggcgtgcccagcggttcgagatccggatcttcgcggaatgcctggtggcgaacaaacatctgcggatggtcaaactcgacgtactctttgttattccagaagtcatcaaacgctggcagatgaacgccgcgtcctttgccttgctgtacaccttcctgccagatgcgtttcagccagcccatttcgtccagcccttcggtaaaggcttcttcgcgattaaagcgacggcacagctcgcggaaaatatcgaagtcgttgcgcgcctcgaactgcggcggcaccacctgtttcatggcgataatgccacggttggagtgattgccgtactggtcgagatcgttacgctcaaactgcgtggtcgcaggcagtacgatatcggcaaagcggcaggttgaggtccactggttatctatggcgataaccgtttccagcttgcgcaagccttcaataatgcggttgatcggtaaaactgccgccgcgttgtccactcgtctctggctgttctggggctggattttgtgctgaccgcattgatgtttgggaattgagttcatgcaaacgaaaaaaaatgaaatttgggtgggtatctttttattagcagcactgctggcggtccaacgtgagatgatgaactgagtcagccccgataccttcttgtcggtcgcgcacgaatttggtttatcgtcgagtatcgacatgtgggtcattgagcatacgcgtttgctattaatctgtctccaacctcggtatgtcaggctcgttttcctgttgaagtcagtcagttgctggctaaatatcagattgaagcgtggcaacttatttttgaagtcaccgaaagtaatgctctgaccaatgttaagcaggcgcaaatcaccttgcagcat

SEQ ID NO: 8713 - DNA, 1360 bp, Homo sapiens
  SIMILAR (88)..(696): 981254mologous to Escherichia coli K12 putative enzyme,accession number AE000410,Smith-Waterman Score=1087.
atgaaaatcaatctcaagctcacgaacgatagcaaagttgctgatggtcagtttgccaacatagtcgttttccttataaactggttttatatacacgcgactacctgtgaaattgataacggcggcgtcattgttgcggatggtttccaggccagcaaagcgtacagcgcggacagcatcgtagattataacgatgcacattataaaacttctgtcgatcaagacgcatggggctttgtcccgggcggcgataacccgtggaagaaatacgaaccggcgaaagcatggtccgcatccactgtgtacgtgaaaggtgatcgcgttgttgttgatgggcaggcttatgaagcgctgttctggacgcaaagtgacaaccctgctctggtggcgaaccaaaacgccaccggtagcaatagccgcccgtggaagccgttaggtaaggctcagagctatagcaacgaagagctgaataatgcgccgcagtttaatccagaaacgctttatgccagcgatacgctgattcgctttaacggtgtgaactacatttctcagagtaaagtgcagaaagtttctccttctgacagcaacccgtggcgtgtttttgttgactggaccggaaccaaagagcgcgtaggtacgccgaagaaagcgtggccgaaacacgtttatgcaccgtatgtcgactttacgctgaataaccaccaccgacgaactgattccttccgaagtaaagcgactgctgagctggaaaatcagcgtctggcggggaatgtcagcgagctgacagaggtgtttgcgcgcattaagcagattgctggtcaggagcatattgatccgctgcaaactgaaattggcagcatggtctatgcggtgaaaccaggcgatggttctgcgcgtgaacaggcggcgagctgccagcgtgtgattggcggtctggcgaatattgccgaggagtacgcgactaaacgctatcgttctaacgtcatcaactgggggatgttaccgctgcaaatggcggaagtaccaacctttgaagtgggggattacatttacatccctgtgcattaaagcggcgctggataatccgggtacgacgtttaaaggttatgtgatccatgaagatgcgccggtaacggaaattacgctctatatggaaagtctgactgctgaagagcgcgagattatcaaggcgggtcgcattcggcacttattgtcggatgcgatgcttgcgcatcttatccgacctacgaatcgcatcgaatctgtaggccagataaggcattttcgcagcatccggcacttattgtcggatgcgatgcttgcgcatcttatccgacctacaaatcgcatcgaaccgtag

SEQ ID NO: 8714 - DNA, 1757 bp, Homo sapiens
  SIMILAR (444)..(1247): 701254mologous to Escherichia coli Aconitate hydratase, mitochondrial precursor (EC 4.2.1.3) (Citrate hydro-lyase) (Aconitase),accession number D90715,Smith-Waterman Score=894.
tcccaggctttgcccgcctgatggcggcgcatcgtcatgaaatcgcggcggtgatcattgagccgattgtccagggcgcaggcgggatgcgcatgtaccatccggaatggttaaaacgaatccgcaaaatatgcgatcgcgaaggtatcttgctgattgccgacgagatcgccactggatttggtcgtaccgggaaactgtttgcctgtgaacatgcagaaatcgcgccggacattttgtgcctcggtaaagccttaaccggcggcacaatgaccctttccgccacactcaccacgcgcgaggttgcagaaaccatcagtaacggtgaagccggttgctttatgcatgggccaacttttatgggcaatccgctggcctgcgcggcagcaaacgccagcctggcgattctcgaatctggcgactggcagcaacaggtggcggatattgaagtacagctgcgcgagcaacttgcccccgcccgtgatgccgaaatggttgccgatgtgcgcgtactgggggccattggcgtggtcgaaaccactcatccgatgaatatggcggcgctgcaaaaattctttgtcgaacagggtgtctggatccggcctttgacaactgatttacctgatgccgccctatattattctcccgcaacagtccataactggctggcgctgcacggtcgcggccaggattactgccagcttaaccctcaaccgatggcgtactacgatggctgcatcagcgttgatttaagcgccatcaaaccaatgattgcgctgccgttccacccgagcaacgtgtatgaaatcgacacactgaaccagaacctgaccgacattctgcgtgagattgaaattgagtccgaacgcgtggcgcacggtaaagccaaactctcgctgctggataaagtggaaaatggtcgcctgaaagtgcagcaggggattatcgcgggctgttctggcggtaactacgaaaacgtcatcgcggcggcgaatgcactgcgcggtcaatcctgtggcaatgacaccttctcgctggcagtttacccgtcatcacagccggtgtttatggatctcgccaaaaaaggtgtggtagcagatttgattggcgcaggcgcaatcatcagaaccgcgttctgcggcccatgctttggcgccgggcgatacgccaatcaacaacggtttgagtattcgccacaccacgcgtaacttcccgaaccgcgaaggcttcttaagccagctaatggggcagatgttcagcggtggcgtttgatgggacgctcgttctatcgctgcgactgcggcaaacggtggctatttaacctctgccagcgaacttgattgctgggacaacgtgccggagtacgccttcgatgtaacgccgtataaaaaccgtgtttatcagggctttgtgaaaggggcaactcagcaaccgctgatttacgggccgaacattaaagactggccggaattgggtgcgctgactgacaatatcgtcctgaaagtgtgctcgaagatcctcgacgaagtgaccaccaccgacgaactgattccttccgagaaacctcttttatcgttcaatcgattgtctgccgagtttccctgtctcgcgcgatcctgcagagtaagcgactctaagaaccgggcgaatttccgccacctgatccatcgtctccagagcagagatggccggtttgttatccaccgaaataatcagatcgttgacctgaatacccgcattcgccgccgggccgtcag

SEQ ID NO: 8715 - DNA, 1944 bp, Homo sapiens
  SIMILAR (1856)..(1719): 971254mologous to Escherichia coli Aconitate hydratase, mitochondrial precursor (EC 4.2.1.3) (Citrate hydro-lyase) (Aconitase),accession number D90715,Smith-Waterman Score=239.
agtgatttacccggctgggctaatgtttaattaaggtttcagtggttaatgaaatgataaatattgccggaatatattatgagtttggctgtgaaataaaaatgccggagatattctccggcatttttatgtcaggcaaggcgttcgttgccagatgcggcgtgaaccccttatctgccctacgatttcgtgcaaattcgacccgtaggccagtacgggcgtttaacgttttttgcccatggcccccgccagagcatccatcatcgcgctattaccggcaggctgcgcttcacgaccgcgtggtttggctgccgggcggttgttctgcgggcgttcattaccgcccccgcgacgagcgttggtttcgccaggctgctcatccaggcgcatagtcagggcgatacgtttacgctgaagatccacgtccagcactttcaccttcacaatgtcgcccgctttcaccacggtatgcggatcttccacaaacttgttcgacaatgaagagatgtgaaccaggccgtcctgatgcacgccaatatcgacaaacgcgccaaagttggtgacgttggtcactgcgccttcgaggatcatacccgcttgcaggtcgttcattgtctcgacgccatcggcaaagctgagcggttttaaattccggacgcggatcgcgacccgtttttccagctttggttcaatgttctcgccacgacaatcatgtttagcgagaaagcttctcagaataagacgaggcacggtagattcaatctctggaagtgtcatagagtacgttgtccagaagtactcaagccgcatgcgccagtgagccgccttgataatctcgcgctcttcagcagtcagactttccatatagagcgtaatttccgttaccggcgcatcttcatggatcacataacctttaaacgtcgtaccctggattatccagtgcctctttaatgccagggatgtaaatgtaatcccccacttcaaaggttggtacttccgccatttgcagcgagaacatcccccagttgatgacgttagaacgatagcgtttagtcgsgstactcctcggcaatattcgccagaccgccaatcacacgctggcagctcgccgcctgttcacgcgcaggaaccatcgcctgggtttcaccgcataggaccatgcttgccaatttcagtttgcagcgggatcaatatgctcctggaccaggcaatctgcttaatgcgcgcaaacacctctgckcagctcgctgacattccccgccagacgctgattttccagctcagcagtcgctttacttctgctaacataaccgggatcgcggcgagacagggtaaactccgccagaccaatcggatttgaacgataagaagaggtttcaccggaaggaattcagttcgtcgggkgggkggtcacttcgtcgaggatcttcgagcacactttcaggacgatattcaaggtcagcgcacccaattccggccagtctttaatgttcggcccgtaaatcagcggttgctgagttgcccctttcacaaagccctgataaacacggtttttatacggcgttacatcgaaggcgtactccggcacgttgtcccagcaatcaagttcgctggcagaggttaaatagccaccgtttgccgcagtcgcagcgatagaacgagcgtccatcaacgccaccgctgacatctgcccattagctggcttagagccttcgcgggttcgggaagttacgcgtggtgtggcgaatactcaaaccgttgttgattggcgtatcgcccgcgccaaagcatgggccgcagaacgcggttctgatgattgcgcctgcgcaaatcaaatctgctaccacacctttttttggcgagatccataaacaccggctgtgatgacgggtaaactgccagcgagaaggtgtcattgccacaggattgaccgctgcagtgcat

SEQ ID NO: 8716 - DNA, 1195 bp, Homo sapiens
  SIMILAR (98)..(1108): 751254mologous to Homo sapiens germ cell specific Y-box binding protein,accession number AF096834,Smith-Waterman Score= 1311.
atgagcgaggtggaggcggcagcgggggctacagcggtccccgcggcgacggtgcccgcgacggcggcaggggtggtagcggtggtggtaccggtgcccgcaggggagccgcagaaaggcggcggggcgggcggcgggggcggagccgcctcgggccccgctgctgggaccccctcggcgccgggctcccgcacccctggcaatccggcgacggcggtctcgggaacccccgcccccccggcccggagtcaggcggacaagccggtgctggctacccgagtcctgcctgggcactgccaaacggttcaacgtccggagtggttacggattcaccaacaggaatgacgccaaggaagatgtcttcgttcactggacagctgttaaaagaaacaaccccaggaagtttctgcgcagcgttagagatggggagactgtggaatttgatgtcgtggaaggagagaagggcgcacaagccactaatgtaactgggcccagggcggcgggggtgcccatgaagggcagccgttatgcccccaaccgacgtaggttccgctgattcatcccccggcctccctcagttgccccaccacccatggtggcagagatcccctcggcggggacaggacctggcagtaaaggggagcgggctgaagactctgggcaacggccccgacgatggtgccccccacccttcttctaccgacggcggtttgtgcgaggcccccggcctcccaaccagcagcagcctatagagctcaccggggcctttgcatgttcccagggcactgacagggtagaacccaaagagacagccccattggaggggcaccaacagcagggagatgagcgagtccccccgcccagattccggcccaggtaccgaaggcctttccgccccaggccacgccagcagcctaccacagaaggtggggatggtgagaccaagcccagccaaggtcccgctgatggttcccggcctgagccccagcgcccacgaaaccgcccctacttccagcggagacggcagcaggcccctggcccccagcaggcccctggcccccggcagcccgcagcccctgaggaagcccccacagaggcaatcaagcccatgattgcccatgatggccatgccccccccaacccatcccccacttgctgcctggagccatcctaccagcttgtagatgtgaactga

SEQ ID NO: 8717 - DNA, 933 bp, Homo sapiens
  SIMILAR (420)..(196): 301254mologous to Mycobacterium tuberculosis SEQ ID NO 42A,accession number AX005609,Smith-Waterman Score=80.
tcagacatcaggagtccctgtgtgcgcccttagaaatcctacaaaagaagggatgcccttgtctggaagaacctttgcaaagacaaccttgtccttgtcaatcttctgaggtgacagcatagtgaaacatctctttccgatttgcatctccaggaggtaacgtccatgggcctcacactgagctccttccgtgcgcggggcagccccggcaggcccagtcgggctggaagccgccgctggctcagagccgcatcccggcccgcggacgcagggggcgcgcggccggtccccggaggcgctgggtccaggccgaggatggttttgctccccgctccgctccgcatttaggaggtgggaggagcgcgcggcgatgcgcacaggaaatccctgcacacacacacaagttgtgacaacgtctccaaacttgccaaatatcccatagggagcaaagtcacacccaattgggaacggccgctctcgtagaaaggaacgggacccagtgctccacaaatagctacagaaaacatttatccatgacagctccacggaaaagggccgcttatcagagattagaagattgtgccccatgatggagctgccggtcaaagtcccctgctgccagtccgttcctgtcagagaggctatcttcctagtgctaaatgattttttgatgcactgaaaattaaattcacactcaaatttctgcatttgaggagattttcctgtacgctgagcttgcgggggctccttgtgtctcccctcctcctgcctgttagacttctccttgctggctgggcccacgcgtggatgcacgggtgcggaggatgggaacccaggatcactcagcaacgtgcttcttgtcagcttcctgaccgcactaaatccaaaatgagggtaaaaatccctgctgcaaattcctcctggctttgccat

SEQ ID NO: 8718 - DNA, 1745 bp, Homo sapiens
  SIMILAR (95)..(613): 261254mologous to Arabidopsis thaliana extensin-like protein,accession number AL035526,Smith-Waterman Score=110.
tcaggggatctgagcaaattccaccgtcgtcaattcctggtgctccgtgaaagatgctctttccctcggggcttcggagccggagcatttgtagacagttcctgcctcttcactcggctgccggcctgggggtcccgtcgcctcccggagccgcccgccgcgtcccccagcccgcgccgccctgcgcggcccgccggcctcctcacctatcagatttcctgtgcgcatcgccgcgcgctcctcccacctcctaaatgcggagcggagcggggagcaaaaccatcctcggcctggacccagcgcctccggggaccggccgcgcgccccctgcgtccgcgggccgggatgcggctctgagccagcggcggcttccagcccgactgggcctgccggggctgccccgcgcacggtaaggcccggggcatggccaaacttctccacacggatggtaaccttcatccatgcagcagaggacacgaaggtgtagccctccctcctctgtccctggacagtttcctctgctgccccttcctgctcccaggtaagtccttggacttggtgagggctcccgtattccttgttaattccagtttcttctcttttgccttggcctgaggatagggttccatcaagctttgtggctgacctcttccgagttttgacaacacttctttgcccgtggaaggagggagttaactgaccctgtgtgtttgctctatgtctatcaggaaaacagctcaaagcacattccctattcatgtcggggcagtagaatcttcccattttcccagagacaacgcgtaatggcaggccagaggaagctctgtgatcaccctggagggctcattagcaagcctctggcgtggacaaggatacctgaagctcctgtagttgctgccatggtagagggtgggggtgggctttaaaacggtgttattcccatttgatagatgaggaaagcggaggtcttcccgcagctcctcgaggctggtgtgcagggggagtatgagttttgcctgctcccctctgtggcttattttgtagtaaaatcttgcgttcttgtggaagtgattgacactgatagttctcacggagcttcctgtggccacagcagcagcagcatctgtgagcttgaaaggggatgatgagtgagacttttgtccacagttcttggttgagctgccacaagcagatgggaaaggctgcgtgcagatgccagcgcctggctcgttggtgaccagcaagggtcccagctgagccggggtgctctcctgtggctctggtggaacgtccacaggataccgactgtgttgaaaggacccatgatgtaaggatgtttgttgtggggggtgcttgtggctccttaactggctctggaaagagcctacttcccatagtgaaccctgtgaggtccaattctgttcctccccctggagctccaagagaaggtcattgtccttgtagcagcaggtgcccccccaagctgggttctcacccatcccagtttccagtggagaagcatcgttctcgtccacccccgtcatgctcttttccaccttctccaggggaagggatattttcagtctgtacaacgaatccacagcttcctctccaccgagggccacagcccctggagaccccttgagctgagtgctttgtccttgcatactctttctggcctcatagtggggcttggccattgtcccttcactccagatctctcctttcaggtccaggaagtgcat

SEQ ID NO: 8719 - DNA, 503 bp, Homo sapiens
  SIMILAR (35)..(160): 881254mologous to Homo sapiens Human signal peptide containing protein HSPP-92 SEQ ID NO:92,accession number Y87315,Smith-Waterman Score=185.
  misc_feature (1)...(503): n = a,t,c or g
gatggggggnnnnnnnttttggaccctagtcattgaggtgcaattcgacacgtgtgagagtaccgtacaggtgagcaagttgcaagacctcatccaccgcatcaagatggcccggtgcagaggacggtttgtctgcccagtaatcctgttcaagggcaagaagtggtgacacgcatctttttgataaggtcagaggctatgacatcaagctgcttcgatacctgtcagtcaaatacatctgtgacctgatggtggagaacaagaaggtgaagtttggcatgaatgtaacctcctctgagaaggtggacaaagcccagcgctatgccgacttcactctcctctccatcccgtatccaggctgtgaatttttcaaggaatataaagatcgggattacatggcagaagggctcatatttaactggaagcaggactacgttgatgccccattgagcatccccgacttcctgactcactctctgaacattgactggagccagtatcag

SEQ ID NO: 8720 - DNA, 428 bp, Homo sapiens; identical to SEQ ID NO: 5186
  SIMILAR (18)..(338): 731254mologous to Homo sapiens Human signal peptide containing protein HSPP-92 SEQ ID NO:92,accession number Y87315,Smith-Waterman Score=408.
  misc_feature (1)...(428): n = a,t,c or g

SEQ ID NO: 8721 - DNA, 1178 bp, Homo sapiens
  SIMILAR (16)..(834): 641254mologous to Homo sapiens Human signal peptide containing protein HSPP-92 SEQ ID NO:92,accession number Y87315,Smith-Waterman Score=785.
atggggaagaaggttgggggtgcagatgatgcctgggcagatgtggaggacgtcacggaggaggactgtgctcttcgaagtggtgacacgcatctttttgataaggtcagaggctatgacatcaagctgcttcgatacctgtcagtcaaatacatctgtgacctgatggtggagaacaagaaggtgaagtttggcatgaatgtaacctcctctgagaaggtggacaaagcccagcgctatgccgacttcactctcctctccatcccgtatccagatgatgatgatggtggtgatgatgttgatgatggtgatgatgatgatgatgataatgatgctggagactacgttgatgccccattgagcatccccgacttcctgactcactctctgaacattgactggagccagtatcagtgttgggatctggtgcaacaaacacaaaactacctgaagctgctgctttccttagttaacagtgatgggcagacggactctaaatccctggtagcaatcaggacttctgtaggaggtgcacttgctcaaacaagtggaaatgcattggcttatggaaccaagaaggcccaagaacagagccaggatgggctcatccacacgtccctgaagcccactgagatcctctacctcactgtggcctatgactggttcctcttcgggaggaagagtttgccagcccgggatggaggcttcaccctggaagacatctgcatgctgagacgaaaggaccgtggcagcaccaccagccttggcagcgacttctccctggtcatggagagttccccaggagccactgggagcttcacctatgaggccgtggagctggtcccagcaggagcgccaactcaggcagcttggaggaagagccactcatcctctccacagagtgtcctctggaaccggccacaaccctcagaggaccgcttgccttcccagcaggggctggcggaagccaggtcttccagctcctcttcctcaaaccattctgataactttttcaggatgggtagcagtcccctggaggtccccaaacccaggtgaggagctccaaagcccttgctgttggaagtgcctagctttcccccttaataagactggagggtcgggggccagcacctgagctagggtctcaagatggggttcctaagcttgcaggcccagta

SEQ ID NO: 8722 - DNA, 2630 bp, Homo sapiens
  SIMILAR (346)..(558): 941254mologous to Homo sapiens Human signal peptide containing protein HSPP-92 SEQ ID NO:92,accession number Y87315,Smith-Waterman Score=355.
ggtgcaggcaggtgcgatgggccagcttgaggcacactgaggggacgcggggctgggcagtggcgtgcgctcgggccgccgccgccgctgcctcggcggggtcctcggcctcttcaggcaaccagccgcctcaggagctggggcttggggagctgctggaggagttctcccggactcagtaccgggccaaggatggcagcgggaccggcggctctaaggttgagcgcattgagaagagatgtctggagctgtttggccgagactactgtttcagcgtgattccaaacacgaatggggatatctgtggccactatccccggcacatcgtgttcctggagtatgagagcctctgagaaggagaaagacacgtttgagagtaccgtacaggtgagcaagttgcaagacctcatccaccgcagcaagatggcccggtgcagaggacggtttgtctgcccagtaatcctgttcaagggcaagcacatttgcaggtcggccacactggctggatggggagagctgtatggacgctcaggctacaacctattttttctcagggggtgcagatgatgcctgggcagatgtggaggacgtcacggaggaggactgtgctcttcgaagtggtgacacgcatctttttgataaggtcagaggctatgacatcaagctgcttcgatacctgtcagtcaaatacatctgtgacctgatggtggagaacaagaaggtgaagtttggcatgaatgtaacctcctctgagaaggtggacaaagcccagcgctatgccgacttcactctcctctccatcccgtatccaggctgtgaatttttcaaggaatataaagatcgggattacatggcagaggggctcatatttaactggaagcaggactacgttgatgccccattgagcatccccgacttcctgactcactctctgaacattgactggagccagtatcagtgttgggatctggtgcaacaaacacaaaactacctgaagctgctgctttccttagttaacagtgatgggcagacggactctaaatccctggtagcaatcaggacttctgtaggagttgcacttgctcaaacaagtggaaatgcattggcttatggaaccaagaaggcccaagaacagagccaggatgggctcatccacacgtccctgaagcccactgagatcctctacctcactgtggcctatgactggttcctcttcgggcacatgttggtagatcggctcagcaaaggggaggagattttcttcttctgcttcaattttttgaagcatattacctccgaggagttctctgctctgaagacccagaggaggaagagtttgccagcccgggatggaggcttcaccctggaagacatctgcatgctgagacgaaaggaccgtggcagtaccaccagacttggtatgcgactgtctccctggtcatggagagttccccaggagccactgggagcttcacctatgaggccgtggagctggtcccagcaggagcgccaactcaggcagcttggaggaagagccactcatcctctccacagagtgtcctctggaaccggccacaaccctcagaggaccgcttgccttcccagcaggggcctggccggaagccaggtcttccagctcctcttcctcaaaccattctgataactttttcaggatgggtagcagtcccctggaggtccccaaacccaggctttgtggggcctcacagccccttagctcaggctggaagaagggagtcccctacatcgggggccctactgtggagcagctcccagacgcccccagctctgccccaggccccgccctcgcgggttccttgactcagggccgcttctcgcgtgcgtccccagctcccgcccggcagcccggcgctccgtcccgggccggcggcccccgccagccgccgccgccgccggccccgcctccgggcaccatgctgccctcgcaggaggcctccaagctctaccacgagcactacatgcggaactcgcgggccatcggcgtgctgtgggccatcttcaccatctgcttcgccatcatcaacgtggtggtcttcatccagccctactgggtgggcgacagcgtgagcacccccaagcctggctacttcggcctcttccactactgcgtgggcagcgggctggcgggccgcgagctcacctgccggggctccttcaccgacttcagcaccatcccgtccagcgccttcaaggcggccgccttcttcgtgctgctctccatggtgctgatcctcggctgcatcacctgcttttcgcttttcttcttctgcaacacggctacggtctacaagatctgcgcctggatgcagctcttggcagggcttctgttggggccggggggcgggggcgctggggcgctgggcggtggaatgaaggtcacgtgcccgacgggcgccagctggctagatgcctggcaaggaggcggcggcgtgctccactgcccgcccgacctgcctgcccttcgccgcccgagagtgcgcggcgcgctcaacgtcaccttcgactcggtggcgccacggcgggcccggggcaaagcgccgggctgcggcagaagggcggcagcggcggcggccgcgatggatctaggctag

SEQ ID NO: 8723 - DNA, 1602 bp, Homo sapiens
  SIMILAR (555)..(175): 371254mologous to Homo sapiens Human apolipoprotein E mutant protein fragment 5,accession number Y20289,Smith-Waterman Score= 137.
tcactcctttttctttccaaacagggaaaagtgttccacgaagcggtagcgcctttccgcctcgcgttttcctccctgaccctggtcccggctcccgtccgggcgccagctggtggggcgagcgccgggagcccatctgcccccaggggcacggggcgcggggccggctcccgcccggcacatggctgcagccacctcgcgcgcaccccgaggcgccgtgcccagcttgcccgaggtccgtcggaggcgcccggccgccccggagccaagcagcaacttgagcggggaagcgcccgcgtccggggatcgggatgtccctcctccttctcctcttgctaggtgagtgcctctgggagggcgggagtttggatggccgtgggcaaacgcagccctgcgtccgggaaagacgccggttctgaccgggtgtccctgcagcccctggagtcagccggcttttcagtccctgcctcctggccacggaggagcacatctggcaaccgagggccgcccagtcggccatcgagattgtctcgcacatctgggcccttgaacaggcttggggaaccgtttgatgtgcagggtcctctttagggcggtgtttagtttctggtgtatcctctgccacacctggctggctcttcgatctcaccatcctcttcatggaatgtaagatgtcagcgtgacctgttgaaacttctgccagcacggggaaggagcctggtttcgcagaaagtgagtttgaagaaggcatgaatgcatagtccattggtagggcaactcccttgcctggtactgtgagtggagatagtgccgtacaagacccgagagcctggtcggggagcagattgacaaaggagagaaattgtttactgcctgtctctgcaatagccaagacttcgtctatatcatttacttcatttacttctgggtccttggtgcttaggacagtgcctgacacagagatgctcatgtactcactgaaggtgacacagcatttatagtcaatctctctgaagagggtgtagccctggggcttggcgaaagagataaggctggagaagaggcacctggatgtagggatgcccacagtaactactagaaacctcgctacatccaacactaccagtgccccagaacttgggctcgactgctcccccttcaggccagcagattcgagggctgcaatcagaactgtgctataggcaaattcatctgacagacttgtgaagaatgctctccctccattcatttcttcaacaactgtttcctgagtgcctactctgtacccagcactgcacaagatgctgaagatgcagtcaaggacatggtcctgaccctgcaggcactgacatttcatggagcacacgctgacaaagtctgtgacgtgcaagtaaaaggagtgtcctcttacttcagtttctggtgacccagaactagaccttgggcagtagttctcaaccggccgtgtgccctggcatgggactgaatcagcctgcaggaagttaggaatcatatccttctgcaatttgctgccatactctttgaagataattccttttttcctgctaagatcaggatggtacagcttttgtaaaaattgcc

SEQ ID NO: 8724 - DNA, 198 bp, Homo sapiens
  SIMILAR (1)..(87): 931254mologous to Homo sapiens Human secreted protein sequence encoded by gene 2 SEQ ID NO:250,accession number Y91577,Smith-Waterman Score=150.
atggcgggcgcccctcccccagcctcgctgccgccttgcagtttgatctcagactgctgtgccagcagtcagcgagactccgtgggctcgtcggaaaagcgcggtattcgggtgggagtgacccgattttccaggtgccctccgtcacccctttctttgactcggaaagggaactccctgaccccttgcgcttcccca

SEQ ID NO: 8725 - DNA, 275 bp, Homo sapiens
  SIMILAR (1)..(87): 891254mologous to Homo sapiens Human secreted protein sequence encoded by gene 2 SEQ ID NO:250,accession number Y91577,Smith-Waterman Score=144.
atggcgggcgcccctgccccagcctcgctgccgccttgcagtttgatctcagactgctgtgctagcaatcagcgagactccatgggcgtaggaccctctgagccaggtgcgggttataatctcgtgcccgtcggaaaagcgcagtattcgggtgggagtgaccggattttccaggtgctgtccgtcacccctttctttgactcggaaagggaactccctgaccccttgggcttctcaagtgaggcaatgcctcgccctgcttcagctcgcgcacg

SEQ ID NO: 8726 - DNA, 508 bp, Homo sapiens
  SIMILAR (492)..(187): 271254mologous to Caenorhabditis elegans contains similarity to dual specificity phosphatase, catalyitic domain (Pfam:PF00782, Score=16.8, E=7.4e-05, N=1),accession number AF125960,Smith- Waterman Score=122.
cggattgtcaaattctgctgccactgcagtggggttagcggggttggacacatcactgtcatgcctcagtaactctttatccagctgcatggtgaccatctcagacattgtcttttctatttcagcagagagaccaggtccttcggacacatccttcatcatcactggcctgttctccgctaagtccagcagcaatttgcaaactaggtggataatttttggcacgtgtttcagaagtcgtgcctcataaccatgaagcagatgacgctggcgaattagatattgaggtaaggtgacagcatgtgctttgggatcacagcaagagaatatattgcggagaggagttagaaactgagtaaattcccttacacagaggagctgtcctctggtttgtatggaattgggtcgctttgcccgcacaaatataattgcttggtcagcagtcattctcgttgcaaaaactaagtaacaggctattaaaacacccggacgcgtgggtcgacccggg

SEQ ID NO: 8727 - DNA, 326 bp, Homo sapiens
  SIMILAR (150)..(287): 731254mologous to Homo sapiens pot. ORF VI,accession number X03145,Smith-Waterman Score=172.
ttttcagaggggaactcctacttggtggggatcatgcatcccctgaaggctatgctaccaggtctccagtaccagacagagacatttccaccaccgggatatttgatgcatgccggcttcaacagcagagccatttgttaaccttgagagactgctgtgctagcaatcagcgagactctgtgggcgtaggaccctccgagccaggtgcgggatataatcttgtggtgcgccgttttttaagcctgttggaaaagcgcagtatttgggtgagagtgacccgattttccagtgcattaaaccatgaacttaaagtgaatgaccactga

SEQ ID NO: 8728 - DNA, 627 bp, Homo sapiens
  SIMILAR (227)..(153): 481254mologous to Mus sp. SmD homolog {Gly-Arg repeat},accession number S71494,Smith-Waterman Score=61.
atgagtttcatagagagaaactggggcttacagaattcagtgtcttagtccagtgtccaccctggaagtggagaggctgggaggggtcccagttctgcactctggagcctgagtctttcactcttgtgggcagcgcaagaatcatgcagtgtcaaaaggtgcacctcccctctccctctcccctgtctctgtcccctgtcctgtcctgtcccctttcctccttccctttttagaaagagccttaattccccgagatggagccttgggaaagaatatgtggcgagagggaccctttcatccctatgcagcttgatgtggtcttgggtggagcaactgaaggagcctgtaatcacccaaagaggatgtggacatgttggttgacaggcgagcagatgccgcagaagcactttttttattagagaagggacagcaccagactattctctgcgtgttgcactgcatagtgaacctgcagacaattcccgtggatgtggaggaagctttccttgcccatgccattaaggcattcactaaggttaattttgattctgaaaatggaccaacactctccaacgccctgaagaaaatatttaagcacacgctggaagaaaaaaaaaaaaaaaaaat

SEQ ID NO: 8729 - DNA, 1993 bp, Homo sapiens
  SIMILAR (1192)..(1239): 621254mologous to Homo sapiens putative p150,accession number U93563,Smith-Waterman Score=48.
tttgatctcagattgctgtgctagcaatcagcgagactccatgggcgtaggaccctccgagccaggtgcgggatataatctcgtgatgcgccattttttaagccggtccgaaaagcgcaatattcgggtgggagtgacccgattttccagggattttgccgatttcggaaccaccatcaaacaggattttcgcctgctggggcaaaccagcgtggaccgcttgctgcaactctctcagggccaggcggtgaagggcaatcagctgttgcccgtctcactggtgaaaagaaaaaccaccctggcgcccaatacgcaaaccgcctctccccgcgcgttggccgattcattaatgcagctggcacgacaggtttcccgactggaaagcgggcaggattttgccgatttcggaaccaccatcaaacaggattttcgcctgctggggcaaaccagcgtggaccgcttgctgcaactctctcagggccaggcggtgaagggcaatcagctgttgcccgtctcactggtgaaaagaaaaaccaccctggcgcccaatacgcaaaccgcctctccccgcgcgttggccgattcattaatgcagctggcacgacaggtttcccgactggaaagcgggcaatatgcattaactgcacatgctgccaacactggcaaaagcaaatgcgtcagcaaaagcgaagactgcgagtatgtgggagcccaaaatgtgttggaagttctggccagggcaattaggcaggagaaggaaataaagggtattcagttaggaaaagaggaagtcaaattgtccctgtttgcagacgacatgattgtatatctagaaaaccccattgtctcagcccaaaatctccttaagctgataagcaacttcagcaaagtctcaggatacaaaatcaatgcacaaaaatcacaagcattcttatacaccaacaacagacaaacagagaaccacatcatgagtgaactcccattcacaattgcttcaaagagaataaaatacctaggaatccaacttacaagagatgtgaaggacctcttcaaggagaactacaaaccactgctcaaggaaatgaaagaggatacaaacaaatggaagaacattccatgctcatgggtaggaagaatcaatatcgtgaaaatggccatactgcccaaggtaatttacagattcaatgccatccccatcaagctaccaatactttcttcacagaattggaaaaaactagttgtggatctctcaccgaaaagccgcatgcaggattttgccgatttcggaaccaccatcaaacaggattttcgcctgctggggcaaaccagcgtggaccgcttgctgcaactctctcagggccaggcggtgaagggcaatcagctgttgcccgtctcactggtgaaaagaaaaaccaccctggcgcccaatacgcaaaccgcctctccccgcgcgttggccgattcattaatgcagctggcacgacaggtttcccgactggaaagcgggcaggattttgccgatttcggaaccaccatcaaacaggattttcgcctgctggggcaaaccagcgtggaccgcttgctgcaactctctcagggccaggcggtgaagggcaatcagctgttgcccgtctcactggtgaaaagaaaaaccaccctggcgcccaatacgcaaaccgcctctccccgcgcgttggccgattcattaatgcagctggcacgacaggtttcccgactggaaagcgggcaggattttgccgatttcggaaccaccatcaaacaggactttcgcctgctggggcaaaccagcgtggaccgcttgctgcaactctctcagggccaggcggtgaagggcaatcagctgttgcccgtctcactggtgaaaagaaaaaccaccctggcgcccaatacgcaaaccgcctctccccgcgcgttggccgattcattaatgcagctggcacgacaggtttcccgactggaaagcgggcagtga

SEQ ID NO: 8730 - DNA, 1180 bp, Homo sapiens
  SIMILAR (436)..(561): 691254mologous to Cloning vector pSacBII SacB,accession number U09128,Smith-Waterman Score=132.
atgccccacaagtgttaccatggcaaaactggaagagtctacaatgttacccagcatgctgttggcattgttgtaaacaaacaagttaagggcaagattcctgccaagagaattaatgtgcgtattgagcacattaagcactctaagagccgacacagcttcctgaaacgtgtgaaggaaaatgatcagaaaaagaaagaagccaaagagaaagaagttcccatggagcccaccgtgtacatgtctgaaaaggggaggacactttttcctggggagcctgccaatcacataaagaacaaaaggcttctgtgctggaccctgcctgcttatctgtgcagtttgatctcagactgctgtgctagcaatcagcgagactccgtgggcgtaggaccctccgagccatgtgcgggatataatctcctgatcaatcccccgattaaaaataaagagtccgcaaaagaaccgcaagtgtggcacagccgcacgctgcaaaacgcagacggaacagtagctgaatacaacggcaatcacgatgtgttcgctcgagcaaggaagcccgaaagacgctgatgacacatcaatctacatgttttatcaaaaggtcggcgacaactcaatcgacagctggaaaaacgcgggccgtgtctttaaagacagcgataagttcgacgccaacgatccgataaaaaaagatcagacgcaagaatggtccggttctgcaacctttacatctgacggaaaaatccgtttattctacactgactattccggtaaacattacggcaaacaaagcctgacaacagcgcaggattttcgcctgctggggcaaaccagcgtggaccgcttgctgcaactctctcagggccaggcggtgaagggcaatcagctgttgcccgtctcactggtgaaaagaaaaaccaccctggcgcccaatacgcaaaccgcctctccccgcgcgttggccgattcattaatgcagctggcacgccaggtttcccgactggaaagcgggcacccgtcggaaaagcgcagtattcgggtgggagtgacccgattttccaggtgccgtccatcacccctttctttgattaggaaagggaactccctgaccccttgcgcttcccgagtgaggcaatgcctcgccctgcttcggctcatgcacggtgcacgcacccactga

SEQ ID NO: 8731 - DNA, 1564 bp, Homo sapiens
  SIMILAR (557)..(805): 431254mologous to Caenorhabditis elegans contains similarity to dual specificity phosphatase, catalyitic domain (Pfam:PF00782, Score=16.8, E=7.4e-05, N=1),accession number AF125960,Smith- Waterman Score=205.
aacaaggcactcacattcccacacatgggtgccagaggagacctagtgaagattcaggactttcaccattacctagcaagaatgaagccacaccactatggtgttagtggaaaccacatggggagcagtattaagacaccctggtgcctaccagccagggtgatattagcagaggcctagaggggaacctgaactcctgtcccacctagcagtaatgaagagcccctttcctctggtgtcaacaaaggctgagtggggaacctggattttcaatcctgaagcagaagaatcacttgaacctaggagtttgatctcagactgctgtgctaacaatcagcgagactccgtgggcgtaggaccctccgagccaggtgcgggatataatcttgtggtgcgcagttttttaagcccgtccgaaaagcgcagtgttcgggtgggagtgacccgactttccaggtgccgtccatcacccctttctttgactcagaaagggaaccccctgaccccttgcgcttcccaagtgaggcagtgcctcgccctgcttcggctgaggcacgtttacttctacaatttcggatggaaggattatggtgtagcgtctcttactactatcctagatatggtgaaggtgatgacatttgccttacaggaaggaaaagtagctatccattgtcatgcagggcttggtcgaacaggtgttttaatagcctgttacttagtttttgcaacgagaatgactgctgaccaagcaattatatttgtgcgggcaaagcgacccaattccatacaaaccagaggacagctcctctgtgaagcacagcagagtggagctttctctgcagatgtttcaggctcacacagccctggggagccagtttcacccagctttgcaaatgtccataaggatccaaaccctgctcaccagcaagtgtctcactgtcagtgtaaaactcatggtgttgggagccctggctctgtcaggcagaacagcaggacaccccgaagccctctggactgtggctccagtcccaaagcacagttcttggttgaacatgaaacccaggacagtaaagatctgtctgaagcagcttcacactctgcattacagtctgaattgagtgctgaggcaagaagaatactggcggccaaagccctagcaaatttaaatgaatctgtagaaaaggaggaactaaaaaggaaggtagaaatgtggcagaaagagcttaattcccgagatggagcttgggaaagaatatgtggcgagagggaccctttcatcctatgcagcttgatgtggtcttgggtggagcaactgaaggagcctgtaatcaccaaagaggatgtggacatgttggttgacaggcgagcagatgccgcagaagcactttttttattagagaagggacagcaccagactattctctgcgtgttgcactgcatagtgaacctgcagacaattcccgtggatgtggaggaagctttccttgcccatgccattaaggcattcactaagatcagcatcatctttgtaaatcagaatccagaggtcaccgtcctcctctaa

SEQ ID NO: 8732 - DNA, 2017 bp, Homo sapiens
  SIMILAR (563)..(1273): 971254mologous to Homo sapiens p40,accession number U93564,Smith-Waterman Score=1191.
agtgtctgagccacaactcaagaaggtaatgagaataaggagccaagatggcccgaaataggaaacagctccggtctgcaagctccccaccgtgaacgacgcagaaagacgggtgatttctgcatttcccatctgaggtaccgggttcatctctctagggagtgccagacagtgggcgcaggtcagtgggtgcgcgcaccgtgcgcgaagccgaaagcagggccgaggcattgccctcacttgggaagcgcaaggggtcagggagtttcccttccgagtcaaagaaaggggtgacggacagcacctggaaaatcgggtcactcccacccgaatactgcgcttttccaacgggcttaaaaatacggcccaccacgagattatatcccgcacgtggctcggagggtcctacgcccacggagtcatcgcatgattgctagcactgcagtctgagatcaaactgcaaggcggcaaaggaaaactaacaaacagaaaggacatccacaccaaaaacccatctgtacatcaccatcatcaaagaccaaaagtacataaaaccacaaagatggggaaaaaacagaacagaaaaactggaaactctaaaacgcagagcgcctctcctcctccaaaggaacgcagttcctcaccaacaacggaacaaagctggatggagaatgactttgacgagctgagagaagaaggcttcagacgatcaaattactctcagctacaggaggacattcaaaccaaaggcaaagaagttgaaaactttgaaaaaaatttagaagaatgtataactagaataaccaatacagagaagtgcttaaaggagctgatggagctgaaaaccaaggctcgagaactacgtgaagaatgcagaagcctcaggagccgatgcgatcaactggaagagagggtatcagcgatggaagatgaaatgaatgaaatgaagcgagaagggaagtttagagaaaaaagaataaaaagaaatgagcaaagcctccaagaaatatgggactatgtgaaaagaccaaatctacgtctgactggtgtacctgaaagtgatgcggagaatggaaccaagttggaaaacactctgcaggatattatccaggagaacttccccaatctagcaaggcaggccaacgttcagattcaggaaatacagagaacgccacaaagatactcctcgagaagagcaactccaagacacataattgtcagattcaccaaagttgaaatgaaggaaaaaatgttaagggcagccagagagaaagaggtctttgttccagagggaggaaccctgccacgaggaaacacaacaatgattccattaaactggaagttaagattgccacctggactctttgggctcctcctagctttaaggcaacaggctaagaatggagttacagtattggctggggtggttgacccggactatcaagatgaaatcagtctactactacacaacagagaaatcctcaatgttagtacattacagcaaagctatagttctggggaaaagcaggtatcttttttgatctcagactgctgtgctagcaatcagcgagattccgtgggcgtaggaccctccgagccaggtgtgggatatagtctcatggtgcaccgttttttaagtctgtctgaaaagcgcagtattcgggtgggagtgacccgattttccaggtgcgtccgtcacccctttcttcgactcagaaagggaactcctgaccccttgcgcttcccaaaaattcagaagctgctcaaactccagtgcagtcatggagcctccattacctgggaggcagcctccaagcagcatgcagccttgtcagaaactgcaccgccaagggtgagaatggcattagaagcaaagaggaaagattcaaacaggaacgagaatttggacaagcgaacactctgtgctgctcaagggaagagcacagtggaagtccaagggcgagtgtgtgcccagggcagggcaactgggctatgggctgattcccgggatgcatga

SEQ ID NO: 8733 - DNA, 597 bp, Homo sapiens
  SIMILAR (359)..(210): 381254mologous to Homo sapiens retinoic acid receptor- alpha,accession number X56058,Smith-Waterman Score=64.
atgtcttctatggtggcaggcaaggaagaaagtaagcatgtgaaggaggaactgtcaaacacttataaacccatcagatctcttgagaacttaactcattatcatgagaacagcatgggggaagctgctgccatgatccaatcacctcccaccaggttccttcctttacatgtggggattacaattcgagatgagattcaggagacagagggagcagaaggcaatgggacaatagaaacggagaagtttgaagatgctgtgatgctggctttgaaaatagaggaaggcccacaggatggaagaggccatgaatggattatcttttggagtcttcatggagaatttagcccttctaccatcttgactttaggtctgaagtctcagtgggctcaaccagctcccctgttcaacatccggcaaggtccaaacgaaggtgacaatcaacagggatcttattgggaagctctggacaggaccctagcagtcctgtccacaggccgcttaaatccaattcgaatttggtttgcagccaagcaggtgcttcacgtcatgaaaggagcactcctccaacatcttgggatttcattccagaactag

SEQ ID NO: 8734 - DNA, 620 bp, Homo sapiens
  SIMILAR (414)..(235): 351254mologous to Simian sarcoma virus coding sequence of pol,accession number V01201,Smith-Waterman Score=89.
atcccccatgcattggttttgatgtctccagtgagctgttgggcaagtcttgatattactgatccacccgcagcaggcagcttcctgtatggagctacctccaccccttggacagttcaggacgtgaaagattgtcaaaaatgtgaactccttgatgtccagtaaaggcaactgagggaactgtctaacattggtgtaaaaagtgcactttcctaaggagcatgaacttagagttatcaaagcctgtggcaatagtggaatccagcagggcatccagtcgctgctttgtaccttaaataggaattctttgaggagctcagtgtatctctcaactgaagcagctgcctgcagcctacaggggcagtggaagctctgctggacaccttcttcacaagcccagcactgtgttttctgatgaaatgttgctttggtgaccatcagtagtgtctggaactctgcaagggataaggagtgtccctgtgagatctgtactgtgtccttagttaaaataaaggcatctgttaccttgattggtattctgagtatccatgagacaagaagtgtatttaattcaatggggagggaaggtggacgattcttggaattccacgcacactgca

SEQ ID NO: 8735 - DNA, 1688 bp, Homo sapiens
  SIMILAR (698)..(1066): 431254mologous to Homo sapiens double homeobox protein,accession number AF117653,Smith-Waterman Score=186.
atggaagagtcaagatactggggcactggaagaaatagaagagaaggtctgaagttgcagtgggctcaaccagctcccctgttcaacatccggcaaggtccaaacgaaggtgacaatcaacagggatcttattgggaagctctggcttcaataatgcaaattatacaccttgtcccttcaggtctggggatggtaacagcatttcactgttcctggtatctgagtactacagcaacctttcctggggttttaaatcctgctctaactgagataaaatcaggaaattactatgtacacggctccttcattcttcaggtggccgattataaagagttccagacactactgatgatcaccaaagcaacatttcatcagaaaacacagtgctgggcttgtgaagaaggtgtccagcagagcttccactgcccctgtaggatgcaggcagctgcttcagttgagagatacactgagctcctcaaagaattcctatttaaggagcacacctgtgacaaccaggaacctacctcgacccttcattatcactcaaagcttacagtgcacattcacgtttactcttcacgctgtacattgccgtgccagcccagccaggctgcacaggcagaaggaatctcccaacctgccccggcatgcgaggattttgtgttcgctgccctggctcctccagaagtggggttgtcccacactcagactcctcggtggcctctgcaccccaacaaatgccaggaggaccaggacccacagcacgacggcctgctgggcgcgtgctcagtgggacagcttgggccccctcaagctgagtcacagggccaagagtctgcggtgggactagagccccaggtcgccagggctgcatgggaaaccaaagactgggcacctccaactccgaagctcgtgaccccggaggcctccgtgtcaagcacagatggaagccattcaggagcctcccaaccgctccaggaggcaaggcgctcctctgcactcacccccagcctattagatgagctcctgtcgaccctagagtttcagcaaaaggcacaacctttcctagatccggcgccactgggggagctgaaggacgtggaagagcccactctgctggaaccactcttcagccaggaagaacaccgggctctgctggaggagcaggttggggcggctttggggcagggtggcggcctctctttcgcggtgaacctcaggcttggtgtggagaggcgtgtcttcccttccagctgacctgccctaggatccctgagttcccaggtccagcgagagactccacacagaggagggctgtcaacaatgacaagaaagcattcctgagcatcccggggatcccagggctggtcccaggtacagggaggtaggctgtcctaactgcatgcgcgggtttcccagcagcagcctaggatttctaactatcccaggcggagctctcatccctttttcccccgcgttcttcagtcgggttggcggagacctcagtccgcgaaacactgggccagggcagaagccaggccagttctcctttctgcggctcgactcctccgcctcttcgctcaccatcatgttgccaacccgtgtcccgccagcctcctcgccagcaccatagagcgccttgcaactaaataaagaccccagacctcgcgcaaaccagggtgctgccc

SEQ ID NO: 8736 - DNA, 331 bp, Homo sapiens
  SIMILAR (3)..(305): 251254mologous to Human papillomavirus type 6b minor capsid protein L2,accession number X00203,Smith-Waterman Score=85.
tttcagctcaggctccaaactctgccatcacagctcagactggtgttggggtagcgtctaccgtccacctaaaccccatgcagttgatgacagtggatgcatcgcatgctcgacatattcaagggatccagccagcacccatcagtacccaggcagtggtgttggcagatggagccacaattgtggccaaccctattagcaatccattcagtgctgctccagcagcaacaaccgtggtgcagacccacagccagagtgctagcaccaacgctcccgcccagggctcatcgccacggccaagcatactccggaagaaacctgccacagatgg

SEQ ID NO: 8737 - DNA, 1737 bp, Homo sapiens
  SIMILAR (180)..(1085): 271254mologous to Arabidopsis thaliana contains similarity to cell wall-plasma membrane linker protein~gene_id:MKA23.5,accession number AP001306,Smith-Waterman Score=185.
aatcaccagttccgtgtccactatccgacagtatccagtttcagctcaggctccaaactctgccatcacagctcagactggtgttggggtagcgtctaccgtccacctaaaccccatgcagttgatgacagtggatgcatcgcatgctcgacatattcaagggatccagccagcacccatcagtacccagggtatccagccggcccccattgggaccccagggatacagcctgcaccactttggcacacagggaattcactcagcaaccccaatcaacacacaagggcttcagcctgcacctatgggtactcagcagcctcagcctgaaggaaagacttcagcagtggtgttggcagatggagccacaattgtggccaaccctattagcaatccattcagtgctgctccagcagcaacaaccgtggtgcagacccacagccagagtgctagcaccaacgctcccgcccagggctcatcgccacggccaagcatactccggaagaaacctgccacagatggaatggcagttcggaaaaccctcattcctcctcagcctcatgatgttgctagtcctcgagtggaaagctctatgcggagtacgtctgggtcacctaggcctgcaggtgccaaacccaagtctgaaatccacgtgtctatggccactccggtcactgtgtccatggagactgtatccaatcaaaataatgatcagcctaccattgccgtccctaaaactacccagcagcccccaccgaccattccaactatgattgcagcagccagtcccccgtcacaaccagccgttgccctttcaaccattcctggagcggtccccatcactccacccatcaccaccattgcagctgcaccacctccatcagtcactgtgggtggcagtctttcctccgtcttgggccctcccgttcctgaaattaaagtgaaagaagaagtagaaccaatggatatcatgaggccagtttctgcagttcctccactggctaccaacactgtgtctccatctcttgcattgctggcaaacaacttgtccatgcctacaagtgacctaccacctggtgcctccccaaggaaaaagcctcgaaagcaacagcatgtggatctcaacagaagaaggtgacatgatggagacaaacagcactgatgatgagaagtccactgccaagagtcttctggtgaaggctgagaagcgcaagtctcctcccaaggagtatattgatgaggaaggtgtgagatatgtcccagtgcgtccaagaccccccattactttgcttcgtcactatcggaacccctggaaagctgcttaccaccactttcagaggtacagtgacgtccgggtcaaagaggagaagaaagctatgctgcaggaaatagctaatcagaaaggagtatcctgtcgtgctcaaggctggaaagtccacctctgtgctgcccagttactacagctgacgaatctagaacatgatgtctatgaaagacttactaacctgcaggaagggattatcccaaagaaaaaagcagcaacagatgatgatctccaccgaataaacgaactgatacagggaaatatgcagaggtgtaaacttgtgatggatcaaatcagtgaagccagagactccatgcttaaggttttagatcataaagaccgtgtcctgaagctgcttaacaagaacgggactgtcaaaaaagtgtccaaattgaagcgaaaggaaaaagtctag

SEQ ID NO: 8738 - DNA, 423 bp, Homo sapiens
  SIMILAR (16)..(54): 611254mologous to Felis catus hnRNP A/B related protein,accession number AF153444,Smith-Waterman Score=45.
cgacccacgcgtccgccaaagtctaacaaaagacaatgtcttgttttcgtcaccccccaaagaagaggaacctgtgagaaatattctggagaaatttaacaccatcagtggaagcaaggtgaggagtctctacctccatgcgcctcccctcctgcctctggagaggtagccctttggttaatggcaacccaatagggtaaccaaccatcccattttagcattgagagcattgtgtcctgggagacccttccctggaatgtaaataatcctggttttagaaacaaagtgtggaaggttggaggaaatgcacgaaacccgtaagttttagagggtctgaaagcaacattgtctatcaaatggatacggcacagattattcatctttacttgttgtcacccatttgaccactgatattggcaacca

SEQ ID NO: 8739 - DNA, 484 bp, Homo sapiens
  SIMILAR (197)..(484): 1001254mologous to Homo sapiens dJ152L7.2 (PTD011 protein),accession number AL109918,Smith-Waterman Score=478.
atgcgcgcggcagggagggcgtttccaggagggagcggcctttgctcagcgcgagacggctgggcgccgagtgggacagcgctggtgcggagactgcttccggactccaggtaccgcgcttggcggcagctggccccagacttctgtcttttcagctgcagtgaaggctcggggctgcagaattgcaaccttgccaatggacctgatcggttttggttatgcagccctcgtgacatttggaagcatttttggatataagcggagaggtggtgttccgtctttgattgctggtctttttgttggatgtttggccggctatggagcttaccgtgtctccaatgacaaacgagatgtaaaagtgtcactgtttacagctttcttcctggctaccataatgggtgtgagatttaagaggtccaagaaaataatgcctgctggtttggttgcaggtttaagcctcatgatgatcctgagacttgtcttg

SEQ ID NO: 8740 - DNA, 776 bp, Homo sapiens
  SIMILAR (300)..(359): 761254mologous to Felis catus hnRNP A/B related protein,accession number AF153444,Smith-Waterman Score=76.
aagggcagtactttggtgagtttggggaggtgaatttctccccaggatatggtttatgctccccaccagccaccagtggatgcttttttctgttttccttggctgggggagttgtcagtggagctgctctcacctcctttcttgcctttggagggccgccttttctgagttccctttagggcctgagccaggggaaggcattggccctgagctttgcctgtgtttccagatggaggccattgaactttcagtggatccaaagtctaacaaaagacaatgtcttgttttcgtcaccccccaaagaagaggaacctgtgagaaatattctggagaaatttaacaccatcagtggaagcaaggcactgaggtccagaggggagttatttacccaggtcacatcagatgaagataatgaagtattccaagaggattttagttttattccaaatagggccgcccggattcagccggagggcatggaccgggtggagtcctgcaaggcgagaagggacacagcgcatgcgcgcggcagggagggcgtttccaggagggagcggcctttgctcagcgcgagacggctgggcgccgagtgggacagcgctggtgcggagactgcttccggactccagttcaccgaaaatctcttagttctccgaattttggaggatttggggcgggcagcgaggctgtcccctgtcaccttgttttgtacctggtatggtaaatcgttttgctgcattgcatccaagatgcgttttagtccttccaaggcttga

SEQ ID NO: 8741 - DNA, 274 bp, Homo sapiens
  SIMILAR (274)..(2): 971254mologous to Homo sapiens dJ718J7.3.1 (Similar to mouse tumour stroma and activated macrophage protein DLM-1, isoform 1n),accession number AL035541,Smith-Waterman Score=467.
tttcggagtttgcaatggaaatccaggtgttgggtccattctggcagatcatgttgattggattgtgctggtaaataattgaggctgactttgctcttcttccagaatcttctgggcggtaaatcgtccatgctttggactgctcatccatgtccagaaggtgcctgctcttcatcctgtacaagtctcggttcacatcttttgctgtcctcattcccagtgcttgggcgatgaccagggccctctggggaccattgactttgagaaacctgta

SEQ ID NO: 8742 - DNA, 999 bp, Homo sapiens; identical to SEQ ID NO: 2024
  SIMILAR (167)..(36): 761254mologous to Homo sapiens Human secreted protein, SEQ ID NO: 7131,accession number G03050,Smith-Waterman Score=174.

SEQ ID NO: 8743 - DNA, 604 bp, Homo sapiens
  SIMILAR (480)..(139): 331254mologous to Mus musculus neural variant mena+ protein,accession number U72521,Smith-Waterman Score=115.
gcataaacgttcttcaagttcccaccagactcaggagcccagctggcttcaccccgtggatctcgcattggggctgcaggtggagctgcctgccagtcccgagccttcggccgcactcctcagcccttgggtggtcgatgggactgggcgccctggagcagggggcggcgctcgtcggggtggctccggctgcacaggagcccacggaggcgggggtagctcaggcatggagggctgcaggtcccgagccctgccccgcgggaaggcagctaaggcccggggagaaatcgagcgcagcgccgctgagggagccggcttcggccttggccggcccagaaaggggctcccacagtgcagcggcgggctgaagggctcctcaagtgccgccaaagtgggagcccaggcagaggaggcgccgagagcgagcgagggctgtgagggctgccctcatgctgtcacctctcacctgggtctggagctgcagctgtgcccagaagtgtgggctcccgctggccttgtggagcgcacaactctggccacaccccccacttcagccagtttcttctcagcagccactccagagggaccacctctggcatcttaa

SEQ ID NO: 8744 - DNA, 537 bp, Homo sapiens
  SIMILAR (3)..(113): 831254mologous to Homo sapiens hypothetical protein,accession number AL162044,Smith-Waterman Score=148.
agggagccgtctccggccttgtccagcccagaaaggggctcccacagtgcagcagtgggctgaagggctcctcaagtgtcgccaaagtgggagcccaggcagaggaggctttatgtaagaaaaggaaaaaacttccctccatccctcccatggtccaatgaagcatttttcaaccctgacctcacatcggcattactattttttttcagtgggaattcctgagtaaatctaaaatagttctaaaaaataaagtttatttaaaaagaaggagaaggaggaaaacacagactaacctgtgaggatgtgtcctccaaaaccctcaggacactggaagcacccaggggaataactcctctggatccaaattgcctgcctgagatatttaccatgatccctactctttaacaaacactgacctcccatttttggtcctatgtttctcatgatttataattctgttgaattttgagatcttttagggagtgagctcatgttgttctcaccaaactcagtgaagagttttcattgtcagaagaa

SEQ ID NO: 8745 - DNA, 3206 bp, Homo sapiens; identical to SEQ ID NO: 69
  SIMILAR (298)..(1890): 901254mologous to Homo sapiens putative p150,accession number U93564,Smith-Waterman Score=2552.

SEQ ID NO: 8746 - DNA, 870 bp, Homo sapiens
  SIMILAR (555)..(376): 831254mologous to unidentified cloning vector lacZ alpha peptide,accession number U13869,Smith-Waterman Score=251.
ctaactgtccatcattgttggttgaaagctgcttccaggagtgtggatcctccattccatttgccttgccgagcactcaggttgagcatgctctttatgccagtgagaggtgacagcgtgctggcagtcctcacagccctcactcgctctcggtgcctcctctgcctgggctcccactttggcggcacttgaggagtccttcagcccaccgctgcactgacctccataagcttctactttaactggaggaccacaataacgtttagggtccgctggtatcaacgtcagctcagagccagtgtccagtagtcgcccaaatgtctgatcatttccctttccgcagtacacagttaccctggtaaaaggctggagatctcgtgaaccatcacccaaatcaagtgttttggggtcgaggtgccgtaaagcactaaatcggaaccctaaagggagcccccgatttagagcttgacggggaaagccggcgaacgtggcgagaaaggaagggagaaagcgataggcagcgggcgctagggcgtggctaagtgtagcgatcacgtgcgctaaccaccacaccttgcgcgctaatgcgcgcattctccaagtgatcacatatccagaggacatttcctctgcagttttcttcctttgttcattccctattcttgccttggtcaggtttctttccttgtgtttactttcattttgtatatcttctttggtgaaaaatctgttggaaacttttgtccattttttatatttgatgtgtatcttattattgagtcctaaaggtttcttatttttcctggagattggtattttgtccgatacctgtgcttttagctggattgctttaatgggccattccgccat

SEQ ID NO: 8747 - DNA, 399 bp, Homo sapiens
  SIMILAR (351)..(103): 431254mologous to Mycobacterium avium Gsa protein,accession number AJ251811,Smith-Waterman Score=121.
tttaggctttttaattaaaattttattttacatgtttttaaaattcacaatagatattttatcctaaaataaagtaaaaccgagaggtgacagcgtgctggcagtcctcacagccctcgcttgctctccccgcctcctctgcctgggctcctactttggcggcacttgaggagcccttcagccctccgctgcactgtgggagcccctttctgggctggccaaggccgggtgggcgtgggcttggcgggccccgcactcggagcagccggccagcctaagcctcccacccactccaagggctcctgtgcggcccgagcctcctcgacgagcaccaccccctgctccacggcgcccagtcccatcgaccacccaagggctgaggaatgcaagcgcaccgtg

SEQ ID NO: 8748 - DNA, 1491 bp, Homo sapiens
  SIMILAR (499)..(915): 611254mologous to Homo sapiens p40,accession number U93571,Smith-Waterman Score=441.
atggagcagggagccgcactcctcggggaggctccggctgcacaggagcccacagcagggcagggggaggctcaggcatggtgggctgcaggtcccaagccctgccctgcgaggagacagctaaggcccagtgagaaatcgagcacagcagctgctggcccaggtgctaagcccctcactgccaggggcttgtgggctggccagccactccaagtgtggggcctgccgagcccacaccctcctggaacttgcgctggcccgcaagcaccgtgtgcagccctggttcccatcggcacctctccctccagacctctcagcaagctgagggagctggctctggccttggccagcccagaaaggggctcccacagtgcagtgaaagccctcccagaagcttcccagtatggctccatccaagccaagctgccgcaaagctcagggttctactgtatgattacacgctgccatctcctggccaaagcactgaacttgggcccagatcactcctcctcaccagcaatggaacaaagctggacagagaatgactttgatgagctgacagaagtaggcctcagaaggttggtaataacaaacttctccgagctaaacgaggatgttcgaacccatggcaaggaagctaaaaaccttgaaaaaagattacatgaattgctaactacagtaaacagtgtagaaaagaccttaaatgacctgatggagcttaaaaccatggcacgcaaactacatgacacatgcacaagcttcaatagccaattcgatgaagtggaagtaagggtattagtgattgaagatcaaattaatgaaataaagttagaagagaagtttagagaaaaaagagtaaaaataaatgaacaaagcctacaagaaatatgggactatgtgaaaagaccaaacctactgagaggtgacagcgtgctggcagtcctcacagccctcgctcgctctcagcgcctcctctgcctgggctcccactttggcggcacttgaggagcccttcagcccgccgctgcacagtgagagccccttcctgggctggccaaggccggagctgggtccctcagctgctccgtgcgcccctgtgccgccggagcctccccaacgagtgccaccccctgctccatagcgcccagtcccatcgaccacccaagggctgaggagtgtgggcgcatggtgcaggactggcaggcagctccacctgcaccccggtgtgggatccactgggtgaagccagctgggctcctgagtctgcttatgagcatggtcataagaattaatatgattgtcaaactcctggtgtttgtgatactgcttgtcacataattcacagtaaaagtttgcctttacatcttccagggcctttgctgtggacttcttttctgcaaaatccttcatggcagcccctctcatcacaggcccaaagacctttggcatcactgtgacctggatgtgagacatgaggtcaaaggagatcat

SEQ ID NO: 8749 - DNA, 1227 bp, Homo sapiens
  SIMILAR (164)..(3): 701254mologous to Homo sapiens Human secreted protein, SEQ ID NO: 7678,accession number G03597,Smith-Waterman Score=155.
atgaagccgcggaccctcgcggtgagtgttacagctcttaaggtggcgcgtctggagtttgttccttctgatgttcggatgtgttcagagtttcttccttctggtgggctcgtggtctcgctggcttcaggagtgaagctgcagaccttcgcggtgagtgttacagctcgtaacagtgtggacccaaagaactcaggagcccagctggcttcacccagtggatccagcaccagggctgcaagtggagctgcctgctagtcccccagtcccccgccgtgtgctcgcactcctcagcccttgggtggtagatgggactgggtgccctggagcagggggtggcactcgtcggggaggctcaggccgcacaggagcccatggagcggctgagggagtgggctccggccttggccagcccagaaaggggcctcctacagtgcagtggtgggccgaaggactcctcaagtgccgccaaagtgggagcccaggcagaggaggcgccgagagcaagcgagggctgtgaggactgccagcaagcacgctgtcacctctcacctggaggaatgtgcgggcaagagtgaaaattcacacatgaacctcaactgctctggtgggtctctgggccctggcactggtgcccacttgcccctggggccagactcggggcagcctgctgagactctgctgtgggggccctgctgtgggcccggcggcactgggctcacaggctcgggccagacaatcagcctcgggtgccagggaggacagccacgcagggaggtgaagcctccagttccacaaagggtgtctgtgctcttggtcgctgtcaaccccccacccgacagccggtgccgtgtagaaacagatcgtccctggagactctgcatccagagctgcctctgtgggactctcaagcgggatgttttacactcaccatctgtggtcttcaacacaacccgtggtgggacagcagaatggtcccgtgaagacaaagatgctctgctgcctgagtacgctctccatatgcccttcgctgtgggcttcaagctggagtacaaagaaggagtactgggctcaaatctggctgcaggtcctgagaaggagctctgcgaagcaaagaggaatcagtgcccaaagtctggggtcagccacacttccaggcctcttaaacctgaatggtcagattttgtggctgagattgatgagtccaagttgccagatcgaagctga

SEQ ID NO: 8750 - DNA, 2784 bp, Homo sapiens
  SIMILAR (1345)..(590): 741254mologous to Homo sapiens putative tumor stroma and activated macrophage protein DLM-1,accession number AJ300575,Smith- Waterman Score=958.
gagtctctgagagctggaagtttccagcaagagatccagcccgagctggctccgttaatcattctccgtggattcgggacttggcctggatggagttttcaggccacagggttctgcgtgggggtgcgtggcagcccaggaagtgggttcagaggctgtggggcttaccgggcaccttgatctttccggacccaactgtggccctggcagcccctgcagggactggacccaaagcctctgaaggacgcattgaggccatcacctctgggcagacgggcatgcgcagagcatcacctgtgctccgcagacgaacggcctgacttgggatttgagggtctgcagagatggggtgggtgtagggggtctcagggtaaacccgctgtccaccaggcttggggcagatgtggggaaggaacaggagggggtcacacgggatcccccccaccccgcctgaccccacctcaggccctggaagtttccgagcccagcctggtgagcggcggccggcggcgtgcggccagcagagggcgctcgggccaatgcgcccacccccagcctgtgtccaagccccacgtgaggctgtgcactaaatcccacctccccaccagctcccctcgtgtgaggcttcatccacatagtggctgccttctgcagctttgtgactcctgtttccaagagtcatagtttccagcttgggggtgagcttcgagtggctgggagtgatgagtggaaggtggggagagagagagaacacacaggggtccactctgccccctagctcacctgcgtcctcccctggctccccctctccagaccctgcgactcctcctgggccagccacccctgggctgatagacattttgttgctgttgccgatggtggcgtcctcgagaaagcacgatttcatgtggattctctgggcggcttccccctcagggtgagttcttccagtgaggacccacggggtggcagagttgggtctggcctctagatcccagttacctggggggctgccaggggggatgtgggcagggccctcggacgggacgccgtggagcctcatctcattgctgtgtcccagctgcacccgtctcagtatggactgctccagaggatccggtggctccccaccgaggtcccctccctgggctctcttgggtgacttaccgtcctccctggagactgtctgtcttgtaatgatgttcccgtgtccaatctggatggcttcggagtttgcaatggaaatccagctgttgggtccattctggcagatcatgttgattggattgtgctggtaaataattgaggctgactttgctcttcttccagaatcttctgcaaaataatattcaactgtatccctttgccactgtctatgggtcaggggttcccaataccagtcggcagcaccaaattctcctgggcaagcactagtgtcatggtttccctctgcagcccagacacaggcagccgggggcctacctgggcggtaaatcgtccatgctttggactgctcatccatgtccagaaggtgcctgctcttcatcctgtacaagtctcggttcacatcttttgctgtcctcattcccagtgcttggggttcctggggagtgggatcctgtgtcccgggaactgaagggacatgcaaaaacttaccccgttgttgggtccattgccaggatgctccctgcagggtcagacccgcctccccggggtggcagttaccagggctggacaaggccagctctgcaggaccctcgccttcaggatcagtcccgcccaagcaccaggtggcaggggatgtgagggagactttcaactcctttttcattcggtagaggacttggttgagctccctcttgggtgcttggcattccttcaccagctgggcaaagtagaaatctcaccccgggagctaccgctggtccttggaaggaagaagtactgtaccttctctgcccgggtcagcaggagcctgggccatgctgacagcagctgcaaggagtcggagagacttggcaggtgtgcaggcttctgcactgtggccctgagagggtgggctaggtcgaggctggggcttctgaagtggccgagcctggtgcttcttgcagctctgaacccacaagggatttgtccattcatgagggcagagccctcctgacctaatcacttcttaaaggtcttacctttttaataccatcacaatggcaattaaatttccacatgagttttgcaagggacattctaacaatagcagttccattacaggaagccagacacacatgctgaactaatttcaacaaatatcaacttaaaactaacctgaagtcgttggaaatggacggactggttcagacacggctgccttccccagcttcatgcacaggaaactgcactgtctacacaatgcaagagtgttgctgagagatgacagcgtgctggcagtcctcacagccctcgctgctctctgcgcctcctctgcctgcgctcccactttggcggcacttgtggagcccttcagcccaccgctgcactgtgggagcccctttctgggctggccaaggccggagccggctccctcagcttgcagggaggtgtggagggagaggtgcgagtgggaaccggggctgcgagcaagagccagctggagttccggaggtcagattgcgaatacctggggcttcctagggtccagtgcggcagttaccgcacctgccttcaccggtgaacctttagccagctgaacaaccaccaaagcgccctgcagagacaagtcatcgagcc

SEQ ID NO: 8751 - DNA, 662 bp, Homo sapiens
  SIMILAR (11)..(340): 941254mologous to Homo sapiens origin recognition complex subunit 3,accession number AF125507,Smith-Waterman Score=530.
acgcataccccttcttgttacgaggcttaaaataaatgaaaaagtattacaggttctgaccaacatctttttgtttcatgatttctcagttcaaaactttataaaaggacttcagctttctctattagagcatttctattcccagcccttaagtgtcctgtgctgtaatcttccagaagccaaaagaagaataaattttttatcaaataatcaatgtgaaaacatccgacgtctaccatcttttaggaggtacgtggaaaagcaagcttcagaaaagcaagttgcgctcttgaccaatgagagatatttgaaggaggaaacacaattattactagaaaaccctgcatgtttatcatatgaattacttcctggttttgagatgtcttcataagttcacctcttctcttcccaagtatccactaggtcgacagatcagagagttgtactgtacatgtttagaaaagaacatatgggattcagaggagtatgcatcagtcttgcagctgctgaggatgttggcaaaggatgaactgatgaccatacttgagaaatgtttcaagggttttaagtcttattgtgaaaaccaccttggcagcacagcttagagaatagaggagttcctgggccagtttcagagcctcgatgaaccaagaggaagaaga

SEQ ID NO: 8752 - DNA, 1218 bp, Homo sapiens
  SIMILAR (412)..(933): 741254mologous to Homo sapiens Human latheo protein internal reading protein sequence,accession number W53461,Smith-Waterman Score=638.
atggggaaacgccagcagccagcgcagaacacttacatgagagttatcccatcagaaaagcaagggagatggggtatctatataccaccttccatcagtcattggctgaggtctgctaagaataggtttcgagggcattattccccagccctccagcctgctgtgtgcatgcaggcacaacaggctccagccatcagagagagcactggaggagttggaaggcaggagaagcgcccttctgtaagaagaactaagacatataggaagatagcagctgccaagctgtttcaggtcagcaaatatgaccccattgtcagccgtttgaaacccaattctccatggcaattttatttttatgctggaccattccctgaagaatgtacaagaccaggagtgaaccctaatgtaaactatggacctcaggttgtaacgatgtgtcaatgtagcttcattgagcgtaacaaacgtattcccgtggtgcagggcatccgtagaggaagaggccatgtacaatgggggagatatgtggaaaagcaagcttcagaaaagcaagttgcgctcttgaccagtgagagatgtttgaagaaggaaacgcaattattactagaaaacctgcatgtttatcatatgaattactttctggttttgagatgtgttcataagttcacctcttctcttcccaagtatccactaggtcgacagatcagagagttgtaccgcacatgtttagaaaagaacatccggaattcagaggagtacgcatcagtcttgcagctgctgaagatgttggcaaaggatgaactgatgaccatacttgagaaatgtttcgaggtttttaaatcttcttgtgaaaagcaccttggcagcacagctaagagaatacaggagttcctggcccagtttcagagcttcgatgaaaccaaagagaatgaagcactgaaaagggaagaagggtgcattccaaatatcaccccagacatctgcatagcatacaaattgtacctagagtgtcgcaggctaatcaaccttgtggactattcacaggcttttgcaacaattttgacagctgctgaaaaaatggatgcaaattctacatcctcagaagaaatgaatgaaattatctatgcttggtgtattagaactgtttttgaactagaacttttaggatttataaaacctaccaaacagaagactgaccatgtggcaaggctaacatag

SEQ ID NO: 8753 - DNA, 948 bp, Homo sapiens
  SIMILAR (70)..(354): 1001254mologous to Homo sapiens Human latheo protein sequence,accession number W53459,Smith-Waterman Score=492.
ggggagataaactctgagaccctatttcgagtgcactagtccatgtggtggaattccttttatctatagtccttattggaaatgaaggagttaagaagaagtaagaagcaaaccaaatttgaagtactcagagaaaatgttgtgaacttcattgactgtctagtgagagaataccttctgcctcctgagacacagcctctccatgaggtggtgtacttcagtgctgcccatgcccttcgtgagcatttaaatgctgctccgcgaattgccctccatactgcactcaacaatccttactattatctcaagaatgaagcactgaaaagcgaagaaggctgcattccgaatatcgcccgcagacatctgcatagcatacaaactgcacctagagtgtagcaggctcatcaacctcgtggactggtcagaggcttttgcaacagttgtgacagctgctgaaaaaatggatgcaaattctgcatcctcagaagaaatgaatgaaattatccatgctcgggatattagagctgtttctgaactagaacttttaggatttataaaacctaccaaacagaagactgaccatgtggcaagactaacatggggaggctgctagaaagcaaataagcaaagccagaactatcacatttagcttaagagaaaaaggtgaccagtcatatttacatatattagaggagcctgttttgttgagaagataaatgtgtaacccccattgatgtttaaccagaaaagtacattgctaacccccaaacaggcatgtatcaaaacacctgtggagtactttagactccaacaaataataatgtaactaaaactgctcacacattttactgtactttccaaagtcattactaaattgtgagtaaatcattcttgaacttagagtatgtaaatgtaataaattccgttatccaggagtataaattaaaa

SEQ ID NO: 8754 - DNA, 770 bp, Homo sapiens
  SIMILAR (1)..(252): 451254mologous to Homo sapiens N-acetyl-beta-glucosaminidase prepro-polypeptide,accession number M13519,Smith-Waterman Score= 150.
aaaagggttgggcacgaatttaaagaaactagattctcttaattccaaagggttggggaattatggcaaccataaacaaggggttcatggtttggccagggggttttgatgaataaacaaaggctggccccgggaacaatggtgaaggtatgaaaggacggggcatatcctggggaactcagaagagtcacagattctgggtttcctgtaatccctttcggttcctgggacttaagattggataagctagggccaagattggagaaaatactataaagtggaacctcttaattttgggggtactcagaaacagaaacaacttttcattggtggagaagcttgtctatggggagaatatgtggatgcaactaacctcactccaagattatggcctcgggcaagtgctgttggtgagagactctggagttccaaagatgtcagagatatggatgacgcctatgacagactgacaaggcaccgctgcaggatggtcgaaggcctggcatctttcttgtgagacaagcttaaggacacaaaaagaaccacacctttgtgataccactcttctgaaggctacttatagtaataacttcatagatgaacagcatgattcagatctgccaggacagggctgagataatctctagctactgtaacctcaagattcatcagaggctccaaaacttgcttatcagctttcttcagagcctaaagaaattaaagaatgttaacttatctttcataaataaaaacttaaaataaaaaaaaaa

SEQ ID NO: 8755 - DNA, 678 bp, Homo sapiens
  SIMILAR (105)..(347): 401254mologous to Streptomyces mobaraensis elongation factor G,accession number AF153617,Smith-Waterman Score=144.
gttaaagcaagcttatgtctttttgtatgagctctaggctgtatttatttgagggttttatttatgaaagataagttaacattctttaatttctttaggctctgaagaaagctgataagcaagttttggagcctctgatgaatcttgaggttacagtagctagagattatctcagccctgtcctggcagatctggcacaaagaagaggaaacattcaggaaattcagactcgccaggacaacaaagttgttattggatttgttcccttagcagaaattatggtaggtactttgtaactgaaaagtacatattcttcttaattcaggggatattatatgccaatgaatagacaatcagtaacctgaatcatgctgttcatctatgaagttattactataagtagccttcagaagagtggtatcacaaagttgtgtttcttttgtgtccttaagcttgtctcacaagaaagatgccaggcctctaaatgtaataagatagagggtcaaaggttcaatcaataaaaatattgtattcatacaacagtctcatgtcttattgtacatgatttcaacataaagctgattgtagtacagattgctgtggccgttgtcccctccatttttacatgctctcatggttacatatacagcatgaaagagttgtgcagctattccacgt

SEQ ID NO: 8756 - DNA, 983 bp, Homo sapiens
  SIMILAR (411)..(983): 891254mologous to Homo sapiens Sop2p-like protein,accession number Y08999,Smith-Waterman Score=912.
gaaacaactgaagcaaggaatgccttaattgaacaagttgcagatttggatgatgaatctgctgacttggttttagaagaattttgtgagaattttgatctgttaccagctgaaaagctacagactgcaatacatagagtgacactagctcagacagcagtgcctgtgctttgtggaagtgccctgaaaaacaaagggatacagcccttgttagatgctgttactatgtacttaccttcacctgaagagcgtaactatgaatttctgcagtggtataaggatgacttatgtgcattggcatttaaagttctccatgacaagcagcgaggaccactggtttttatgcgcatttactcaggcactataaaaccccagttggccattcataaatattaaatggaaactgcacggatcgtacccagattgccctcagtgtcaataatcacgaagtgcacatctataagaagaatgggcgccagtgtgtgaaagctcacgaactcaaggagcacaatggacacatcacagatattgactgggctcccaagcatgaccacatcgtcacttgtggggcagaccacaatgcctatgtctggagtcagaaagatggtgtctggaagccaacactgatgatcctgagaattaatcgcacagctacttttgtgaagtggtccgccctagagaacaaatttgctgtgggaagtgaagcacgactcatttcagtttgttactttgagtctgaaaatgactggtgggtgagcaagcacattaaaaagctgattcgctccacagtcctcagcttggattggcatcccaacaatgttttgctggcagcaggatcatgtgacttcaaacacagagtgttttcttcctacattaaagaagtggatgaaaagctggccagcatgccctgggacagcaagatgctttttgggcagctgatgtcagagtctggtggcggtggcactggtggctgggtccacggg

SEQ ID NO: 8757 - DNA, 1685 bp, Homo sapiens
  SIMILAR (14)..(271): 341254mologous to Thermotoga maritima translation elongation factor G,accession number AE001799,Smith-Waterman Score=103.
ggatgacttatgtgcattggcatttaaagttctccatgacaagcagcgaggacccactggtttttatgcgccatttaactccaggccactataaaaaccccagttggcccattccataatattaatggaaactgccacggagagaataagtcgtctgcttttgccgtttgctgaccaacatgtagaaatcccttcattgactgctggtaacattgctttgactgttgggcttaaacatactgccactggagacaccattgtctcatccaagtccagtgcattagctgcagctcgtagagccgaacgggagggagaaaagaagcacagacaaaacaatgaaggcagagagacttttattggctgggagtgggagattccaggaacctgttttcttctgtaccataggaacccccatcactgtctaaggcagccagatttgggaacatgcgtttgaaatgtctttcagcgtgaggatccccgttttgaaagtgaggctagatcctgactctggacaaactgtttctgtgtggtatgggggagttacatatagagattattcatgatcgaatcaagagggaatatggactggagacctatctcgggcctctccaggtggcatatcgagagaccatcctaaactcagttcgtgccacagataccttaggataggaactttagggagacaaaaggcatcttgttgacttgttaggaagtgggaaggcaaggccaattgaaacatcatctgttatgcctgtgattgagtttgagtatgctgaaagtatcaatgaaggccttttgaaggtctcccaagaggccattgaaaatggaattcacagcgcatgtctccaaggaccattgcttggatccccaattcaggatgtaggcaattacctttacattccctgacaaattcatccctgggcaccttccacaacttatgatttctgcctgtgtctcaagatgccgtgcaaaaaggctcttgaaagaaaagctgataagcaagttttggagcctctgatgaatcttgaggttacagtagctagagattatctcagccctgtcctggcagatctggcacaaagaagaggaaacattcaggaaattcagactcgccaggacaacaaagttgttattggatttgttcccttagcagaaattatgggttattcaactgtgcttcgaacgctaacatcaggctcagctacttttgccttagaactatctacttatcaagccatgaatcctcaagatcaaaatacactgctcaaccggagaagtggtttgacctaaatgttttagtttttgggagagaaatccaggagcacctagctacttcattttcagtaagaacaatttttattgctttatttattggacgaataaagtactgtttcagtacattcagagaactagataaaagatataacttaagctttgatagtggcactggagccacccgttttaatttatataatgagaaatgtgctttgatgtttaaagccactgtacctgaatcatgctgttcatctatgaagttattactataagtagccttcagaagagtggtatcacaaagttgtgtttcttttgtgtccttaagcttgtctcacaagaaagatgccaggcctctaaatgtaataagatagagggtcaaaggttcaatcaataaaaatattttattcaaa

SEQ ID NO: 8758 - DNA, 1058 bp, Homo sapiens
  SIMILAR (3)..(227): 1001254mologous to Homo sapiens Human PRO1194 (UNQ607) amino acid sequence SEQ ID NO:29,accession number Y99348,Smith-Waterman Score=361.
aggtggtgctgggcctctcggtgctgctgacggcggccacagtggccggcgtacatgtgaagcagcagtgggaccagcagaggcttcgtgacggagttatcagagacattgagaggcaaattcggaaaaaagaaaacattcgtcttttgggagaacagattattttgactgagcaacttgaagcagaaagagagaagatgttattggcaaaaggatctcaaaaatcatgacttgaatgtgaaatatctgttggacagacaacacgaagttgtgtgtgtgtgttgatggagagtagcttagtagtatcttcatctttttttggtcactgtccttttaaacttgatcaaataaaggacagtgggtcatataagttactgctttcagggtcccttatatctgaataaaggagtgtgggcagacactttttggaagagtctgtctgggtgatcctggtagaagccccattagggtcactgtcccagtgctttagggttgttactgagaaagcactgccggagcttgtgagaaggaagggatggaatagttagccatccacctgagtagtctgatccagtcggcatgatgacgaagccacgagaacatcgaccctcagaaggactggaggaaggtgaagtggaggtgagagacgctcctgatcgtcgaatccgcaggatcaggccttcagtgggacttatcgcacgaccagagtggggggatttccctcaacagtgatgaaggagacgtgtcttggatggaggagcagctgtcctacttctgtgacaagtgccaaaaatggataccagccagtaaggagcttctcaattcctttgatttgtcaattcctgtgtgaaggtttgtttttccaacctgtgaaagaaacgtgaatgtaaaagagacctaaataaaaggataattatatttattctctagttgatcagctataaatttatataaaacataggcatgtttgtactaatgaaacgtactgtcaacctctatcacattgttaaattaacacttttggtggtaactcaataaaattgagaaaattggaaaaa

SEQ ID NO: 8759 - DNA, 3262 bp, Homo sapiens
  SIMILAR (1)..(2283): 841254mologous to Homo sapiens dJ717M23.1 (novel gene),accession number AL050321,Smith-Waterman Score=3237.
  misc_feature (1)...(3262): n = a,t,c or g
atggatagtagcatccacctgagtagtctgatcagtcggcatgatgacgaagccacgagaacatcgacctcagaaggactggaggaaggtgaagtggagggagagacgctcctgatcgtcgaatccgaggatcaggcatcagtggacttatcgcacgaccagagtggggattccctcaacagtgatgaaggagacgtgtcttggatggaggagcagctgtcctacttctgtgacaagtgccaaaaatggataccagccagtcagctgagggaacagctcagttaccttaagggtgataatttttttaggtttacttgttcggattgctcagcagatggcaaggagcagtatgaaaggctgaagctgacatggcaccaagtcgtcatgttggcattgtacaacttgtctctgaaaggaagtggacgtcaaggttatttcaggtggaaagaagatatctgtgcttttattgagaaacattgaacttttttactaaggaataggaaaaagacgtctacctgcaggagcaccggggcaggttgcctcagcgtgggaagtcccatgtacttccgataaggtgcttaggaatttggagagccaagatggtggaaacttgttcataacttgcccttaacgatgaaacctgaacgagagaagacggctgcctctactctgaacattttcgcagcctcaaaaccaactttagatcccatcattactgttgagggacttagaaaacgagcaagtcggaatcctgtggaatctgccatggaattaaaagagaaaaggtctcgaactcaggaagcaaaagacattagaagagcccagaaggaggccgctggctttcttgacaggagcacatcttctacccctgtaaaattcataagccgaggccgcaggccagatgtgattctggaaaaaggcgaagtgattgacttttcctccttgagctcctctgaccgcaccccgctgacaagcccatctccttctccttctctggatttctctgcccctggtacacctgcctctcattctgccacacctagcttgctttcagaagcagatctgattccagatgtgatgcccccacaagccttgtttcatgatgacgatgagatggaaggcgatggagtcatagacccagggatggagtacgtcccaccccctgctgggtcagtagcttctgggccagtggttgggggcagaaagaaggtcagaggccctgaacagataaagcaggaggtagagagtgaggaggaaaaacccgacaggatggatattgacagtgaagacacagattcaaacacatctttgcaaacaagggctagagaaaagaggaagcctcagctggagaaggacacaaagccgaaagagcccaggtatactcccgtgagcatctacgaggaaaagctgctgctcaagaggctggaagcttgtcctggtgctgttgccatgactccggaagctcggagactgaaacgccaaactgattgtcagacaagcgtaaaagggataggggattaccactttttgacttggatcaaagttgttaatgctgctcttttgttagttgacgggatttatggagccaaagaaggaggaatttccagacttccagctggacaagccacgtacagaaccacctgtcaggacttcagaatccttgaccgataccagacttcctttgccgtccaggaagggttttcggacaccaggaccaccaagtttttgtatcgcttggtaggatcagaagatatggctgtggaccagagtattgtcagcccttatacctctcggatcttgaaaccttatatcaggagcgaccctcactggacgccggagcccgacgcacctctcgattactgttatgtgcggccaaatcacatcccaacgatcaactccatgtgtcaggagtttttttggcctggcattgacctgtgctgagtgtctgcagtacccagacttcagtgttgttgttctttataaaaaagtcatcattgcctttggcttcatggttcctggatgtggaaatacaatgaagcttacatttcatttctgttcgtccaccctgantgggagaagagcagggattgcaactttcatgatctatcatctgattcagacctgcatgggcaaggacgtgagcgctttacgtctcaaaaagcaaccccgctatgctactgtaccaaaagtttggatttcaagactgaagaatatgtattagatttctatgataaatattacccattggagagtacagagtgtaaacacgcattctttctgagggctccggcgctggatgcgaatacagctcacagaggaaacgcatgtgctattgggaggaccaggtctttgtgggagatcctaaaggcagtgattgaatttcacagggagctctaatctctgtgattacatggtccttcaaactccccaacccaaagtgagaaaagcgggcatgccagtgaaaatgaagcagtgagcagccccttttagcaaaatcgcccctcccagtccctcccctggagatgccttccagcccagcatccccagactcccacagttatttaatgaaatgatgtcggtgattccccctcccacctgacagtttgtaagagtgaaagagcatcctaacctgatgctcttggagagagataacctgtctgtcataacttaaaggatgagaaaatgtggtgtagctattaaagattcatgcagtcccaaaaggcactgtccctgggatgatgagagattataaggtgatttcataaaaggaatcctaccctgtgcccggccattgatgtgttgtcattgaatccaggaggatttcttagggcacttgaagttttgttgtttcttttgctgactttggttacagtcagaaaaaaataaactagatgtttgtgtctacatgttctacctgttgtacctattagcatcttcctgcagggacttggggcccatggcctgggaggttggtttgggattggggttgttgggcagcctgccattcacctggcctatcctggcccttcttcatgcccaagacagttgtttcacaggagtggaagtgtgggtgatgcaagtagaaccctctagatgtaccctgtgtggtctgcaggactggactgtttgctgtgtttgtggatgttggcgatagactgtcaattaggttgtttgtgatccaacaagaacatttccaaaagtatctaggtgttctcaaataaaaagctttctttgcacaacccatggccagagcgtcaaaaaa

SEQ ID NO: 8760 - DNA, 813 bp, Homo sapiens
  SIMILAR (143)..(307): 451254mologous to Homo sapiens pot. ORF V,accession number X03145,Smith-Waterman Score=133.
atggagactcggtacccactgctgagggtggggaccaagtctgcgtcatcctctcctcagtgcctcaaacggtctgggagccaatgttcaacaaacgagcatgcgggcataaagtccatagtcattgtctgccaccagtatataccccagagaactgaaagcagggactcaaaaggatacttgcccaccagtgttcagagcagtattattcacaacagcaacccagtgtccctcaacagacgcctggatgaacaaaatgtggtacagccgtacaatggaatgttactcagccctaaagaggaaggaaattccgccacacgccacagcaaggcaccccatgtgcctacagttctgcaggtggtaaacgtgagtggctccctgctccggaggaccagtggggcagcagtggcggcagctgccagtctccctgttcccaggtgctggcggcatcacctagtcatgcaggtgacatggggcctcacacaaaaaaatgtaaataaaagcaagattgatgagcttggtcataccccatgtagtagttcatatccagagtcctgtgggaacatcgaagtgtggacaaagaggaaaccaaaagaacacacacagctgttctgtgcagctgtgcgtgcatctcccctgcagaatgctagagaaaaactacactgtgacactcaaaatactgaactgccgtgggccatcggcatgggcccctcagaatggaatctggtcgcgctagagcagcatgtccacattggccaactgtattcaactgacaagctgatcattgagaatcgagacatgcccaggacctag

SEQ ID NO: 8761 - DNA, 676 bp, Homo sapiens
  SIMILAR (13)..(288): 791254mologous to Homo sapiens CGI-203,accession number AF285118,Smith-Waterman Score=331.
  misc_feature (1)...(676): n = a,t,c or g
cctgacacccgtgcagactccagtcgcgcacaagtgttatctctgtaccgggcgatgctgagagagagcaagcgtttcagcgcctacaattacagaacatatgctgtcaggaggataagagatgccttcagagaaaataaaaatgtaaaggatcctgtagaaattcaaaccctagtgaataaagcccaagagagaccttggagtatttcgtggacaggtgccacattgggccaactgtattcaactgacaagctgatcattgaggaatcgaggacatgcccagggacctaggcaaggccgggggaccaggccaccagtggcggccaggggaccacctttcagcatccactgttctgttttgagctggggggctcccaaaacccagctttacaatagccttttgcggctgcctgtcctgtgggagctgattaaaccaagttcacatttgcattctgttgcaggcttaagtgaaaaaggacttgctgtctttccttgggttcaaggtgttagaatggaggagcttggagttcggttcagaatangttgctgtgttgttaccacgttctccccttgcacccccatttcctaccttgtagctcatgaccacttngtgtatagcattttctacacatttgttttcttggtccttggcccaataaaaagaatgatctccctg

SEQ ID NO: 8762 - DNA, 391 bp, Homo sapiens
  SIMILAR (266)..(39): 511254mologous to Homo sapiens chaperonin-like protein,accession number M94083,Smith-Waterman Score=170.
  misc_feature (1)...(391): n = a,t,c or g
ccatatcctccttttagctctgtgaagagcgactatgcctcctttgaaagagcatctaaggaaaaggggtcaatccccttntgattaataacaaatcctttatctgaattactacagactttccttttcagttctattatttgttttaactctatcttcaatgaattttctttcagcttttatgagtttttctctttctgcactcttgtaaaaaacgccagaattcacttctcttgtatcagtttcagatttatgtttcttgtcaatgatcacaaaatcatgaagagatcaataggttcatcttttcttttaatggccaaaatggagcccactacagcctctgttaagacatctgcaagttcagcatgaactttagtacaaagagatgccc

SEQ ID NO: 8763 - DNA, 617 bp, Homo sapiens
taataaaaaagatttctggaatgagggaaatgatcagtccattttagccagattagagttgcagtgctgtactttagtatgggtaaacagaaatgtatccagaaggagagaggggtgttcaggtcttctaagtagaagtcagacactcctcaaatattgtggacaggggtcatggtttagagtagaaaattgggctaacagagaagctttgaattcccatagttaatactggaggaaatgagtcatcggtgataagcaaagccacacacaatattgttggttcttattgactgaatttactttggttgccttttaggtgagcccgtggtagcagcagaagcaggcattatgggataacgattgtgtaaagaaacagcttcttcattcctggtaagtttgggaaaatgaaaactaaactgttagagaatcatcatactcttcatttggtgttttctgtttagttgctcattttcccccatgaataatgtaatcagctgaaagtatggaaaccgaactagccctctgatgtgtagaggggaagggggaaatttaattggatgttaacgtgtgcagcttagttggaagtgggaagttgagtcgaattagggctcctaatc

SEQ ID NO: 8764 - DNA, 800 bp, Homo sapiens
  SIMILAR (10)..(480): 951254mologous to Homo sapiens chaperonin-like protein,accession number M94083,Smith-Waterman Score=740.
  misc_feature (1)...(800): n = a,t,c or g
ctgcagattgtcttaacagagcctgtagtgnactccattttgcccattaaaaagcaagatgancctattgatctctcaatgattgagatcatggagatgaaacataaatctgaaactgttacaattttaatcagagggcttgttttggaccacggagcacggcatcctgatatgaagaaaagggtggaggatgcatacatcctcacttgtaacgtgtcattagagtatgagaaaacagaagtgaattctggctttttttacaagagtgcagaagagagagaaaaactcgtgaaagctgaaagaaaattcattgaagatagggttaaaaaaataatagaactgaaaaggaaagtctgtggcgattcagataaaggatttgttgttattaatcaaaagggaattgaccccttttccttagatgctctttcaaaagaaggcatagtcgctctgcgcagagctaaaaggagaaatatggagaggtatccgagtaatttgacttttactcattttgcaagtgaattgggattatttctttttccttatactttatttttgggttttttcaactgtatagttaattggcattaactatattcacattgtgcaccccgtcagcactgtccatctctaggacttttttcatcatcacaaactgaaactgtatacccattaaatagttactccccatttctccctcccccttgccccttgtaaacattattttactttttgtttctgaattcaatatacttttttccaaagagctccccacaataaaaagcttttttaaaaaaaaaaaa

SEQ ID NO: 8765 - DNA, 1411 bp, Homo sapiens
  SIMILAR (1)..(528): 861254mologous to Homo sapiens chaperonin-like protein,accession number M94083,Smith-Waterman Score=745.
  misc_feature (1)...(1411): n = a,t,c or g
gcacggcatcctgatatgaagaaaagggtggaggatgcatccatcctcccttgtaacgtgtcattagagtatgagaaaacagaagtgaattctggctttttttccaagagtgcagaagagagagaaaaactcgtgaaagctgaaagaaaattcattgaagatagggttaaaaaaataatagaactgaaaaggaaagtctgtggcgattcagataaaggatttgttgttattaatcaaaagggaattgaccccttttccttagatgctctttcaaaagaaggcatagttgctctgcgcagagctaaaaggagaaatatggagaggctgactcttgcttgtggtggggtagccctgaattcttttgacgacctaagtcctgactgcttgggacatgcaggacttgtatatgagtatacaagtcctgcatgtcccaagcagtcaggactttgtatattgagtagtacattgggagaagagaagtttacctttattgagaaatgtaacaaccctcgttcctgtcacattattgatcaaaggaccaaataagcacacactcactcagatcaaagatgcagtgagggacggcttgagggctgtcaaaaatgctattgatgatggctgtgtggttccagggtgctggtgccgtgggaagtgggcaatggcagaagcccctgatttaaccataagccccagtgttaaagggcagggcacagcttgggagtcccaagcatttgcttgatgcatttgctcattatttccccaaggttctttgcttcaggaactctgggtttttgacctttcagggaaacattaagttaaaattcaaagcagaacattccagaatccaggtccagcttgtgggtgtggaccttgaacacaggtgagccaaatggtggcaagcagaagtaaggccgtatggggatanacctaattgtggtaaaagaaaacaagccttccttcaactccctgcacctggtgaattgcccaccaacattctccttgggttgaatgagatcatgcgagctggaatgtccttctcttgaaaaggttggaatttgaagcttcctctgtatctgaatcttgaagactgcaaagtgatcctgaggattacagctgtggaatttttgtccaagcttcaaataattttgaaagaaattttcccatatgaaaaaaggagagaacactggcatctgttgaaatttggaagttctggaaattatagtatttttaaaaattgcactgaagtgtatacacataaagcaggtcttttatccagtgaacaggatgttttgctttagcagcagtgacataaaattccatgttagataagcatatgttacttcccttgtttttaaatattttttgaaaagccaaaaaaaaaaaaaaaaaaaaaaaaaaaaaaaaaaaaaaa

SEQ ID NO: 8766 - DNA, 1610 bp, Homo sapiens
  SIMILAR (979)..(917): 761254mologous to Oryctolagus cuniculus chaperonin Cct6,accession number AF068483,Smith-Waterman Score=74.
ttttttttttttttgaggtttcaacttaacatttatttgcacactccaggtcactgctgagcccccaaaacccacagcctagtaacaccaacttcactttcaaggacacgcagagatagaccaactatataaatcttgtggaaacatagtaatttggggtgaggaaactatgacgctagaggctttggggatgaatattttgcataagcaaaagttcagaagcttgaaaatataggcagccctacaaatctcaaatttcacctggatacccgtggccccttaggccacccatggccttccaggctctctcacttcccttgcctctagattactcctcttcccatttcctacaactttgctagggggagcattttaggcaaagctattttcaaaagcgtggaaaagtccaactgatccaataaatttactcaggaaatttacacctaacgggatgcctccccaaattttaaattacctaagcgttatttatattagcataaaaattttaaaacccagatgccttaacaatagggtactgctgaataatttaacatatgtccacataaaattaaaccattaaaatctgctttttcaaggaatatttaataaggtaggtaatatatgcttatttacacatggaattttatgtcgctgctgctaaagcaaaacatcctgttcactgggtgaaagacctgctttatctgtgtacacttcagtgcaattttttaaaaaatactgtaattataatttcagaacttccgaatttcaacagatgccagtgttctctccttttttcacaatgggaaaattcccttgaaactcatttgaagcttggacaaaaattccacagctgtattcttcaggatcactttgcagagtcttcaagactcagatacagaggaagcttcaattcaacctttcaggagaagattccagctcgcatgatctcatcaaccaagagaatgttggtggcaaccagtgcaggaatgaagaagctgtttctttacacaatcgttatcccataatgcctgcttctgctgctaccacgggctcaccttgggaagtaacgagcaacgcgatcagcaaatgcttggactccaagctgtgccttgccctttacactgagcttatatttattcagggcttctgccattgccacttccacggcaccagcacccggaaccacacagccatcatcaatagcatttttgacagccctcaagccatcccttactgcatctttgatctaagtgtgggcttatttggtcctttgatcaataatgtgacagaacgagggttgttacacttctcaataaaggtgaacttctcccaatgtatactcatatacaagtcctgcatgtctcaagcagtcaggacttaggtcctcaaaagaattcagggccacccccgccacaagcaagagtcagcctctccatattcctccttttagctctgtgaagagcgactatgccttctttgaaagagcatctaaggaaaaggggtcaattcccttttgattaataacaaatcctttatctgaattactacagactttccttttcagttctattataagttttaactctatcttcaatgaattttcttcagct

SEQ ID NO: 8767 - DNA, 1728 bp, Homo sapiens
  SIMILAR (99)..(1337): 231254mologous to Tetrahymena thermophila micronuclear linker histone polyprotein,accession number M87306,Smith-Waterman Score= 203.
ccttacttgaagcaaactagtatttttgttgaaaatgtatatcagcatcagttaaagttgatttttcagacctgctcctcagtaataatactagctagtcagcattcacgcctaccaggacacaaaaatcctcttcaaaactactcagaaaagaaagtcattactcaggaatgatgtccattcaggagaaatcaaaagagaattcctccaaagttactaaaaaaagtgacgataagaattcagaaacagaaattcaggattctcaaaagaatctagcaaaaaaatcaggtccaaaggagactataaaatcacaggctaaatcttccagtgaaagtaaaataaatcagccagaattggaaacacgcatgagtacaaggtcatcaaaggcagcatctaatgataaagctactaaatccattaataaaaatacggtgactgtgaggggatattcacaagaatctacaaaaaagaaattatctcagaaaaaattagtacatgaaaaccctaaagcaaatgaacagcttaaccggagatcacaaaggctacaacaattaacagaggtttcaagaaggtcgttacgcagtagagaaattcagggtcaagttcaagcagttaaacagagtttgccaccaactaaaaaagagcagtgtagcagtactcagagtaaatctaataaaacaagtcaaaaacatgtgaagagaaaagtactggaagtaaagtctgactctaaagaagatgaaaatctagtaattaatgaagtaataaattctcccaaagggaaaaaacgcaaggtagaacatcagacagcttgtgcttgtagttctcaatgcacgcaaggatctgaaaagtgtcctcagaagactactagaagagacgaaacgaaacctgtgcctgtaacttctgaggtgaaaagatcaaaaatggctacttcagtggtcccgaaaaagaatgagatgaagaagtcggttcatacacaagtgaatactaacacaacactcccaaaaagtccacagccatcagtgcctgaacaaagtgataatgagctggagcaagcaggaaagagcaaacgaggtagtattctccagctctgtgaagaaattgctggtgaaattgagtcagataatgtagaggtaaaaaaggaatcttcacaaatggaaagtgtaaaggaagaaaagccctcagaaataaaattggaagagaccagtgttgaaagacaaatacttcatcagaagggaacaaatcaggatgtgcaatgtaatcgttttttcccaagtagaaaaacaaagcctgtgaaatgtatactaaatggaataaacagctcagccaagaagaactccaactggactaaaattaaactctcaaaatttaactctgtgcagcacaataagttggactctcaagtttcccctaaattaggcttatttacgaaccagtttttcaccaccagctttagaaatgcatcatccagtgactcaaagtacatttttagggacaaagctacatgatagaaatataacttgccagcaggaaaaaatgaaagaaattaattctgaagaagtgaaaattaatgatattacagtagaaattaataaaaccacagaaagggctcctgaaaattgtcatttggccaatgagataaaaccttctgacccaccattggataatcagatgaaacattcttttgattcagcatcaaataaggtaatctgtttttattatgcacaatag

SEQ ID NO: 8768 - DNA, 395 bp, Homo sapiens
  SIMILAR (157)..(68): 431254mologous to Homo sapiens Fragment of human secreted protein encoded by gene 8,accession number Y36421,Smith-Waterman Score=67.
  misc_feature (1)...(395): n = a,t,c or g
gccatttcacgggccctgggacgctatgtgctttttccctgtctcatacaggatggcatatttgttgcacacacagcacatgcaatattgacgtcacttgaagacaagtctgtgaatgttccagccaaagacatgctggtgcctgcgccaactgacacgacactctgagtgtcaacatggaaactccacacccaagtttccaggaagagctctctggactcctgctcttgaaaatgttacgatcacctatagaagcatccaaggataaagacaaggtaaaaagcaatgcagtccgggcccttggaaatttgcttcattttctgcaaccctctcatatagaataacccacatttgctcaaatcaatgaggaggctatccaagccctaatttctatn

SEQ ID NO: 8769 - DNA, 730 bp, Homo sapiens
  SIMILAR (194)..(601): 681254mologous to Homo sapiens unnamed protein product,accession number AK025740,Smith-Waterman Score=391.
  misc_feature (1)...(730): n = a,t,c or g
agtaacgctgatacgctcagcttggcacgaggcagaacacccaactnnnnaaagagcgcctgtgatgccctgtcttccatcttgccagaggccttcaggaatctgccgaatgacaggcagatgctgtgcatcacagtgctgctcgggctgaatgacagcaagaatcgcttagtgaaagctgcaacttcacgcggccctgggagtctatgtgctttttccctgtctcagacaggatgtcatatttgttgcagacgcagcaaatgcaatggtgatgtcacttgaagacaagtctctgaatgttcgagccaaagcagcctggtccctgggcaacctgacagacactctgattgtcaacatggaaacaccagacccaagtttccagggaagagttctctggtctcctgctcttgaaaatggttacgatcaagctttagaagcatccaaggataaagacaaggtaaaaaggcattgcagtcccgggcccttggaaatttgcttcattttctgcaaccctctcatatagaaaaaccccacatttgcagaaattcatttgagggagtctatccagggccctgaattttctactgttctaacagaagcttgccatgaaagtccgatggaatgcttgttatgcaatgggaaatgtatttaaaaatcctgcccttcctttagggacagccccatggacctcccaggcctacaatgccctgacatcggtcgtgacatcatg

SEQ ID NO: 8770 - DNA, 2185 bp, Homo sapiens
  SIMILAR (303)..(773): 271254mologous to Streptomyces peucetius daunorubicin- doxorubicin polyketide synthase,accession number L35560,Smith- Waterman Score=94.
ttttttttttttttttttggggacacactatttttcgttagtttattacaaaactacagatacaatacacaaaattctaattccgaaatccttctacatttttttttttctgagactaaatgccctcaaagcccgtctgcttggcctggtattacaacctgactcctcggctcctgggatgcacaggtcagatgttccaacaaccctgaccatggccagtgctatgggagtcactccaaaggtgggttgagccctctgtgaaaatttaaatgggctgctaaggtcattctaaataaatacgtgaacggattgtttctgccccgaaggatgaaatcccacagatgcttatgctcaagcttcaggtccttcctactgccgccttcggacatctaggaaagtatgggtggggatcttcactggatttgttaaccctggggagtgcccccttgtgaaaccagatgagtccaaaacaaacggccaggatctcttcctaaaaagcccatgatggcccttctggctgtgtctccagttggtgcctggatgctgcccatgtgtttaagggccattctgaccatctggtctctttcctgtgggctgtggggtgctccagtgtcatctccctatgctcctagattttaaagactgtagaatataggcgtggaccatattcccactcagttcaagggtttctttcatacaaagggaggtccgaggcacttggccaagcttcaagaggtgaatcagtgccttggcagatttgggtccgtaggcttgacacagtacttgaattccaaaaagtctatggtgtcttcactcttctgtaaaagcggtgaccaatgcattccagatccgagcatactggtcaacagacccgtactgctctctcttccccgggacggaaagggcagctgcagatctgatgcgcactttgaagttcttgcatgatgtcacgaccgatgtcagggcattgtaggcctgggaggtccatggggctgtccatttattaatggcatccacttctgtacacagctcataggggatttccagtttatattccctctcattccagtttttttccttcctgttttcttgaccattaaagtaatatatgcttattgtagacaacttgtctttatccttggatgcttctatagctgatcgtaacattttcaagagcaggagaccagagaactcttcctggaaacttgggtctggtgtttccatgttgacaatcagagtgtctgtcaggttgcccagggaccaggctgctttggctcgaacattcagagacttgtcttcaagtgacatcaatattgcatttgctgcgtctgcaacaaatatgacatcctgtctgagacagggaaaaagcacatagactcccagggcccgtgaagttgcagctttcactaagcgattcttgctgtcattcagcccgagcagcactgtgatgcacagcatctgcctgtcattcggcagattgctgaaggcctctggcaagatggaagacagggcatcacaggcgctcgcctggagagttgggtgttctgaattctgcagagaatctggaaaaaggaccgttcagcatcatagtccagaacatcaccacctttgctccatgaagctgaatggatggatctgcttcccccatgcacttgcaaatcacctctccaagctccatcaagtaggcttgagtcattgaaaagtagccccttgccagaagagtcaatacctgtaaggcctccagtcgcatgggggatggttcgtaggtgcttcctgctgcagagccagcatcgctacctgaacaggaatcctccttgggcagtacgacaatggaaatgcagagtcgaatgagccagcagggctctgaagaccccttaggtgagctaactgacgtttcttccagagagggtcctgcaggggctttcttccaccaatcaggagggctgaggtgaggggttgctgaattgctattaccgagtccagaagaacatggctgttgcagaagtagttggacttcaggtaaaggtgcgtgggtggacactatagctcccaagagtgtgagacttgacacacgaacattaacatctttgtggcgaatataaggctttatctggttccagactttggtcagcaggctgagttttagacgatcataaggtgcatttgatactaaatttgcaaggca

SEQ ID NO: 8771 - DNA, 6607 bp, Homo sapiens; identical to SEQ ID NO: 6287
  SIMILAR (2712)..(3113): 741254mologous to Homo sapiens KIAA0350 protein,accession number AB002348,Smith-Waterman Score=506.

SEQ ID NO: 8772 - DNA, 273 bp, Homo sapiens
  SIMILAR (82)..(2): 401254mologous to Homo sapiens Human neuroendocrine-specific protein NSP-A mutant fragment 12,accession number Y21445,Smith- Waterman Score=51.
atggtgatcatggagcgtagcaagctctcagagctggccgccagcacctccgtgcaggagcagaacaccacggacgaggagaaaacacagcctgtgtctctgctccccattacaataaagctgcttcatgatctctctccacttcctctcctccggaatatcctggcaccagaatttcttctgccaggaacccatgtggcccaacctgagagcttgacagaatctaaagagttggaagattctaggggattttcaagtctcactgcccaccca

SEQ ID NO: 8773 - DNA, 616 bp, Homo sapiens
  SIMILAR (368)..(204): 1001254mologous to Homo sapiens KIAA0350 protein,accession number AB002348,Smith-Waterman Score=285.
  misc_feature (1)...(616): n = a,t,c or g
ttttttaaagggtaaagccaaaatttatgggggggtgttgtgtttaatcttgcgctgtgctttgacaaattctaagaagctggtgctgccagccgacggggcttctgagagaggaagggcagctcacacaggctccacagagagaaagaccttgaacgcccaccatgatgaacgagctgtggcgcagggcggggggctggctcacctggcaccttgtccaccgatgcaaacacggagcgctgcactgtggggtcgctgctgccccggcgcccctggtcgtagaagcggaaaggcaggtgctgagtggaggtggaggagccgagtccaaaccccaggacttcagtggtgggctggattgggaggtccagggagggcagctattctctgcatcttcatgcgccttgcctgggatgcggcctttggccaggcgctgcttggcgatgatgcagccgatgtggtctgagaggatganggtggcctgnaggatggggaagggcttggaatgggggctggacgcaggcttgtggatggtgatgttcagggcacggctgtcgtcctccacgccagtcacctgcatgtcctgcaataggcctgcanacttgaccactccccagcc

SEQ ID NO: 8774 - DNA, 990 bp, Homo sapiens
  SIMILAR (25)..(522): 921254mologous to Homo sapiens KIAA0350 protein,accession number AB002348,Smith-Waterman Score=768.
atggtacacggcagagaggagggaggcatggatcctgaaaaattagagcgaatccagctccccgtgccaaatgcggccgagaagaccacctacaaccacccgctagctgaaagactcatcaggatcatgaacaacgctgcccagccagatgggaagatccggctggcgacgctggagctgagctgcctgcttctgaagcagcaagtcctgatgagtgctggctgcatcatgaaggacgtgcacctggcctgcctggagggtgcgagagaagaaagtgttcaccttgtacgacatttttataaggtaattggcagagcacagatggacagcagcatgggagaagacatttttttggacatgtttgaagatgagtataggagcatgacaatgaagcccatgaacgtggaatatctcatgatggacgcctccatcctgctgcccccaacaggcacgccactgacgggcattgacttcgtgaagcggctgccgtgtggcgatgtggagaagacccggcggctgttgcccagagtagacgagtgtggctgtgaagtgacaagcccagggcctggcagacagcagcttgcacatgcagcaaggaagcaggagggtgaaaaccgagcctttgttccaggccagctcgtgggctcagcacatcaccggtgccatcccgttgtacctgcacgctctgtttcttcctccataaaatcttcaagttacaataaggtgcccacagttcctgccaccccggattattatgaaggtcacctgatacttggggacaaggtcctggcagatgacgggtgctcagttcaggccatccgggtgttcttcatgctgcgttccctgtcactgcaattgcgaggggagcctgagacacagttgccgctgactcgggaggaggacctgatcaagactgatgatgtcctggatctgagagggctctcaccaggtagtggcaagatggccttcagcagccccaagatttgttga

SEQ ID NO: 8775 - DNA, 2780 bp, Homo sapiens
  SIMILAR (2079)..(2777): 931254mologous to Homo sapiens dJ475N16.3 (novel protein similar to RPL7A (60S ribosomal protein L7A)),accession number AL035587,Smith-Waterman Score=1091.
tgtcgtggaaagcggctcgcggttcctccaccgcctccgccgccgcattctccgcttgtgctaccgccgcgggcgctgggccgctctgctggtccggcatgagaccgtgagacgagagacgggtcggggccgccgacatgtttggccgctcgcggagctgggtgggcgggggccatggcaagacttcccgcaacatccactccttggaccacctcaagtatctgtaccacgttttgaccaaaaacaccacagtcacagaacagaaccggaacctgctagtggagaccatccgttccatcactgagatcctgatctggggagatcaaaatgacagctctgtatttgacttcttcctggagaagaatatgtttgttttcttcttgaacatcttgcggcaaaagtcgggccgttacgtgtgcgttcagctgctgcagaccttgaacatcctctttgagaacatcagtcacgagacctcactttattatttgctctcaaataactacgtaaattctatcatcgttcataaatttgacttttctgatgaggagattatggcctattatatatcgttcctgaaaacactttcgttaaaactcaacaaccacactgtccatttcttttataatgagcacaccaatgactttgccctgtacacagaagccatcaagtttttcaaccaccctgaaagcatggttagaattgctgtaagaaccataactttgaatgtctataaagtggataaccaggccatgctgcactacatccgagataaaactgctgttccttacttctccaatttggtctggttcattgggagccatgtgatcgaactcgatgactgcgtgcagactgatgaggagcatcggaatcggggtaaactgagtgatctggtggcagagcacctagaccacctgcactatctcaatgacatcctgatcatcaactgtgagttcctcaacgatgtgctcactgaccacctgctcaacaggctcttcctgcccctctacgtgtactcactggagaaccaggacaaggtcttcttaattatacatcatgcaccgctggtgaactcgttagctgaagtcattctgaatggtgatctgtctgagatgtacgctaagactgaacaggatattcagagaagttctgtcttacccactctaagctccttatggcagggatctcacctgtcactgaatcagctgcagtctgggctgcacaaatgctcatctcacttatgcggagcccaggctgcagctgattcagtgacaggtgagatccctgccataaggagcttagagtggctaatcagtgctggttccaaggcgcgcacattcttcttcctgaaaatgctaataggcttctgggagaaggttgattgtgaatatcaaaggcgtcaagtgctgagcacgcggctgcaagaggccttgccgtcaaatcgcctcactgatgttgcagctgtgcattcttcatgcatgttgggctttggttccacagctccacgcggctcctggattggcgatccagcggctgtgcatctgcccctacctggggagctggccgagcaccttgggtccaagggtaccaccactgtcaccaagcaccagccccaggccaagcccagcattcggtgcttcattaaacccaccgagacactcgagcggtcccttgagatgaacaagcacaagggcaagaggcgggtgcaaaagagacccaactacaaaaacgttggggaagaagaagatgaggagaaagggcccaccgaggatgcccaagaagacgccgagaaggctaaaggtacagagggtggttcaaaaggcatcaagacgagtggggagagtgaagagatcgagatggtgatcatggagcgtagcaagctctcagagctggccgccagcacctccgtgcaggagcagaacaccacggacgaggagaaaagcgccgccgccacctgctctgagagcacgcaatggagcagacccttcctggatatggtgtaccacgcgctggacagcccggatgatgattaccatgccctgttcgtgctctgcctcctctatgccatgtctcataataaagaaaatctcctgaaaaagaggaaggcttatcaggcactcaaagccacccaggcaaagcaggaacttttggcaaagaaggagcagaagaaaggaaaagggctcaggtttaagctactggaatcattcctacatgattactggcagcagaaacctgacaaggtgcatctcagacgactagaagtgaaacctcatgccgtggaattgccagataaacattccttggcctttgttgtacgcatcgaaaggattgatggcgtgagtttactggtgcagagaaccattgcaagactttgcctaaagaaaatttttagtggtgtctttgtaaaagtcaccccccagaatctacaaatgctgcgtatagtggaaacttatgtgacctggggatttccaaatctgaagtctgtccgagaactcattttgaaacgtggacaagccaaggtcaagagtaagaccatccctctgacagacaacacagtgattgaggagcacctggggaagtttggcatcatttgcttggaagacctcattcatgaaattgcattcccagggaagcatttccaggagatctcatggttcttgcgccctttccacctctcagtggcccatcatgctaccaaaaatagagtgggcttcctcaaggagatgggcacacttggctatcggggtgaacgcatcaatcagctcatccgccagctgaactag

SEQ ID NO: 8776 - DNA, 3052 bp, Homo sapiens
  SIMILAR (1)..(1470): 971254mologous to Homo sapiens KIAA0350 protein,accession number AB002348,Smith-Waterman Score=2445.
cggaacctgctagtggagaccatccgttccatcactgagatcctgatctggggagatcaaaatgacagctctgtatttgacttcttcctggagaagaatatgtttgttttcttcttgaacatcttgcggcaaaagtcgggccgttacgtgtgcgttcagctgctgcagaccttgaacatcctctttgagaacatcagtcacgagacctcactttattatttgctctcaaataactacgtaaattctatcatcgttcataaatttgacttttctgatgaggagattatggcctattatatatcgttcctgaaaacactttcgttaaaactcaacaaccacactgtccatttcttttataatgagcacaccaatgactttgccctgtacacagaagccatcaagtttttcaaccaccctgaaagcatggttagaattgctgtaagaaccataactttgaatgtctataaagtgtcattggataaccaggccatgctgcactacatccgagataaaactgctgttccttacttctccaatttggtctggttcattgggagccatgtgatcgaactcgatgactgcgtgcagactgatgaggagcatcggaatcggggtaaactgagtgatctggtggcagagcacctagaccacctgcactatctcaatgacatcctgatcatcaactgtgagttcctcaacgatgtgctcactgaccacctgctcaacaggctcttcctgcccctctacgtgtactcactggagaaccaggacaagggaggagaacggccgaaaattagcctgccggtgtctctttatcttctgtcacaggtcttcttaattatacatcatgcaccgctggtgaactcgttagctgaagtcattctgaatggtgatctgtctgagatgtacgctaagactgaacaggatattcagagaagttctgccaagcccagcattcggtgcttcattaaacccaccgagacactcgagcggtcccttgagatgaacaagcacaagggcaagaggcgggtgcaaaagagacccaactacaaaaacgttggggaagaagaagatgaggagaaagggcccaccgaggatgcccaagaagacgccgagaaggctaaaggtacagagggtggttcaaaaggcatcaagacgagtggggagagtgaagagatcgagatggtgatcatggagcgtagcaagctctcagagctggccgccagcacctccgtgcaggagcagaacaccacggacgaggagaaaagcgccgccgccacctgctctgagagcacgcaatggagcagacccttcctggatatggtgtaccacgcgctggacagcccggatgatgattaccatgccctgttcgtgctctgcctcctctatgccatgtctcataataaaggcatgggatcctgaaaaattagagcgaatccagctccccgttgccaaattgcggccgagaaggaccaccttacaaccacccgttaggttgaaagattcattcagggttcatggaacaacgtttgcccagccagatgggaagatccggctgggcgacgctgggagcttgaggttgccttgtttcttgaaggcagcaagtcctgatgagtgctggctgcatcatgaaggacgtgcacctggcctgcctggagggtgcgagagaagaaagtgttcaccttgtacgacatttttataagggagaagacatttttttggacatgtttgaagatgagtataggagcatgacaatgaagcccatgaacgtggaatatctcatgatggacgcctccatcctgctgcccccaacaggcacgccactgacgggcattgacttcgtgaagcggctgccgtgtggcgatgtggagaagacccggcgggccatccgggtgttcttcatgctgcgttccctgtcactgcaattgcgaggggagcctgagacacagttgccgctgactcgggaggaggacctgatcaagactgatgatgtcctggatctgaataacagcgacttgattgcatgtacagtgatcaccaaggatggcggcatggtccagcgattccttgctgtggatatttaccagatgagtttggtggagcctgatgtgtccaggcttggctggggagtggtcaagtttgcaggcctattgcaggacatgcaggtgactggcgtggaggacgacagccgtgccctgaacatcaccatccacaagcctgcgtccagcccccattccaagcccttccccatcctccaggccaccttcatcttctcagaccacatccgctgcattcattcgccaagcagcgctttgccaaaggccgcatccaggcaaggcgcatgaagatgcagagaatagctgccctcctggacctcccaatccagcccacaactgaagtcctggggtttggactcggctcttcaacctccactcagcacctgcctttccgcttctacgaccaggggcgccggggcagcagcgaccccacagtgcagcgctccgtgtttgcatcggtggacaaggtgccaggcttcgccgtggcccagtgcataaacgagcacagctccccgtccctgtcctcacagtccccaccctccgccagcgggagccccagcggcagcgggagcaccagccactgcgactctggaggcaccagctcgtcctccaccccctccacagcccagagtccagcagatgcccccatgagtccagaactgcctaagcctcaccttcctgaccagttggtaatcgtcaacgaaacggaagcagactctaagcccagcaagaacgtggccaggagcgcagccgtggagacagccagcctgtcccccagcctcgtccctgcccggcagcccaccatttccctgctctgcgaggacacggctgacacgctgagcgtcgaatcgctgacccttgtccccccagttgacccccacagcctccgcagcctcaccggcatgcccccgctgtccacgccggctgccgcctgcacagagcccgtgggcgaagaggctgcatgtgctgagcctgtgggcaccgctgaggactga

SEQ ID NO: 8777 - DNA, 361 bp, Homo sapiens
  SIMILAR (114)..(227): 971254mologous to Homo sapiens Secreted protein CJ317_4,accession number W70322,Smith-Waterman Score=219.
ggcacgagcggcacgaggaaatatgtcaacatactacagttagtgtacagaatcagcatttcattgttaggacattttcctcaactttctaaagccagcatttcaactgacttttccagaccatatttgaagatgttagtggttttggtgcctggcatcgaagatggtgtgttctttctggaaactgtatatcttattggacttatccagatgatgagaaacgcaaggtaatttatatagtactgtttagtggtgaaagccctgattgactttcgtgtagtgttcatgcaaatgttccctctggcccccatcactcacccaaattaataaccctttttgtgtactcactaagccattaaag

SEQ ID NO: 8778 - DNA, 406 bp, Homo sapiens
  SIMILAR (249)..(229): 1001254mologous to Homo sapiens actin binding protein anillin,accession number AF273437,Smith-Waterman Score=39.
gtgttttttccaagtagaacttctcttcagtgtgtcagacagcgttttttgatggcgatggtttgtacaagatttctcttcacaccagagaggggctgctggttacttgcttctgaaagtggctgtctagctcgcttagcatgagtcatagaccttggagctgctgtgggcctctcagccatttttctctgaagattctctcgcctggcacgggttcgctccagcagttttctccgtaaacggatccatcgccccaggcgtcggactacgagacgatggaaacggtggttcaaattcaggaagagaaaagtgagtctcagctcagtgtgtctcctggaaaaaaccaggagtctgaggcgggggaactctcccacaaccagctgtcctctcctctgggcttccagtt

SEQ ID NO: 8779 - DNA, 618 bp, Homo sapiens
  SIMILAR (2)..(616): 831254mologous to Homo sapiens actin binding protein anillin,accession number AF273437,Smith-Waterman Score=850.
gaaaaaaacatccaagtccaaggctattactccaaagcgactcctcacatctataaccacaaaaagcaacattcattcttcagtcatggccagtccaggaggtcttagtgctgtgcgaaccagcaacttcgcccttgttggatcttacacattatcattgtcttcagtaggaaatactaagtttgttctggacaaggtcccctgttttatcttcttatggagggcatatttatttaaagataagatgtccagtggattcccagtgttggaagaagaggttttctaaccatatttgaagatgtaagtggttttgggtgcctggcatcgaagatgttgtgttctttctggagactgtatatcctattgggcttatccagatgatgagaaacgcaagaatcccataggaaggataaatctggctaattgtaccagtcgtcagatagaaccagccaacagagaattttgtgcaagacgcaacacttttgaattaattactgtccgaccacaaagagaagatgaccgagagactcttgtcagccaatgcagggacacactctgtgttaccaagaactggctgtctgcagatactaaagaagagcgggatctctggatgcaaaa

SEQ ID NO: 8780 - DNA, 243 bp, Homo sapiens
  SIMILAR (197)..(217): 711254mologous to Homo sapiens super cysteine rich protein; SCRP,accession number U63332,Smith-Waterman Score=40.
tcaagaagaaagagtaactatggccacctttaggtcaccagccaataatactgcttctctatcctgttctgctgtgacatttgtcccagcaggtgttccagtctgtcctgcagggccactgtagatgaggagcttcctgtcgctcagcaggacaatggctttagaggataagatccttcttaggaagcaagatccatgctcttgctcctgtttctgcctcctgaccactctggtcttccccat

SEQ ID NO: 8781 - DNA, 739 bp, Homo sapiens
  SIMILAR (441)..(277): 361254mologous to Homo sapiens HSPC093,accession number AF161356,Smith-Waterman Score=77.
agggttggagaagggaccaagcctcccctgaaagctgaggggtttatggtcaagaagaaagagtaactatggccacctttaggtcaccagccaataatactgcttctctatcctgttctgctgtgacatttgtcccagcaggtgttccagtctgtcctacagtagtgagaccacctgatatggtgaggaaggcaggtaattgatcttactccatcatatcatcacatctatttccaccccccgcccttgggagacaaggtctcacttccattcatttagggccggaatgcagtggtgcaatcataggctcattgtaggtctcaaacacctgggcccaagtgatcctcactgtagttttcccaagtagctaggacttacaggcacatgccaccacacctggctaattaaaaaaaattttttttgcacagagatgggggtcttgatatgttgcccaggctggtctggaactcctggccacaagtgatcctcccacctcagcctcccaaagcactgggattactgttgtgagccaccatgaccagccccatcacttcttttgtaggtttgtatttgtttttatttttgacaaagacttttatttcacggtgacttcttcacaagtttcctcagatgctagtctgaacaaaggagagcagggaactagaaatgtagactttctgttttttccagctatggcatcactgatctcatccatcttactaaaagtttgtgcagtctc

SEQ ID NO: 8782 - DNA, 2262 bp, Homo sapiens
  SIMILAR (84)..(455): 351254mologous to Caenorhabditis elegans coded for by C. elegans cDNA yk120g12.5; Similar to cuticular collagen,accession number U53333,Smith-Waterman Score=101.
atgtgctcgacgcccggaatgccggcgccgggggcctcgctggccctgcgggtgtccttcgtggacgtgcatcccgatgtgatcccggtgcagctgtgggggctgggcaaggaggtgcacgggtgcgtcctggacgtgctgctgctccatcgcctggtcctcctggaggtgcctgatgtgttccaacagatgcgggagctgggcctggctcggcgggtgcccgacagcctcttccgttcgctgctggagcgctatctcacagcggccactgctagcgtgggctccggggtcccggttctctcgcgagtcccgctcaagcaaaagcagcctggtctggattacttctatccccagctgcagctgggcgtgacggaggccgtggtcataacccaagagatccaccgcctctccgagagcatggcccaggtataccggggttccacggggacaggggatgagaactctaccagtgccacctgggaggagagggaggagagcccagataagccgggctctccgtgtgcatcctgtggcctggatggacattggtacagagcactgttgcttgagacttttcggccccagcgctgtgcccaggtgcttcatgtggactatggaaggaaggagttagtgagttgcagcagccttcggtacttgctgcctgaatattttcgaatgccggtggtgacctacccttgtgctttgtatggactctgggacggtgggagaggctggtctcggtcacaggtcggtgacctgaagacactgatactaggcaaggcagtgaatgcaaagattgaattttattgctcctttgagcatgtgtattatgtcagcctgtatggagaagatgggattaatctgaaccgtgtgtttggagtacagtcgtgttgcttggctgaccgagtccttcagagccaggcaacagaggaggaggaaccagaaacatctcagtctcagtctcctgctgaagaagtagatgaagagatttcactcccagccttaagatctatcaggttaaagatgaatgccttctacgatgcgcagtggaaagaaaatggttattatagggccatagtcaccaaattggatgacaagagtgtggatgtattcttagttgaccgaggcaattcggaaaatgtggactggatcatcaatatgttattgagattcttgacgaatcaagaacagggggaagaaaccattagtaaggtaattgcccaagctggatatgccaagtatcaggaatttgaaacaaaggaaaatatcctggtaaatgcccactccccagggcatgtttcaaaccactttactacggagagtaacaaaataccttttgccaagactggagaaggagagcagaaagccaagagagagaataaaaccacatctgtttcaaaagctttgagtgacacaacagttgtaacaaatggttcaactgaactagttgtgcaggaaaaagtgaaaagagcatctgtttattttcctcttatgcagaattgcttggaaattaagccaggctcctctagtaaaggagagctggaagttggaagtacagtagaagtcagagtgtcttatgttgaaaaccctggctatttctggtgtcagctgaccaggaacatacaaggacttaaaactctaatgtctgatattcagtactattgcaaaaatacagctgctcctcaccagagaaacacccttgcttgtttggctaagcgaacagtaaacagacagtggtccagagcacttattagtgggatacaagtctgtggaagcatgtcaatgtaacatttgtagattatggagacaagagaaatggtatctgtgaagaatatttattcaattagtgaagaatttctgaaggttaaggcacaggcttttaggtgcagtctttataatttaattcaaccagttggccagaatccctttgtttgggatgtaaaggcaatacaagctttcaatgaatttatagataatgcatggcaaaaaaatctagaattaaaatgtacaatatttgctctggcttcaattaatgaagaactgtttaacattgtggatttgctaaccccctttcagagtgcatgccatttcttggtagaaaagagacttgcaagaccagtaaaacttcagaagcctttggagtcctctgttcagctacattcctacttctattctacacatgatattctattcacattcttagcccaatttttgatgggattgtttgtttttttcttgctaatttgtttgggttatttgtag

SEQ ID NO: 8783 - DNA, 2904 bp, Homo sapiens
  SIMILAR (2407)..(2901): 691254mologous to Mus musculus Pro-Pol-dUTPase polyprotein,accession number Y12713,Smith-Waterman Score=589.
atgggtccagtgatgtccctccaatttgtagaagagaaaactgcaggtgaagaagttaagtgtcttatgtatctcacaacaaatgaggtgactgatttttatcaaggcgaggacagaatggatgcagggctgtgggtaggccacctcttcatgctggcatcgtcatcaaaaggcagcgtgcgcatgactcctgggggctccaggatcagaaaacatggaccatgtaaagtggcccatgctatctctactgacgaaggaaacccttgcacaaaccaggaagcgtggagaagacaggagacagagggatccaccaggaagggcggaaatgcagcttcaacaccctcccctcaggtcaatttgaaattctggattcggcatctactgacccaagggagtgcacgtggcatcctgtgtgcagcaccttcggacccagctgtggtagaacctggcacagccagtgggccctgtcacggtggcctggaggagccccagaggacagcgacaggaaccaggaccctggcagggtttattttccagtttctgggtaaagaggaaagaactgagactaggaatagaacctggaaaccagctgcacatgcagggtggaaatggaaccggcattctctgcgggcagatcattatgctgcggcagcacttcgctttctgccttgctttgagtgttacaagcacagcgtcccagacgttggtgcggctgatggtgggggggccatcacagactctgatcagatgcacaggacttggggtttcgaggacattctctggggagcttcctgcactctattgcgcacagaaactaccgtggatcttgttacaaggcagcttttgttttgggtctctgctgggagtagtgagggtgtagacagaatgaatgaactaagtcacttccgagctttctggctacacattgcgcacccagcaatgtgggtgacgggtcttgacatgggcacatgtgccgagcttaaggaagaggccttggatggtgaaacggaaaatgaaatgagcacttttctattttaccggatcacacatgcagggacagtcgccttcgctcctctcctcagtggtttcctgcactgtgaatctctgctcacttttcttttgccttttatgctccagttagcacctcctcattcttgcgttttctggaacaaggagcaccggtgtcttacaaggtctctgtggtccgccttgcacggaagcactggcagtcaggaagcagtggctgtcgcagcacctgccactcaagaagctgatggtgaaaagcaaaacaagggggtccagatgctgcccgaccccagcactcagccacaggaggggtgtcctcagcctgccttctatgttctagcttcgtccaactggctgcttagtatgattagacctcaaaatgctaaggattctactgctaatggtatgcagaacactgagaatccttggtatgaatggttcagagagttacacaaaataaatgcatttgacactcctgattcattgctcgtgagaggcaaggagtttgttgactctatacataacacctttgaccatatgtggagaacccaggaacataatgaagctggttggttcctcctaagttcactggacaaagtgatgaaagaaaatgatgaactcagagattctaactcctgccttcagaagcagatactgagcctcaaatctaagattgccctgagtcagagtcttatttcctgtagagaaagagctgacattgtggcaaatcaaacagaagctcttatcattgccagatgtgtaattatcagagatatacttagcagctggcagaacccccatgttggctccatgactgggagggtgagggctgctatgatgggaaaggccaaatggaagccattagagctgcctttacttagaaaaatagtaaataaaaaacaatatcatatccctggaggaactgtggagattagtgccaccatcaaagacttgaaagacccaggggtggtgatttccactacatccccattcaactctcctatttggcctgtgcagaagacagctgctgtaccagatatggtttcattgcttgagcaaatgaactcatctcctggtacctggtatgcagccattgacttggcaaatgcctttttctccattcctgtccataagccccaccagaagcaatttgccttcagctgccactcctgtcatcgcccaatgggccctgaacaaagtggccacggtggcagggatggaggttacacatgggctcagcaacatggacttgcattcaccaatactgatctggctacggtcaatgccaagattgggtttgcctatcctgtgtgcgatgcttctgccaagactaccatccgtggactcttggaatgccttatccgctgtgatggtattccacacagcattgcctctgaccaagccaggattcacaggtccaggaatcaagaggtggaagtggaagtggcaccactcaccatcacccctagtgatcccctagcaaaatttttgctttctgttcccgtgacattacgttctgctggcctagaggtcttagttccaggggaaggaatgctgccaccagggaacacaaggacaattccattaaactggaagttaagattgccacctggacactttgggctcctcctaactttaagtcaagaggctaagaacggagttacagtgttggctggggtgattgacctggactatcaagatgaaatcagtctactactccacaatgggggtaagaaagagtatgcaaggaatacaggagatccattagggcgtctcctagtattaccatgccctgtgattaagatcaatgggaaactacaacagcccaatccaggcgggactacaaatggctcagacccttcaggaatgaaggtttag

SEQ ID NO: 8784 - DNA, 588 bp, Homo sapiens
  SIMILAR (91)..(585): 691254mologous to Mus musculus Pro-Pol-dUTPase polyprotein,accession number Y12713,Smith-Waterman Score=589.
attgggtttgcctatcctgtgtgcgatgcttctgccaagactaccatccgtggactcttggaatgccttatccgctgtgatggtattccacacagcattgcctctgaccaagccaggattcacaggtccaggaatcaagaggtggaagtggaagtggcaccactcaccatcacccctagtgatcccctagcaaaatttttgctttctgttcccgtgacattacgttctgctggcctagaggtcttagttccaggggaaggaatgctgccaccagggaacacaaggacaattccattaaactggaagttaagattgccacctggacactttgggctcctcctaactttaagtcaagaggctaagaacggagttacagtgttggctggggtgattgacctggactatcaagatgaaatcagtctactactccacaatgggggtaagaaagagtatgcaaggaatacaggagatccattagggcgtctcctagtattaccatgccctgtgattaagatcaatgggaaactacaacagcccaatccaggcgggactacaaatggctcagacccttcaggaatgaaggtttag

SEQ ID NO: 8785 - DNA, 1699 bp, Homo sapiens
  SIMILAR (729)..(755): 771254mologous to Mus musculus Pro-Pol-dUTPase polyprotein,accession number Y12713,Smith-Waterman Score=40.
atggacaaatatttcatgattaaaacaccaaaagcaatggcaacaaataccacaattgacaaatgggatctaattaaactaaagaacttctgcacagccaaagaaaccatgatcagagtgaacagacaacctatagaatgcaagaaaatgtttgcaatttatccatctgacaaagtgatactgctgtttaaaatggcccccaagcgtaatgctgaagggctgtctactgtttctacatgcaagaaggctgcaatgtgccttatagagaaaggatgtgagttagtgggtccagtgggtccccagactcatcctgtggtcacttccccagtgtcagaatgcataattggcatagacatacttagtggctggcagaacccccacattggctctctgactggtagggtgaaggctattatggtggcaaaggacaaattgaagccattagagctgcctctacctggaaagatagtaaatcaaaaacaacattgtatccctggatggattgtggagattagtgctaccatcaaggacttgaaagatgcagtgatagggattcccactctacccccattcaactctcctatttggcctgtgcagaagacaaatggatcttggagaatgacagtggattatcataagcttaaccaagtggtgactccaattgcagctgctgtaccagatgtggtttcatggcttgagcaaatcaacacatctcctggtacctgcctgcactggtggcctcatggggagttcccaagattagttgacagagaagagaggactaggacctggttcacagatggttctgcacaatatgcaggcactacccaaaaatggacacctgcagcattacagcctctttctaggacatccctgaaggagagtgaatgtttcatccaccatcatggtattccacacagcattgcatctgaccaaggcactcactttatggctaaaaaagtgcggcagtgggctcatgctcatgaaattcactggtcttaccatgttcctcattatcctgaagcagctggattgatagaaaagtggaatggcattttgaagccacaattacaatgccaacttggtgataatactttgcagggctgggacaaagttctccagaaggccttgtatgctgctgaatcaacattcagtatatggtactatttctcccatagccaggattcacagatccaggaataatcaagaggtggaagtggaagtgacaccactcatcatcacccctactgatccactagcaaaatttttgcttcctgttccttcaacattacattctttggacctagaggtcttagttccagagggaggaatgctgccaccaggacacacagcaatgattccattaaactggaagttaaggttgccacctggacactttgggctcctcctacctttaagtcaacaggctaagaagggagttatagtgttggctggggtgattgacctggactatcaaaatgaaatcagcctactactccacaatggaggtaaggaagagtatgcattaaatataggagatccattagggcatctcttagtattaccatgccctgtgattaatgtcaacgggaaactacaacagcccaatccaggcagaattacaaatggtgaggacccttcaggaatgaaggtttgcgtcactccaccaggaacaacaacaacaacaaaaaagccatga

SEQ ID NO: 8786 - DNA, 1330 bp, Homo sapiens
  SIMILAR (802)..(1176): 511254mologous to Mus musculus Pro-Pol-dUTPase polyprotein,accession number Y12713,Smith-Waterman Score=320.
atgtggaagcaactttggaactcggtaacaggcagaggttggaatagtttgaagcgctcagaaaaagacaggaaaatgtgggaaagtttggaactccctagagatttgttgaatggctttgcccaaaatgctgatagtgatacggacaatagaatccaggctgaggtggtatcagatggagatgaggaacttgttgggaactggagtaaaggtgactcttcctatgttttagcaaaaagactggaggcattttgcccctgccttagggatttatggaactttgaacttgagaaagatgatttagggtatctggtggaagaaatttctaagcagcaaagcattcaaaatgtgtcttgggtgctgttaaaggccttcagttttataaggaaagcagagcataaaagtttggaaaatttgcagcctgataatgtgatagaaaagaaaatcctattttctgaggagaaatttaagctggctgcaaaaatttggataagtaatgaggagctgaatattaatccccaagacaatggggaaaatgtctgcagggcatgtcagaggtcttcacagcagctcctcctgtcacagacctggaggcctagaaggaaaaaatggtttcatggtctgggcccaaggcccccttgctctgtgcagcctaaggacttggtgccttgcgtcccagccactccagccatggctaaaaggggccaaggtacagtttgagccattgcttcagagagtgcaagccccaaggcttggcagcttccatgtggtgctgagccgcaatttgcagccctgcctggattgggtaattataaattcccactgaccttaatcacagggtatggtagtaataagagccccccctagggatatcttgtattccagacatactcgtccttacctctattgagattgccacctggacactttgggttcctcctacctttaagtcaacaggctaagaagggagttacagtgttggctggggtgattgacccagactatcaagatgaaatcagtctaccactccacaacagaggtaaggaagagtatgcatggaatacaggagatccattagggcatctcttagtattaccatgccctgtgatcactccagatggttcagcccaattggcactaccagtggttcccatgggacaggatcagagtgggcttcccatggagattctcagactaatggggaaatcaaatgccaacctccagttctctcctccaacttccaataaagtggatctgtaaaaattctctgtgagtggcattatgacagcttaaaaggagatggtggagcagtctgaaataattgttcctc

SEQ ID NO: 8787 - DNA, 289 bp, Homo sapiens
  SIMILAR (2)..(76): 1001254mologous to Homo sapiens Human secreted protein, SEQ ID NO: 6092,accession number G02011,Smith-Waterman Score=139.
ctggaacctccgctgcttacaggggcgcgtgaatcctgtggagtacagcatcgtgatggaatttctcgaccctggtggcccaatgatgaagttggtttataagcttcaagctgaagactataagttcgactttcctgtctcctacttgcctggtcctgtgaaggcgtccatccaggagtgcatcctccctgacagtcctctgtaccacaacaaggtccagttcacccctactgggggccttggtctgaacttggccctgaatccgttcgagtattacatattcttcttt

SEQ ID NO: 8788 - DNA, 1158 bp, Homo sapiens
  SIMILAR (373)..(732): 531254mologous to Homo sapiens unnamed protein product,accession number AK000763,Smith-Waterman Score=299.
atggccaagggcacagtctggcgggccatagccctgtgccacccaccgcgggtgtgcagcggtgcagaagcagatgcgtctgtctcagcgagttctccccaggagtcgttcatgcccaccaaggggcacatgctggtggtgcgcctgccactgaagcacctgcacgcctttgccgacagcctgaagccagagcaggtcctggaggtgtggctgagctacctgcagccatggtggtatgcagctgacaagcaggctgccagcagcaactcccagccccaatacctcggaggcatcctgaaaacctgtgggcagcaaccaggttctctgtgcccccggaagtgggcgctaggttcgtctcctgccttccagttcgagcagctgttcccggagccggagctcgtcatccccctaccgccagcaccgactcttcacagcctgcacattcgccagcagcatcctgtcatagtggccaccagtgagtcacatctatggcctggagggccaggactgcaagtacacccgatgttcgggcccgaggcttacaccctggtcctgcaccttactcagctcatcacgcaggccaagcacacggccaggtccatctcggaccagtgtgtggagactccagctggccactccttcctgttgtggctgggctttggccccacagacaccaacggctcctattcagccatgacctgggcgagatggggcaggacagcgtccagaagatggacgagtgcctggaggaggccctggagtacctgcgccagatattccgagtatgagcaatggggcctgttccacggccagcccacgctggccagcggccacaggctcaacctgcacttcctaggcagctacctgacactgccctggctactgctggctttcttcatggcctctctgttctgcatcaggcccctcacctgtgcactgctgttcaccctgggctacgccctctactccttggccatgatgttgctgaccaggtggggaagctgcaccagccctgatggcattggaggtgggaggccactccagtgccgccggtctgtgggtgtccagatcgaccagcagaggcagatcctggacttggacctgggcctgcagttcctacagcagcagtacttggagttgctggccaagctccactag

SEQ ID NO: 8789 - DNA, 2523 bp, Homo sapiens
  SIMILAR (269)..(475): 471254mologous to Homo sapiens KIAA1418 protein,accession number AB037839,Smith-Waterman Score=141.
atggcttacatgcgaagagtgaagctgtgtgggcctgagaccaagaaaagagcgcttggacttgcttttgggaccagctctgatgaacctgtgtacactgagttgcaagtgatggacaatagctcagaccaacagtccacaggagctgcacgccatctccccatggctggtagcattttcggcagcctggatggtgtccttgtgggctggaacctgcgctgcttacagaggcgcgtgaatcctgtgaagtacagcatggtgatggaatttctcgaccctgggaaggtacctgtcatggttcctgcccaccaaaggcagcctgccaccaccctcactgtcctccagcccaggatgggccagtccctcacctgctcccaggaggctgcatacaggcccgtttctgcagatgctggcccaccccagatctgctggcatgtgcaagccagcacatgccaccacaccaggaagacaccagccatgccctttgcttcctgtagcctccagcacactagccccctgaagcgacacttctctcatcagatgtctgtgaatgcagaccccgcctcccaggagatctggaggtcagaaactctgctccgggtgagagctgagctggtctcaacgtctgtttcaaaagaaactggtttttgtcgaaatgtggcttcaacactattctctggagatgtaccaaaaaatgcagttcccctcatgccaaggcagcatgccctgggcacacatcctgtagtccggtgcccgtggcgtctatgcatgggagactttgcctttattgctgacaaagttccagaaggcttcatccagaatgaaggatctgtgggtgatggagttaaacttcagaagagcctcctgtcacttttcctccggttctggagaagagctctggaggtgctgcactaccgactctgtgtctccagtgcccaccacagcccccggcagcccaacctccaggccctccacacctaccaaggcccagtgctaaggaaggagctgaagacacagaggcctgggacttacggtaatgtgggtgctgccctgttcagaactgtcatccagcttggaggttccatgacccagactgtgtgcacaaatgacaagcgtatggatggatttgaggtcagtgaagcagagttcaggcccatgggggatttcggggacgacagagttagagccactggagaagagggacatgagggcttgggccagggcagtgtccaggaagcatctagcaacccccatggcaggacaggtgaccagggagaccctggaggagagtcgttcatgcccaccaaggggcacatgctggtggtgcgcctgccactgaagcacctgcacgcctttgccgacagcctgaagccagagcaggtctcacctttcgtccactcccacaccaccagcccgctgggggagttcaaacaggccaccttactgtgcaagcggctggtgaccctcccctcctctgcaggccgctgtcccgaggtcctggaggtgtggctgagctacctgcagccatggtggtatgcagctgacaagcaggctgccagcagcaactcccagccccaatacctcggaggcatcctgaaaacctgtgggcagcaaccaggttctctgtgcccccggaagtgggcgctaggttcgtctcctgccttccagttcgagcagctgttcccggagccggagctcgtcatccccctaccgccagcaccgactcttcacagcctgcacattcgccagcagcatcctgtcatagtggccaccagtgagtcacatctatggcctggagggccaggactgcaagtacacccgatgttcgggcccgaggcttacaccctggtcctgcaccttactcagctcatcacgcaggccaagcacacggccaggtccatctcggaccagtgtgtggagactccagctggccactccttcctgttgtggctgggctttggccccacagacaccaacggctcctattcagccatgacctgggcgagatggggcaggacagcgtccagaagatggacgagtgcctggaggaggccctggcgtacctgcgccagatattccgagtatgagcaatggggcctgttccacggccagcccacgctggccagcggccacaggctcaacctgcacttcctaggcagctacctgacactgccctggctactgctggctttcttcatggcctctctgttctgcatcaggcccctcacctgtgcactgctgttcaccctgggctacgccctctactccttggccatgatgttgctgaccaggatgccctcaactttttgccactggaccacacttccctgctgtgaacaggccaaatctagatgcttctcagacctcatggcctggagcctctggcagcacagcttcaggctctccagacaccacccctgctccctgcacctccacatccccctccttgcaccaggcaacgctattcccctggaacccatttgtggcccactctcttccatgaccaacacatcctatctctag

SEQ ID NO: 8790 - DNA, 375 bp, Homo sapiens
  SIMILAR (102)..(374): 751254mologous to Mus musculus Pro-Pol-dUTPase polyprotein,accession number Y12713,Smith-Waterman Score=390.
agtgtggtccagaacaagagaaggctctgcaacaggcgcaggctgctgtgcaagctgctgtgccacttgagcgatatgacccagcagatccaatggttcttgaggctgacctggctatggccactgctgagtgcccaatttgccagcagcggagaccaacactgagccctccatatggcaccgttccttggggtggtcagccagctacctggtggcaagttgattatattggatatcttccatcatggaaagggcagagttttgttctcactggaatagacacttactccggatatgggtttgcctatcctgcacataatgctattgccaagactaccatctgtgaactcacaaaatgccttatccaccgtcatg

SEQ ID NO: 8791 - DNA, 301 bp, Homo sapiens
  SIMILAR (3)..(146): 891254mologous to Mus musculus Pro-Pol-dUTPase polyprotein,accession number Y12713,Smith-Waterman Score=239.
gagacttccagccttttaccagggtaactgtgcattggggaaaaggaaatgatcagacatttaggggactactggacactggctctgagctgacattgattccaggggatccaaaacatcattatggtcctccagttaaagtagggggcttatggagctcagctgctgtagcagatgtggtttcattgcttgagcaaattaacacatctcctggtacctggtatgcagccattgacttggcaaatgcctttttctctattcctgtccataaagcccaccagaagcaatttgccttcagctg

SEQ ID NO: 8792 - DNA, 376 bp, Homo sapiens
  SIMILAR (3)..(206): 821254mologous to Mus musculus Pro-Pol-dUTPase polyprotein,accession number Y12713,Smith-Waterman Score=303.
acctctggccttttaccagggtaactgtgcactggggaaagggaaatgatcagacatttcagggactacaggatactggctctgagctgatgctgattccaggggacccaaaacgtcactgtagtcctccagttaaagtagggtcttatggaggtcaggtaattaatggagttttagctcaggtgcgacttacagtggctgctgtatcagatgtggtttcactgcttgagcaaattaacatatctcctggtacctggtatgcagccatagacgtggcaaatgcctttttctccattcctgtccatatggcccatctgaagcaatttgccttcagctggcaaggccagcaatatacatttactgtcctgcctcagag

SEQ ID NO: 8793 - DNA, 607 bp, Homo sapiens
  SIMILAR (318)..(374): 731254mologous to Mus musculus Pro-Pol-dUTPase polyprotein,accession number Y12713,Smith-Waterman Score=65.
atggtaaatcaaaaacgatatcacatccctggagggactgcagagattagtggcaccatcaagaagttgaaaaatgcaggggtggtgattcccactacatccccactcaactctcccatttggcctgtgcagaagacagatggatcttggagaatgaccatggattatcataagcttaaccaagtggtgactccaattgcagttgctgtaccatatgtggttgcattgcttgagcaaattaacacattttcttgtacctggtatgcagccatcgacttggcaaatacctttttctccttttctgttcataaggcccaaagaagtaatttgccttcagcaggcaaggccagcaatatacctttactgtccacccttagtgataactactctccttttgagagacagctcttggcctgttactgggcttcggtggaaactgaacatttgactatgggttatcaagtcaccatacaacttgaactgcctatcatgaactgggtgctttctgacccatctagccataaactgggtcatgcaaagcagcattccatcatcaaatggaagtggtatatacgtgatcgggctcgagcaggtcctgaaggcacag

SEQ ID NO: 8794 - DNA, 319 bp, Homo sapiens
  SIMILAR (4)..(162): 861254mologous to Mus musculus Pro-Pol-dUTPase polyprotein,accession number Y12713,Smith-Waterman Score=259.
ggagacctccagccttttgccagggtaactgtgcactggggaaagggaaataatcagacatttgagggactactggacacttgctctgagctgacgttgatttctggggacccaaaacgtcattgtggtcctccagctaaagtaggggcttatggaggtcaggggtatatcaactctccagctttgtgtcataatcttattcagagagaacttgatcgcttttcgcttccacaagatatcacactggtccattacactgatgacattatgctgattggatccagtgagcaagaagtagcaaaacacactgaacttattg

SEQ ID NO: 8795 - DNA, 1074 bp, Homo sapiens
  SIMILAR (802)..(1071): 811254mologous to Mus musculus Pro-Pol-dUTPase polyprotein,accession number Y12713,Smith-Waterman Score=377.
atgactaaaacaccaaaagcaatgacaacagaagccaaaattgacaaatgggatctaattaaactaaagagcttctgcacagcaaaagaaactatcgtcaaagtgaacaagcaacctacagaatgggagaaaatttttacaatctacccatctgacaaagggctaatatccagaatccacaaagaacttaaacaaatttacaagaaaaaatcaaacaaccccatcaaaaagtgggcaaaggatatgaacagacacttctcacaagaagacatttatgcagccaaaagacacatgaaaagatgctcatcatcactggccatcagagaaatgcaaatcaaaaccacaatgagataccatctcacaccagttagaatggcaatcattaaaaagtcaggaaacaacaggatgcagggggaggaacatggcttcattcctgctctgagtcatcgtcactgttcccacatccacttggtgatgagggacacacatctcagctgtgaagctcacagaactcactcaagagccacagatctatttcgaacgcatttggagagttggtgtgtgcaatccgaacacttgcagcctgcagacaacctactgtgggaccttgtgagcatggtaactgtgcactggggaaaaggaaatgatcagacatttcagggactactggacactggctctgagctgactttgattccaggggacccaaaacgtcactgtggtcctccagttaaagtaggggcttatggaggtcaggtaattaatggagttttagctcaggtgcaacttacagtgggtccaaagacagatggatcttggagaatggcagtggattatcataagcttcaccaagtggtgactccaactgtggctgctgtaccagatgtggtttcattgcttgagcaaattaacacatctcttggtacctggtatgcagccattgatttggcaaatgcctttttctccattcttgtctataaggcccaccagaagcaatttgccttcagctggcaaggacagcaatatgcctttacaatcctacctcaggggtatatcagttatctggctttgtga

SEQ ID NO: 8796 - DNA, 862 bp, Homo sapiens
  SIMILAR (366)..(1): 741254mologous to Mus musculus Pro-Pol-dUTPase polyprotein,accession number Y12713,Smith-Waterman Score=484.
atggtaagactagtgaattccatgaacatgagcccactgccacacttctttagccataaagtgagtgccttggtcagaggcaatgctgtgtggaataccatgacagtggataaggcattctgtgagtccactgatgatagtcttggcagaagcattgcatacaggataggcaaacacatatccagagtaagtgtctattccagtgaggacaaacctctgccctttcagaagaggtccaatacaatcaacctgctaccaggtagttggctgatcaccctgaggaatgtggctatactgagggctcagtgtcagtctctgctgctggcaaattgggcactcgacagtggctgcagccaggtctgccttgtagccctcaccctaccattcagggagccaatggtgggggtcctgccagctgctaagtatgtctatgccagttatgcatcctggcactgggaaaatgaccacaagatgagtccagggacccactggacccactgtagtgcagggtttatctcctcagacaaaggtggaatggctgatggcagcatgggtcaagaaggagatattgccactactggggatggtgaagctgtttgttctggcaaaaaagcttcaccagagtttacaagctcagtgtccccagcttcatcagggtcctcccacacatccccattcaaagttgtagggtcccattcttttccagtcaatgccctcacattaatagtagacacctgctttgcagctttgctaactgctgttaggctttcttctctaaaggctaaacagaaactagccctttcaaataatgccaccactgttatcaaccaactgcctgacactgcccctccttttttgcctg

SEQ ID NO: 8797 - DNA, 1488 bp, Homo sapiens
  SIMILAR (175)..(849): 711254mologous to Mus musculus Pro-Pol-dUTPase polyprotein,accession number Y12713,Smith-Waterman Score=829.
atgggccgggcgaggcggctcacgcctgtaatcccggcactttgggagaccgaggcggacggatcacgagctctaacagtggaaaccacagtcactcaactacaacatttaaatacagtgggaataattggattccgaggtggcaggggccaagtggcagcagtcaactgtcaaaagcgagatatccagccttttaccagggtaactgtgcattggggaaagagaaatgatcagacatttcaagcactagtggacactggccttgagctgacattgattcccggggacccaaaacatcattgtgatcctccagttaaagtaggggcttatggacatcaggtaattaatggagttttagctcagattcaaattacagtaggtccagtgggtccctggactcaccctgtggtcattttcacagtgcctaaatgcataattgacatagacatacttaggtggcagaactcccacactggctccctgactggtaggatgaaggctattatggtgggaagggccaaatggaagccgttagagctgcctctgcctagaaaaacagtaaaccagaaaccatatcacacccctgtagggactgcagaaattagtgccaccatgaaggacttgaaagatgcaggggtggtgattccaaccacaaccctgttcaactctcctatttggtctgtgcagaagacaggtggatcttggagaatgacagtggattattgtatgcttaaccaagttgtgtctgcagttgaagctattgtactagatgtggtttcattgcttgagcaaattaacacatctcctgccatagagtgggtcatgcacagcagcattccatcatcaaatggaagtggtacatacatgatcgggctcaagcaggtcctaaaggcacaacctgcaccaatggcctcatggggagtttcctatgatcagtggacagaggaagagaagactacggcctggttcacagacggttcttcacgatatgctagcaccacccgaaactggacagctgcagcactacagtccctttctaggatatccctgaaggacagctgtgaagggaaatcttcccaccacccgtgtcatggaggcaaggatggaggttatgcatgggctcagcaacatggactttcactcaccaaggttgacctggctatggccactgctgagtgcccaatttgccagcagcagagaccaacactgagccctcgatatggcaccattcctcagggtgatcagccagctacctggtggcaggttgattatatgggacctcttccatcatggaaagggcagaggtttgtcctcactggaatagacacttattctgaatatgggttgtttgcctgtcttgtactctatgcttctgctaagactaccatccatggactctcgaaatgccttatccaccatcaccgtattctacaaagctttgctgctgtccaaggcacttactttatggctaaagaagtgcagcagtag

SEQ ID NO: 8798 - DNA, 1059 bp, Homo sapiens
  SIMILAR (10)..(528): 761254mologous to Mus musculus Pro-Pol-dUTPase polyprotein,accession number Y12713,Smith-Waterman Score=709.
atgtcttctgtgttgctccggctcatttatcaactgacccaaaagactgccagttttgaggggggtccagaacagaaggctctgcaacaaatccaggctgctgtgcaagctgctctgccacttgggccatatgacccagcaaatccaatggtgcttgaggtgtcagtggcagatagggatactgtttggagcctttggcaggtccccataggtgaatcacaacagagatctctaggattttggagcaaggttctgccatattctgcagataactactttccttttgagagacagctcttggcctgttactgggctttgttggaaactgaccgtttgactgtgggtcatcaagtcaccttgcaacctgaactgcctatcatgaactgggtactttctgacccatctagccataaagtgggtcatgtacaccagcattccatcatcaaatggaagtggtatatacgtgatcagactcgagcaggtcctgaaggcacaaccacccctgtcatcacccaatggatgcccatgaacaaagtggccttagtggcagggatggagaaagggcagaggtttgtactcactggagtagatacttactctggatattggtttgcctatcctgcacacaatgcttctgccaagactagcatctatggattcacagaatgccttatccattgtcatggtattccacacagcattgcctctgaccaaggcactctctttacggctaaagaagtgtggcagtgggctcatgctcatggaattcactggtcttaccatattccccatcatcctatagcagctggattgatagaatggtggaatggccttttgaagtcacaattacaatgccaactaggtgacaatactttgcagggctggggcaaagatctccagaaggccatgtattctctgaatcagcgtctgatatatagtactgtttctcccatatccaggattcatgggtccaggaatcaaagggtggaagtggaagtggcaccactcaccatcacccttagtgatccactagcaaaatttttcttcctgttgccatga

SEQ ID NO: 8799 - DNA, 3348 bp, Homo sapiens
  SIMILAR (1984)..(1076): 751254mologous to Mus musculus Pro-Pol-dUTPase polyprotein,accession number Y12713,Smith-Waterman Score=1216.
ttaacttgtttctcctcctccacagaactctggcagttcatcagtgtcgcaggcatatgggaaggactcctgttttaaaggcctaagaggacccatgtcctgtttttcaatattaacaccaaatactgtttcaagctgagcagaactgccaaaaacaacaacaaataagatctcagatagtactctgtttttcttcaccaaactagagaagacactagcaggatgttcctggaatgtccttctgttcgttagtgtgggagcagatgagagataacttctttcctcaggacacacaacatgtcgtagtagttgtagtcctgatgttccacccccatcagtactcccagcaatgctctcgtcttcctgcagaggttctgccagtgcctcaagaatgtcctcagagttctgtccattcttcttctgctcagacgttttgtctgaaagtattttcccaggccagagctggactctctctctcctagaatcaacatcaattccctcaacagtcttttgctggagaattccaggtaatgtgctcaggtctttgacaaggatggcagggccatcctgctgattggtccattttacagagagccgattggtctgttttacagagagccgattgctccgttttgacagggtgctgattggtgcgtttacaatccctgagctacacacaaaagttctttccccacgtccccactagattagctagatacagagtgtcgattggtgcattcacaaactctgagccagacacagggtgctgattggtgtgtttacaaaccttgagcagactctcgagcccagctggcttcacccagtggatttcgcactggtgctgcaggtggagctgcttgcccttcccgcgccatgcgccggcacttttcagtccttgggagatcgatggaattggctgccctgaatcagggggctgcgctcgtcggggaaactcgcgtcgcgcaggagcccacggcggtggggggtggtggggagactcaccgtcggccggcactgctgggggacctggcgcaccctccgcagctgctggcttgggtgctaagcccctcactctgttatgtagtagtagactgatttcatcttgacagtccaggtcaatcaccccagtcaacactgtaactcctttcttagcctgttgacttaaaggtaggagaagcctaaagtgtccaggtggcaatctcaacttccagtttaatggaatcattgttgtgtctcctgacggcagccttcctccctctggaactaagacctctaggcaagcaggacgtaatgtcatggcaacaggaagcaaaaattttgctagtagatcactaagggtgatggtgagtggtgccacttccacttccaccctttgattcctggacccatgaatcctggatatgggagaaacagtactatatatcagacgctgattcagagaatacatggccttctggagatctctgccccagccctgcaaagtattgtcacctagttggcattgtaattgtgacttcaaaaggccattccaccattctatcaatccagctgctataggatgatggggaatatggtaagaccagtgaattccatgagcatgagcccactgccacacttctttagctgtaaagagagtgccttggtcagaggcaatgctgtgtggaataccatgacaatggataaggcattctgtgaatccatagatgctagtcttggcagaagcattgtgtgcaggataggcaaaccaatatccagagtaagtatctactccagtgagtacaaacctctgccctttctgccaccaggtagctggctgatcaccccgaggaatgatgctatatctagggctcagtgttggtctctgctgctggcaaattgggcactcagcagtggccatagccaggtcagccttggtgagtggaagtccatgttgctgagcccatgcgtaacctccatccctgccactaaggccactttgttcatgggtatccattgggtgatgacaggggtggcacttccatttgatgatggaatgctggtgtacatgacccactttatggctagatgggtcagaaagtacccagttcatgataggcagttcaggttgcaaggtgacttgatgacccacagtcaaacggtcagtttccaacaaagcccagtaacaggccaagagctgtctctcaaaaggaaagtagttatctgcagaatatggcagaaccttgctccaaaatcctagagatctccgttgtgattcacctatgggtgcccgccaaaggcgccaaacagcatccctatctgacactgacacctcaagcaccattgaatctgctgggtcatatggcccaagttgcaaagcagctagcacagcagcctggaccaataagtccagtgtgtttactacttcttgcttactggatccaataagcataatatcaccaatgtaacggactagtgtgatatcgtccagaagtgaaaagtgatcaagttctctccgaataagattatgagacaaagccggagagttgatatacctctgaggtaggacagtaaaggtatattcctggcttttccagctgaagacaaattgcttctggtgggccttatggacaggaatggagaaaaaggcatttgccaagtcaatgcctgcctgacctccaaaagcccctactttaactggaggaccacaatgatgttttgggtcccctggaatcaatgtctgctcacagccagtgtccagtagtccctgaaatgtctgatcatttccctttccccagtgacagttaccctggtaaaaggctggaggtctccttttgttgcaggtcagccacttgcaggataagagctgtgtctgttttcccacaatttcagctctttctctacaggagataagactctcactcagggtaatcttggcagatttgaggctcagtatctgcttctgaagccaggagacagaatccctaagttcatcatcttctttcatccttttgtccactgaagttaggagcaaccaaccagcttcattatgttcttgggttctccatatatggtcaaaggtattatgtatagagtcactaaacttcttgcctctcgtgagcagtgaattaggagtgtcaaatgcatttattttgcataactctctaaacagttcacaccaaggactatcagtgttctccatactattagaagtagagtccttagcattttggggtctaatcatattaagcagccaacttcagaaaccccaaaaccaacaaaagaactccatccttaatattctgttcctctagaaccactcccaataccaaaatctgtattagtcagggttcttcagttttgggacttgga

SEQ ID NO: 8800 - DNA, 469 bp, Homo sapiens
  SIMILAR (29)..(466): 911254mologous to Escherichia coli PUTATIVE MALATE OXIDOREDUCTASE (NAD) (EC 1.1.1.38) (MALIC ENZYME),accession number D90874,Smith-Waterman Score=650.
cacgaattcatgtccgtcccgagatcaccttgactgcggaaacactgcgcgaccctactgaattgacccgcacgacactttgttgtcgcactccaactttggttcttctgactgcccgtcgtcgagcaaaatgcgtcaggcgctggaactggtcagggaacgtgcaccagaactgatgattgatggtgaaatgcacggcgatgcagcgctggtggaagcgattcgcaacgaccgtatgccggacagctctttgaaaggttccgccaatattctggtgatgccgaacatggaagctgcccgcattagttacaacttactgcgtgtttccagctcggaaggtgtgactgtcggcccggtgctgatgggtgtggcgaaaccggttcacgtgttaacgccgatcgcatcggtgcgtcgtatcgtcaacatggtggcgctggccgtggtagaagcgcaaacccaaccgctgtaa

SEQ ID NO: 8801 - DNA, 1881 bp, Homo sapiens
  SIMILAR (634)..(1194): 941254mologous to Escherichia coli narI protein, gamma subunit,accession number M20147,Smith-Waterman Score=917.
atgtggcgcatgtttcattttcgcaccattgcggggcgctgtttttattatttcctgtctacactcagcttattgggacgcgaaatcgtgcgcaaaaagctggcacctactttggcttatacgaggatggggcacagacaggtaaccgacgtttcccaaacgtcctataacggatattttcgcctcacagggaagcattatgaaaaagatgatgatagccacactggctgccgccagcgtgctgcttgccgttgcaaatcaggcgctgctggcgcgacgcttgatgccgttcagaaaaaaggttttgtgcaatgcgggatcagtgatggattacctgggttctcttatgccgatgctgacggtaagttttcaggtattgatgttgatatttgtcgtggtgttgccgctgctgtatttggtgacgacacgaaagtgaaatataccccgctcactgcaaaagaacgcttcaccgctttacagtcaggggaggtggatttgctctcccgtaatacgacctggacttcatctcgcgatgccgggatgggaatggcatttaccggcgtcacttattacgacggcatgggcttcctgacgcacgataaaggggggctaaaaagcgcgaaagaacgggatgggcgctaccgtcggtattcaggcggccagatgctggatcgcaaagggatgaacctggcgtcgaacctgttccatatcgggattctggggatttttgtcggtcacttcttcggtatgctgacgccgcactggatgtatgaagcctggctgccgattgaagtgaaacagaaaatggcaatgtttgctggtggtgccagcggcgtgctgtgtctgattggcggcgtgctgttgctgaaacgtcgtctgttcagcccacgcgtgcgtgcaaccactaccggagcggatatcctgatcctgtcgctgctcgttatccagtgcgcgctgggcctgttgaccattccgttctccgctcagcatatggacggtagcgagatgatgaaactggttggctgggcgcagtcggtggtgaccttccacggtggcgcttctcaacacctcgatggtgtggcgtttatcttccgtctgcacctggtgctggggatgacgttattcctgctgttcccgttctcgcgtctgatacacatctggagcgtaccggtggagtatctgacaccgaattttagttcacatagaccctgcttcggcggggtttttttatatattctggtgatgccgaacatggaagctgcccgcattagttacaacttactgcgtgtttccagctcggaaggtgtgactgtcggcccggtgctgatgggtgtggcgaaaccggttcacgtgttaacgccgatcgcatcggtgcgtcgtatcgtcaacatggtggcgctggccgtggttcgggcactcaaagacgcaggcgtgaaagcaaatcgcatctttactgacaaggcatcgggcagttcaagcgatcggaaagggctggacttgctgaggatgaaggtggaggaaggtgacgtcatcttggtgaagaaacttgaccgccttgggcgcgatactgctgacatgatccagttaataaaagagtttgacgcccaaggtgtatccattcggtttattgatgacggaatcagtaccgatggggagatgggtaaaatggttgtcactattctatctgcagtggcccaggcagaacgacagagaatactagagcgtaccaatgaaggtcgccaagaggcaatggcaaaaggagtcgtattaggtagaacacgaacactagatagagatgcaggtattaactatgtggcaacaggggttaggtgcctcacatatatcaaaaacaatgaatatggctcgttcaacagtatataa

SEQ ID NO: 8802 - DNA, 1578 bp, Homo sapiens
  SIMILAR (1578)..(1003): 981254mologous to Escherichia coli K12 putative dehydrogenase,accession number AE000186,Smith-Waterman Score=1008.
tcatgccgaactatctgcgcttcgtgcgtggtctgattgactccagcgatctgccgctgaacgtttcccgtgaaatcctccaggacagcacggtaacgctgttacctgcgcaatgcgctgaccaagcgtgtgctgcaactgctggaaaaactggcgaaagacgacgcggaaaaataccagaccttctggcaacagtttggcctggtactgaaagaaggtccggcggaagatttcgctaaccaggaagcgatcgccaaactgctgcgttttgcttctacccataccgattcttctgcgcagaccgtatctctggaagactacgtttcccgcatgaaagaagggcaggagaaaatctactacatcaccgcagacagctatgcggcagcgaagagcagcccgcacctggaactgctgcgtaagaaaggcatcgaagttctgctgctttccgaccgcatcgatgagtggatgatgaactatctgactgagttcgacggtccaccgttccagtcggtgtctaaagttgacgagtcgcttgaaaacctggctgacgaagttgatgagagcgcgaaagacgcggagaaagcactgactccgttcatcgaccgtgtgaaagccctgctcggcgagcgcgtgaaagatgtccgtctgactcacgcgggatctggactcgtcggtgagaacgtataaataaccgtcgggtccagtgcgaacatcacgaattcgctgccctctgtccgttaaaatacggccatcttctgtcactttgtcgccgttgacgctcatcacaatgacatctttatctttcagcgcgccaataaataatttttgctgccactgggggaatttatcgctgttatagaaggccatgccgctcacagcgggcgaatctttccagtaaaaaacaggttgctcggtcccggcgacgatctcccctttcgcttccggtatcttaaagcctgaatagttgattccccaggttgccagcggccagccgtagtttttgccggattcctttataaaaggattatcatccgggatttcgccctggtcggtcagacgcaccagtttgccctgtaatttatccagatcctgcgccgtcgggcgctgattgttttcgcccagagcaataaaaagataacctttaccgtcgaataccagccgcccgccaaaatggttgccggtagacagttttggcatctggcgaaagacggtgcggaagtcggtcacttttgagagatcatcacttaagcggccataacccacagcagttccggctttgccatcatcgccaacttcggaataacttaaccagatgcggcgagactgagcaaaatcaggcgctaaaaccacgtccagcaggccgccctgcccgtgcgcccaaacgtccggaactccggaaagcggcgcagataatccttttcctgcttgccagtgacgcaactcgccgccgcgcagagtgattaacataccgtgattatcgggtaaaaaggccagtgcccagggatggtcgagtttgtcttgcagtacttcgacatttaccgttgcaggagccggccagagagcggcagaaagacacat

SEQ ID NO: 8803 - DNA, 508 bp, Homo sapiens
  SIMILAR (2)..(505): 1001254mologous to Escherichia coli D-GALACTOSE-BINDING PERIPLASMIC PROTEIN PRECURSOR (GBP) (D-GALACTOSE/ D-GLUCOSE BINDING PROTEIN) (GGBP),accession number D90885,Smith-Waterman Score=829.
gctggaatttggtaaaaaactgggtaacgctgccgctgattattttattgccaataaaattgaccagccgaaaattgccgtcatcaattgcgaagcctttgaagtttgtgtgcagcgacgtaaaggatttgaagaagttttaaaatcccgcgttcccggcgcgcaaattgtcgctaatcaggaagggactgttttagataaagcgatttccgttggtgaaaaactaattatctccacgccggatctcaacgccattatgggggaatcgggcggtgcgacactcggcgcggtaaaagcggtacgtaatcaaaatcaggccggaaaaattgctgttttcggttcggatatgacaaccgaaattgctcaggagctggaaaacaatcaggtgctgaaagcggtagtggatatttccggtaagaaaatgggcaatgctgttttcgcgcaaacattgaaggttatcaataaacaagccgacggtgaaaaagtgattcaggtgcctatcgatcgg

SEQ ID NO: 8804 - DNA, 1401 bp, Homo sapiens
  SIMILAR (1399)..(758): 981254mologous to Escherichia coli dnaZX protein (AA 1- 643),accession number X04487,Smith-Waterman Score=1053.
gctgcgcatccttcagcggatatttctgctgctcggcgacatcgaccttaatcacaccgctggcaatcaaagagaacagttcattactggcctcggttaattcctcccgcgtggtgatatagccttgcagggaagggcgtgtcacatacaacgagcctttttgattgagaatgcctaagttcacaccggtaaccgcacctgatgagttgccaaaactgaccattaagccgcggcgttgcaggcaatccagcgaccgttcccaggtgtctctgcccacggaatcgtacaccacgcgcactttcttaccgccggtgatctcttttaaccgctcgaccagatcctcttcacgatagttaataacctgccacgcgcccgcttttagcgcgctctgcgctttttgcgcggttccctgaacccccagccgtgttgaaggtaaccaggagtacccaagcttggtgtacatcccggtcccaggctccggtggaatatgtgaacccgcgatcataaacacggcctgaatctgtatgttcagcgtgtgttcatcatgaccgacgcagaacagttcatgccgaactatttgcgtttcgtgggtggtctgattgactccagcgatctgccgctgaacgtttcccgtgaaatcctccaggacagcacggtaacgcgtaacctgcgcaatgcgctgaccaagcgtgtgctgcaaatgctggaaaagctggcgaaagacgacgcggaaaaataccagaccttctggcaccagtttggccgcgggattatcatcttcaccgatagtcagttcaaccgttgaaccttttaacatgctcaacgcttcagccagtttttgctgtgcaccgcggttgttcaaatgccgctgagaggagcgcaaatgcagacatactgcgttgtcgctctcctctttccaggcatttaacgccacctgttcgaccagttttggtagcgaaagttggctcacctgtgccgcccacgggtcgcgctcaatggcttctgccgctagcttcgccgccagttccggcgttttttcatgttccagcgcttttttcagcgccttcggcgtggcgaccacttctttttgctgcatcaccggagtggtcgccttccagcgatacgcttcttttttggctggcgctttttccagcgccgatggcaccggacgcgcctgaacgcgatcggtgaccgaagccagtctttccagcgcagcgttattcaccggccgcgcgcgggtagcggctgccggttcactcttttttgctttggttgctccctgcacgcgctgcaactgctggcgcgccgccagcacctggctggtggtttccgggagcggtacagtcggtgcctgctgcggcgctgattgcggttgcggcggcacctgggttggcgtcatta

SEQ ID NO: 8805 - DNA, 1977 bp, Homo sapiens
  SIMILAR (1743)..(664): 981254mologous to Escherichia coli K12 putative dehydrogenase,accession number AE000186,Smith-Waterman Score=1908.
tcatgccgaactatctgcgcttcgtgcgtggtctgattgactccagcgatctgccgctgaacgtttcccgtgaaatcctccaggacagcacggtaacgctgttacctgcgcaatgcgctgaccaagcgtgtgctgcaactgctggaaaaactggcgaaagacgacgcggaaaaataccagaccttctggcaacagtttggcctggtactgaaagaaggtccggcggaagatttcgctaaccaggaagcgatcgccaaactgctgcgttttgcttctacccataccgattcttctgcgcagaccgtatctctggaagactacgtttcccgcatgaaagaagggcaggagaaaatctactacatcaccgcagacagctatgcggcagcgaagagcagcccgcacctggaactgctgcgtaagaaaggcatcgaagttctgctgctttccgaccgcatcgatgagtggatgatgaactatctgactgagttcgacggtccaccgttccagtcggtgtctaaagttgacgagtcgcttgaaaacctggctgacgaagttgatgagagcgcgaaagacgcggagaaagcactgactccgttcatcgaccgtgtgaaagccctgctcggcgagcgcgtgaaagatgtccgtctgactcacgcgggatctggactcgtcggtgagaacgtataaataaccgtcgggtccagtgcgaacatcacgaattcgctgccctctgtccgttaaaatacggccatcttctgtcactttgtcgccgttgacgctcatcacaatgacatctttatctttcagcgcgccaataaataatttttgctgccactgggggaatttatcgctgttatagaaggccatgccgctcacagcgggcgaatctttccagtaaaaaacaggttgctcggtcccggcgacgatctcccctttcgcttccggtatcttaaagcctgaatagttgattccccaggttgccagcggccagccgtagtttttgcctttttgcgggatattaatttcatcaccaccgcgcgggccatgttcattcagccacagtgcattactccacggattcatcgccattccttgcggattacgaatgccataagaccagatctcggcgcgcgcaccggattcctttataaaaggattatcatccgggatttcgccctggtcggtcagacgcaccagtttgccctgtaatttatccagatcctgcgccgtccggcgctgattgtttttccccagaacaataaaaagataacctttaccgtcgaataccagccgcccgccaaaatggttgccggtagacagttttggcatctggcgaaagacggcgcggaagtcggtcacttttgagagatcatcacttaagcggccataacccacagcagttccggctttgccatcatcgccaacttcggaataacttaaccagatgcggcgagactgagcaaaatcaggcgcttaaaccacgtccagcaggccgccctgcccgtgcgcccaaacgtccggaactccggaaagcggcgcagataatccttttcctgcttgccagtgacgcaactcgccgccgcgcagagtgattaacataccgtgattatcgggtaaaaaggccagtgcccagggatggtcgagtttgtcttgcagtacttcgacatttaccgttgcaggagccgcccagagagcggaagaaagacaaataaggggcacaaggaaaaaggattgtcgatgcataacgcctccggattgactctggcttaaagcgtagtcagtggaggagataacaaattcatttttacaaaaacttaaacatgaagggggagacgctttctcccccttagttttcaggccttctcaagcatggcgtgcttctgcaggctctggatactcagcgtttaagctcatcagacaattttcaagcttatcggcgttgacggtaataacagtcgggcaatcatggtgcccact

SEQ ID NO: 8806 - DNA, 1060 bp, Homo sapiens
  SIMILAR (83)..(451): 821254mologous to Escherichia coli heat shock protein HtpG,accession number U82664,Smith-Waterman Score=498.
gccaaactgctgcgttttgcttctacccataccgattcttctgcgcagaccgtatctctggaagactacgtttcccgcatgaaagaagggcaggagaaaatctactacatcaccgcagacagctatgcggcagcgaagagccagcccgcacctggaactgctgcgtaagaaaggcatcgaagttctgctgctttccgaccgcatcgatgagtggatgatgaactatctgactgagttcgacggtaaaccgttccagccgggggctaaagttgacgagtcgcttgaaaaactggctgacgaagttgatgagagcgcgaaagaagcggagaaagcactgactccgttcatcgaccgtgtgaaagccctgctcggcgagcgcgtgaaagatgtccgtctgactcaccgtctgaccgatacgccagcgatcgtttcgaccgacgcggactaaatggacccctcggatggcgaacgtgtttcggtggggcgggccagaaagtgccagaagtgaaatacatcttcgaactgaacccggatcacgtactggtgaaacgtgccggccgatactcgaagaagaagcgaagttctgcgtgtggggtaagaactgcgtgctgggacccttctaaagggcgaccccgccgggcgagctcggcttgggcgtctcggccccccgggttcttacagcggcctgcggaaaggtcaagatccatctgggcggtagcccacagccgccatcggtcgtagtgagcgccgacggccggcaaccgctcagcccgcccccgcccggcttctgcatcgcgtcctgacaacgtggcggcctctcggtgctcgccgaccgcgcggtcctctcactcgtcccgcgcctctcgcgacagcttcgcacgctctgctgagaacgtcccgctgggcggcgccgatgagggcgagaccgtcgcgcgctcgctcgcctctcgactcgacgtgccctcgggtggtggcggtacatgtggagttctctgtgactgcgcgatgcgcggcagctcggctccagactgtcgctctcctcccgcagcttctgttcgct

SEQ ID NO: 8807 - DNA, 750 bp, Homo sapiens
  SIMILAR (748)..(335): 1001254mologous to Escherichia coli periplasmic protein (AA 1 -306),accession number X04477,Smith-Waterman Score=687.
gggcccgcccggggggtggggtgttaatggtttcccgggccccccattcttgtttcatcaaagaggtttttccgcccagaatttaggatatggcttttcaataaaaccctttgcataccagaaataaaataccctggaaaagtagcctgaatgtccagacactcccggcgaaaggaaaagaatctctgataaggcattgagataatggatattcttagtgaagaagaagtgagttactataaaaaatcgctcatatcccaggaaggaagcataaaaaaaggtgcgccaggagacgcaccagttgttgcaaaatcagcactgtggggcgtaattaccccttgccttttacactgctgataaaggtggaacgggcagatgtcgatcccaggcgttcagcttcatcaagcagttttaacgccttatcaacatcacctttcgcgacagcgtttttgatcgcggtattaaaataactttccgtgtcgttgagcatcggctcgcttttcttcaccggtgccggagcgggtgcagccacagctggtgccgccgtgttacctaccgtaaccggagctggagcggaagaaccaaataaaggtcctaccaacacgctggagctggagttcgttttcactttcagtttcagtaagccatcggtggtatgacgagcaaccggatcggggatatccgggatcgagttaccgacgcccttggcataggctttagccgggtcgagcagttgggtcgtctgctgga

SEQ ID NO: 8808 - DNA, 834 bp, Homo sapiens
  SIMILAR (219)..(326): 411254mologous to Human papillomavirus type 6a base 3241 is first base after a stop codon; position 3286..3288 is first start codon; putative,accession number L41216,Smith-Waterman Score=73.
atggcactgagaccctctcacatcagccagattcacccaatacttcttgggagtagtggagcaggggtcaccgtggtcattttacggatgaagaaactgagtctagaggttacagtgctggtctgctttgcctggctgtccatctccagtgccggctgggggcctcctggtccccaaggtgaggagcacattgctcagccagaatctccaccaggcgaaggccacatcaacttgaccctcagcactcgaaatgtgctcagtgctaatccattcttgaacgaacacatgaataaggacattctcaagctatttccccctgtatgtggagacctagctggccactcctgtttgaagaggtgcaggtacgggattaacaaggtaaccgcgaagaatccggggaatacacgcataaaagaaaaggatagcaccaccgtagcgaaaggggttctcagagatgctgggtatgcagcttacgctctgcccttctcatatagaagatctccccttcagtactacctggagcatggaagtgagctggaggagaatccattaagaaggcccctgccaatccagcaagagaacatgcttcatatagatgatagatacagattgttagaattggaagggccctcaatgatcatcaaatacaatgatgcatttccagatacatatgaagcaagagagcacagagcagcagacgatgacagcacgacgctaacagtgaagcgaagtagacgaatagagagaggacacgacactagcagcaagaggaagaacagaagcatagtcagctcggtaccagcttacatgacagtccgtgccatcaccgcatga

SEQ ID NO: 8809 - DNA, 1383 bp, Homo sapiens
  SIMILAR (829)..(1380): 1001254mologous to Escherichia coli orf303,accession number X76979,Smith-Waterman Score=929.
atgcggattgtgttatctcagcagcaccaaaaagcaatgcttggtgggccgatcaagggaggcttaggatgggaccacgatcgcgaggaacacaactgctgcatatgcaaaaaggactcgggacttcgacgaatgcctgatgacggcgcctgcggacgacggatgacgcccaaagatggctggactggcagtgctagctggcacacagtcataagccttactcgcaatcctctgaagctctatgggcccgaatgtgatcctcattgccgcagacctcgaggtgacacattggtttttgagccccgtctacaactcgtatatttggtgttgcggacactttacgcggcgcgttgccggtggaattggctggacccgtcgttttcacgcgatttgcccaaaaactgcggtattcggggattacccgggaattggatatccggttcacacgacgttccggccgggtgcaatatccgccagaacgcagtttgtaactcgatgtaccggatggactgtgaagattacgttcaccgtattggtcgtacaggtcgcgcaggcgcaagcggtcactctatcagcctggcgtgtgaagagtatgcattgaatttgcctgctattgagacctatattggtcactcaattccggtggctggaagcatccagacgctgacgcgaataaaacgcaaagtgcgtctggctgctggcctgaatagcgaaaatgccctctccaatgaagcaatggagcgcggttggcaatgtttgcgcctgtttgctgaacgtctgacattagtcgatttatcaaaacgcagtaatttgagattgttctactattttagccgttttagccagacaatgatgtggatcgacacggttaacggtttgattatggtggactgcgccagtgccaaaaaagcggaagatacgctggcattactgcgtaaaagcctggggtcgttaccggttgtaccattgagcatggaaaacccgattgaactgacgctgaccgaatgggttcgctccggtagtgcggcacagggcttccagctgcttgatgaagccgagctgaaatcgttgctggaagatggcggcgtgatccgcgcgaagaaacaagatctgaccagcgaagagatcaccaatcacattgaagccggaaaagtggtgactaaactggcgctcgactggcagcagcgcattcagtttgtgatgtgcgacgatggttcgctcaagcgtctgaagttctgcgacgagctgcgcgatcaaaacgaagatatcgaccgtgaagatttcgcccagcgttttgatgccgatttcatcctgatgactggtgaactggcagcgttaattcaaaacctgattgaaggattaggtggcgaagcacaacgttaa

SEQ ID NO: 8810 - DNA, 5484 bp, Homo sapiens
  SIMILAR (4125)..(3073): 961254mologous to Escherichia coli NADH DEHYDROGENASE I CHAIN N (EC 1.6.5.3) (NADH-UBIQUINONE OXIDOREDUCTASE CHAIN 14) (NUO14),accession number D90858,Smith-Waterman Score=1665.
ttaatgactttctttttcgcgtaaacgccaggcgtgtaataacggttcggtatagccgtttggctgtttcacgccgaggaagattaaatcgctggcagctttaaaagcacacgagttagcgaaattccccgccatcggacgataagccggatcgccagcgttttgctgatcaaccactttcgccatattctccagcgacgcctgcacctgttctttggtcagaataccgtgacgtaaccagttggcgatatgctggctggagatacgcagcgttgcgcggtcttccatcaacgccacattgtgaatatccggcacttttgaacaaccaatcccctgctccacccagcgcaccacgtaccccagaatcccctgcacgttgttatccagctcttgttggatctcttgcgccgaccagttagcgttttcagcaaccggaatagtcagcagatcgtccagcagcggttcaaattcagcattgaactcggtctgggcaatgttggcttgtacgctctgtacgttggtttggtggtagtgcagcgcatggagcgtagcagcggttggtgacggaacccaggctgtgtttgccccggcacgcagttggtcgcccttctggctgtacatgtctgccatcaggtccggcatgaaccacatgcctttaggtaccgagctgagtgatcccgtggggggggggggggggggggcggtcggtgggggctgcggtttctcgtcgtgggtggggcggtgtcgctgtggttgcgcgcgtggtgcgtgtggtgggggggggggcgggggggggggtgggggtggggggcgggtgcgtctgtgtgtcgtcgctcctgtggcgcgcgtcggcccccggggtcccgtgttggggggggtgggtggcgtgcggttctggttgtgtggagtactccacacagagatgggcggtgggtgtagcagggtggtatgctttgtgtagtgtccgggctgatgctgggcggtgttcatgcctgcgctgcggtttgtcatctggtgtcggtacgtgggtgttcggcgacaatgtttcgggaagcgtttacgcagcgcgtcgatcacatcagacgtgtcatccaccgacagcgtggtctgggtcataaaggagagcttctcttcgtttttgaccgtcagtttccacacatcgtccggcgattcgagccagatacattcccccttccgggttactgtactggcccattgtcccttccacttgccgggtgcccggcgtgaccgatgagaatagattcttcgccacggcgatctggcgcgggcgacttccatatgcactttggtcaccagcggacaggtggcatcaaacaccgtcaaatcgtaacttttggttcgttgtacgactaatagtatccaagccactatctccactgctgcttttactgcggtaacagatatatcgcctccatcaccgctgaagtaatgaagtaaggcagcaagcctcgccatgttctccgccattttagaagcataatccttaaaatcataaagaaggccaatcattctcatttctgactcgacctggttgtagaattcgatccaatgtctttctgcttctgcagagaatcggaggcagatgcgattattttcattaattttaatgatgctctcattaacaatttccataagacgttggtgaaataccggcaaatgttcatttgaaaaaattgggttggaaatttttctgttaccttgtgttgaagcaggctggcacatgaggcaccgtgcaaaaaatccaatcccctttgccatatctcctttcctgtcgatataacccttaaaaacattaggctggaccatcagcgacagtgttattcttgcatctctaattaatttctcgggctcgtttttcctttccaccgtaaatattgaaccatcccacatcttattgataaacggcagctcgttaagtgtgtaaccattaaaaatgatcccagcttcatcagacatgatgccgactgatcgccagtgcccacagagatgagctttaatagctgcaggtgtggcatcgttaaataaaaatttgaatctcactggagctttcgggtttgtcgtaagtagttctttaagtctttcatttgttgccaagtgatctttgttacgtcgaatatctgatttaagttttgacatcagtgcttttttttcaatattaaaaattgcttcatcatttctccatgcggtaagatcgtgggtgtatttttcaaataaatcctcttccagttgatataatggcttcatcagcagtttatcaaccgtactcttacgttcacctgagtcaggtagttggtgttggttggtggtgtgggttgttgttgtctggtatggtgtgtgggtgtgttgtgcgtgtgtgtggggcgtgtttgtgttgtgtgttgtgtttggcgatttagcgttaagtccggaaggttgaattctccgcggagtttgctgggggcaaaaatgtaagcgtgatttgagttccccgagccgtgggggcgcacgggcaggtaaaatccccatggttaaggtctgctgctgtctgaaggcatcggcgacacgctgcgcgtatcgctggcggccgatccggtcgaagagatcaaagtcggtttcgatattttgaaatcgctgcgtatccgttcgcgagggatcaacttcatcgcctgcccgacctgttcgcgtcaggaatttgatgttatcggtacggttaacgcgctggagcaacgcctggaagatatcatcactccgatggacgtttcgattatcggctgcgtggtgaatggcccaggtgaggcgctggtttctacactcggcgtcaccggcggcaacaagaaaagcggcctctatgaagatggcgtgcgcaaagaccgtctggacaacaacgatatgatcgaccagctggaagcacgcattcgtgcgaaagccagtcagctgcctggcgaaacggccatctggcagcgcattgaaggcacactgaaaaacgtgctcggcagctacggttacagtgaaatccgcttgccgattgtagagcagaccccgcttgaacagtgatgtacgatgattctccatgagcaaacactcgatagaggaccctaggcggtagtgcttgtgcgaggttgcaccgataaagcccagcgtcatcgggataccggccagagacagcatcatcaccgtcatcactgccgcgaggatcggacgatgccagaacagaccgcggtaagagaacagggaatcagcatccgggccacgatacgggctggacatcaggctgaccacgccgaacgcgccgaggctgctgaacagataaccggccaggtaaacccctaccgcttccatcgacatctcgccggtttgcagcgcaatcagcgctaccagcagatagccgaggtgagagatagatgagtaaccgagcagacgtttgatattggtctggctcagcgccatcaggttaccgaagatgatggaggcaaaggcgataatcgccagcaccacgcgaatcgcttcgctgtcacccaccggtgcgtagaggaacagacgcatcaccacaccgaagatagcgattttgctcgccgtcgccaggaaagtggaaaccggcgcaggcgcgccctggtatacgtctggcgtccacaggtggaacggcaccagagagagtttgaagccgaggccaacaatcatcaggccgaaacctgccagcaacagcggctcgttgagcataccgtcgccaaggtttttacccaacgcgacaaacgacaggtcgccagactgcgcatacaccagcgccataccaaacagcaggaaagaagacgctgcggcagaaaggatggtgtatttgatactggcttccagtgaacgtttctggcggaaagcgtaaccgaccaggccaaacagcggcaaagagatcagttcgataccgaggaacagagacgccagatggttggcattcgccagcaggatcccgcccagcgcggcaattaacaccaacaggtagaactcatccttgttgtcgttatagccttcaagccacgggtaggcgaaagtacaggtggcgaggctcgccaacaataccagcccggtgtaaagcatggcgaaaccatcaacgcgcatcagcggcgtaacgtccatagcgcccgcctggccaacaaaccagagcgaaaccagcgccgcgttaagcccaataaccgagagcgtagcgttgaggaaatgattgcgtcgccacgcaatggagagcatcacaaccaccaccgtcaagccgacgatcagcaacgtagcagtgcgatcagtttgtggacttttattctttgtttttttgttctgttttattttggtgttctgctgttttgtttgtgctgtctctttttctttgcttgtatttgtcttttgtctctgtttcttgggcgacggcgcgagggacgagagcgacgagagaggcagcaaagctctgggtctgatcccagcactcggaggttttcgtttgtcatatgctgtcccaaccccgtgccccgggtgccgggcgatatctgtacagcgcaaagccgcgaggcgctggaagtcgaggttgtgatacctggcaggcagatgcggtacgcgatacccgtaccctttcccggcggcgaaagtttcctcgttagtctggcgctggcgctggcgctttcggatctggtcagccataaaacacgtattgactcgctgttccttgatgaaggttttggcacgctggatagcgaaacgctggataccgcccttgatgcgctggatgccctgaacgccagtggcaaaaccatcggtgtgattagccacgtagaagcgatgaaagagcgtattccggtgcagatcaaagtgaaaaagatcaacggcctgggctacagcaaactggaaagtacgtttgcagtgaaataactgatgctcgccattggtcggctggtatccggctttccgcatggcacattttggggcaggaccaggcgctcgcaggggacgcctctctcggcacgaaggggtcctccgagaggtgtgttccaggactagcacgactgcctgggcgcggacccacttgaccctgggcgcccgggtcaggtggttgcgatccgggtcgttgctggcccggcactcgtaagtgcccgtgtcctcctccacgagcgtgtcgatggagatggtgctggccgcgtgctggtggtaggtggcgtggatgtggacgcggtccagccgggcgccgtcccagagctgggagcaggtgtcgttgggaccctgcccttcaaaccaccactggatctcgggcaccgggctgcccacggctcgcagtgcagctccacactgcccccaccactgaagccgctgtggggagagcacgcgtggggtcttgttagtgcctgggccgtgtttctctctttctctctgtgtgatcttgctgcttgttcgttcgtgttgtgtgttcttttttctttcttttgctgttgtgtctctgtttgttttttcgtctttcat

SEQ ID NO: 8811 - DNA, 887 bp, Homo sapiens
  SIMILAR (445)..(380): 811254mologous to Escherichia coli activase for anaerobic ribonucleoside triphosphate reductase,accession number Z46865,Smith -Waterman Score=92.
ggtgcgacccggagatcgcgaagactgtaaggacaccgtcgacgaccatttaaaaggggtcgaaaaagccgataacgcgggggaagtcaaagacgcgttaacgaagatgcgcgccgcagcgcgtggatgcgcaaaaagcaacgccgtctaatctcgaagataagtgaccggactgcccggaaatgaatgatttccgccacggtttcgacattctggtcggtcatattgacgacgcgctgaagctggcaaatgaaggtaaaggaaaataagcgcaggctgctgcatagcaactgaaaacgacccgcaattcatatcacaagaagtatcgttaattcctcatttccctgttgcctgcactcaggtaacagggaacttatcatcgcaaatgatgcaccacctgattgctgctgccgcgccagatcagggaaagggcctttaaattcttggccaaatttgccggcaaccaccacgttattcaaatcaacaacctgcatttgcgcagcgttgagttcggcgagtttatagcctgtccacacccagatgtctttacccggacactcggcgcggatgcgttgtaccagtttcagaatatccggcacgttttgcggatgcagcggatcgccgccggagagggaaataccctggcgtttgatacgagtgtcattcagatcgttaatgatctggtcttccattgctttggtaaatggctgaccggaatttacccgccatgtgcttttgttatagcaaccggggcattcatgaacacacccggagacaaacagggtgcaacgagtgccggggccgttgacgatgtcgacaggatagtactgatgataattcattatttcgcctggcttatcagtccgcgtgtaggctgcatccggtaa

SEQ ID NO: 8812 - DNA, 2673 bp, Homo sapiens
  SIMILAR (1749)..(868): 981254mologous to Escherichia coli periplasmic protein (AA 1- 306),accession number X04477,Smith-Waterman Score=1459.
ttacccctgctgctccagcgcatacttatacagcgcatttttcttcacgccgtgaatttctgcggccagcgccgccgcttttttcagcggcagttctgcctgtagcagcgccagcgtgcgcagggcatcggcgggtaagtcttcttcctgtgctttatgaccttcgacaatcagcaccatttcgcctttgcgacggttttcatcttcctttacccacgccagcagctcgccaacgggcgcgccgtgaatggtttcccaggttttggtcagctcacgcgccagaaccacgtagcgggattcgcctaataccgcaacgatatcttccaggctatctaacagacggtgggtagattcataaaaaatcagcgtgcgcggctccgcttcaatggcttttagcgcatcacgccggccttttgatttggcaggtaaaaagccttcgtaacagaaacggtcagagggtaaacccgctgcgcttaacgcagtgatagcagcacacggcccgggtagcggcaccacgcggatccccgcttcacggcaggtacgcaccagatggtagccaggatcgttaattagcggcgttccggcatcggaaaccagcgcaatgttttgcccctcttgcagcttcgccagcagcgtttcagctttttgttgttcgttatggtcgtgcagcgcaaacaaccgggcattaatcccaaaatgttgcagcaataaaccggtgtgacgagtatcctcggcggcaatcagatcaacggcctgtaatacctctaacgcacgctgggtgatatccgccagattgccgattggcgtcggtacaatgtaaagctggcccattgttgcaaaatcagcactgtggggcgtaattaccgccttgccttttacactgctgataaaggtggaacgggcagatgtcgatcccaggcgttcagcttcatcaagcagttttaacgccttatcaacatcacctttcgcgacagcgtttttgatcgcggtattaaaataactttccgtgtcgttgagcatcggctcgcttttcttcaccggtgccggagcgggtgcagccacagctggtgccgccgtgttacctaccgtaaccggagctggagcggaagaaccaaataaaggtcctaccaacacgctggagctggagttcgttttcactttcagtttcagtaagccatcggtggtatgacgagcaaccggatcggggatatccgggatcgagttaccgacgcccttggcataggctttagccgggtcgagcagttgggtcgtctgctggagatctttttccgtggtaaagaccagaacataaagtttttgctgccccaacgccggtgtcaggcgcataacgccttccagccgatctgcactcatcacgcctggttcctggtaggtgaaataactgctggggaagaaggctgatggggtcatgttctgatcaagaatcagcacgttcggcgcaaaaacgctggtttgtttgttcacttcgctggtcagcgtcagggtcagttcgccaatgtttgccgggacgctgtacgcagcaaccggaccactgatgccgggaacgttcagttgttggccgccggtcgccagttgggtggtctgggttttagattgatcgaccggtgtccaggtgagttgttgcagcgcagcagatggaatggctggcgcgtcgctggtgttttgcggtacgtagttaacatcggcaaggctaattccaggcgcgcttgccagtaaccctgatttgacagccgttgtaggcctgataagacgcgcaagcgtcgcatcaggcatcgtgcaccgattgccggatgcggcgtgaacgccttatccttcctacatcgtcactttatcgaagtaacctgtacccacttcctgctggtgagatacgaaggtatagccatctttcgcggcggcaaattccggctgctgcactttctcaacgtagtgcttcataccctcgccctgggcataggcgtttgccaggtcaaacatgttgaaccacatgctgtggatacctgccagggtgatgaactggaacttgtagcccatatccgacagctgctgctggaagctggcaataagccgttccttgcgtcgctaatggatgaacaaacactaacgcagctggaacagctcaagcagaatctgaaaaaccagcgccgtcaggcgcaaactctggtcactcagacagcagaaacgctggcacagcatcaacaacaccgacctgacgacgggttggctctcactgtgacggtggagcagattcagcaagagttagcgcaaactcaccaaaagttgcgtgaaaacaccacgagtcaaggcgagattcgccagcagctgaagcaggatgcagataaccgtcagcaacaacaaaccttaatgcagcaaattgctcaaatgacgcagcaggttgaggactggggatatctgaattcgctaataggttccaaagagggcgataaattccgcaagtttgcccgaggggtgacgctggataatttagtccatctcgctaatcagcaacttacccggctgcacgggcgctatctgttacagcgcaaagccagcgaggcgctggaagtcgaggttgttgatacctggcaggcagatgcggtacgcgtttcccgtaccctttccggcggcgaaagtttcctcgttagtctggcgtga

SEQ ID NO: 8813 - DNA, 3530 bp, Homo sapiens
  SIMILAR (811)..(1611): 971254mologous to Escherichia coli SbcC (AA 1-1048),accession number X15981,Smith-Waterman Score=1311.
atgggcttctgggtagagaatggcgaaattcagtatccggtgagcgaaatcaccatcgcagtctcctcgttggtattcagttcggcgtcatttgctgctgatctcgaagacaatatggaaaccctcaacgacaatttaaaagtggtcgaaaaagccgataacgcggcgcaagtcaaagacgcgttaacgaagatgcgcgccgcagcgctggatgcgcaaaaagcaacgccgccgaagctcgaagataaatcaccggacagcccggaaatgaaagatttccgccacggtttcgacattctggtcggtcagattgacgacgcgctgaagctggcaaatgaagatgtctttacccggacactcggcgcggatgcgttgtaccagtttcagaatatccggcacgttttgcggatgcagcggatcgccgccggagagggaaataccctggcgtttgatacgagtgtcattcagatcgttaatgatctggtcttccattgctttggtaaatggctgaccggaatttacccgccatgtgcttttgttatagcaaccggggcattcatgaacacacccggagacaaacagggtgcaacgagtgccggggccgttgacgatgtcgacaggatatccaatgagataactattggcattccaatgttaacgggctacattctgctacacgtaaaaggggtccgggccaaatccagcgcggatcaccggaggcgtccactggcgagcttggccacgccaccacacaagagttggacgtgcactcttctgtttttccgtcttcccaacgttgtgtgttacgcaaaccgtattcagcagctgacgccgattctggaaacgttgccgcaaagtgatgaactcccgcactgcgaagaaactgtggtattggaaaactggcggcaggtacatgaacaatgtctcgcattacacagccagcagcagacgttacagcaacaggatgttctggcggcgcaaagtctgcaaaaagcccaggcgcagtttgacaccgcgctacaggccagcgtctttgacgatcagcaggcgttccttgcggcgctaatggatgaacaaacactaacgcagctggaacagctcaagcagaatctggaaaaccagcgccgtcaggcgcaaactctggtcactcagacagcagaaacgctggcacagcatcaacaacaccgacctgacgacgggttggctctcactgtgacggtggagcagattcagcaagagttagcgcaaactcaccaaaagttgcgtgaaaacaccacgagtcaaggcgagattcgccagcagctgaagcaggatgcagataaccgtcagcaacaacaaaccttaatgcagcaaattgctcaaatgacgcagcaggttgaggactggggatatctgaattcgctaataggttccaaagagggcgataaattccgcaagtttgcccaggggctgacgctggataatttagtccatctcgctaatcagcaacttacccggctgcacgggcgctatctgttacagcgcaaagccagcgaggcgctggaagtcgacgttgttgatacctggcaggcagatgcggtacgcgataccgtaccctttccggcggggaaagttcctcctccggttacggtaggtaacacggcggcaccagctgtggctgcacccgctccggcaccggtgaagaaaagcgagccgatgctcaacgacacggaaagttattttaataccgcgatcaaaaacgctgtacgcgaaaggtgatgttcgataagcgttaaaactgcttgatgaagctgaacgcctgggatcgacatctgcccgttccaccatttatcagcagtgtaaaaggcaaggggtaattacgccccacatgctgattttgcaacaactgtgcgtctcctagcgcacctatgtacgctgatgtttgttgtggtgcgccgtcgcggctcccactttcgtgtgcctcgtgcccgtgtggttgagtccgtgttggtttgtgtaccgtgtagggtctcatccagtgtcccttgacgtggctgcatccaggcccccactgcatcctagagtcatgtggggatgggcttccaggctttgcataatccttctggataactgggaatttctctgtcctgcagggagtggcattttgatctatttcctcctctggcagcctcatgagtgaggagtgtgcctcatgactttcaggcactaaaatgagaagggcaagggtagcagtagcctcatatcctccaaggacttttaactcacgggcaacataccgtgggcttggagatggctcagggatgtcttcaaaggggtgaaatagcttgagaaggtccttattcatgtgttcgtcaagaatggattgagcactgagcacatttcgagtgctgagggtcaagttatgtggccttcgccctggtggagattctggctgagcaatgtgctcctcacttggggaccagggaggccctcgtcgctgtatgcagccattgatctcggttcgaatagttttcatatgctggttgtgcgcgaggtggctggaagcatccagacgctgacgcgaataaaacgcaaagtgcgtctggctgctggcctgaatagcgaaaatgccctctccaatgaagcaatggagcgcggttggcaatgtttgcgcctgtttgctgaacgtctgcaagatattcctccctcgcaaattcgcgttgtcgctacggcgacgttacgccttgccgtcaatgcgggtgattttattgccaaagcgcaggaaattctcggttgtccggtacaggtgatcagcggtgaagaggaagcacgtctgatttatcagggcgttgctcacaccagtgaagttgccctgtggtgtctagttcgtagcatataggggctttgactgcccaagcagttaccatgggggccgatagccgtggttcaaacctaaggtctacactatttagagtagtatatggtgaatgatgtcgcgatgatgataacccgtccatggcaacgttggggcccagccagagcattgagatgcccgatgcctgatgtatgtgaatgccaggactaatatgatgccgttgaatgcacgtgctaatgttgtggaatgcaaaccgttttggtgcttgactgaccccctggaactggccgtgggatgtaagatggtaacacaatgcacatgatgagcacgtgcctgtttgcagcttgctactaatgctggacaagtgctggatgggcaggtcttgttccaggtacagcagaagagttatagaactgttcagcacagccccctgtgtttccgtgctgaacgtaaacggaccataaacgttgggtgaatcgtcgcaacatttgccttctggatgccactgttctgcagctgcctggtgatagaaccgggtggcgatttgagaagagacatgcaattggtcacgtatggatacgttacgccatgccagctggcggggatcctctgagagtcgacataacatgccaggctgtcttgccttgggccgtttgcgtttcgtggctccaggcat

SEQ ID NO: 8814 - DNA, 824 bp, Homo sapiens
  SIMILAR (3)..(821): 991254mologous to Escherichia coli K12 catalase; hydroperoxidase HPI(I),accession number AE000468,Smith-Waterman Score=1358.
tgaaattcgcgattgcggattctggtctgtctgttagtgagctggtatcggtggcctgggcatctgcttctaccttccgtggtggcgacaaacgcggtggtgccaacggtgcgcgtctggcattaatgccgcagcgcgactgggatgtgaacgccgcagccgttcgtgctctgcctgttctggagaaaatccagaaagagtctggtaaagcctcgctggcggatatcatagtgctggctggtgtggttggtgttgagaaagccgcaagcgccgcaggtttgagcattcatgtaccgtttgcgccgggtcgcgttgatgcgcgtcaggatcagactgacattgagatgtttgagctgctggagccaattgctgacggtttccgtaactatcgcgctcgtctggacgtttccaccaccgagtcactgctgatcgacaaagcacagcaactgacgctgaccgcgccggaaatgactgcgctggtgggcggcatgcgtgtactgggtgccaacttcgatggcagcaaaaacggcgtcttcactgaccgcgttggcgtattgagcaatgacttcttcgtgaacttgctggatatgcgttacgagtggaaagcgaccgacgaatcgaaagagctgttcgaaggccgtgaccgtgaaaccggcgaaatgaaatttacggccagccgtgcggatctggtgtttggttctaactccgtcctgcgtgcggtggcggaagtttacgccagtagcgatgcccacgagaagtttgttaaagacttcgtggcggcatgggtgaaagtgatgaacctcgaccgtttcgacctgctgtaa

SEQ ID NO: 8815 - DNA, 960 bp, Homo sapiens
  SIMILAR (513)..(55): 981254mologous to Escherichia coli similar to,accession number D90889,Smith-Waterman Score=804.
tcagaacgaccagttcacaccagctaccggttccacgggattccacaccggcactatggctgcctggtatattccacgtctgcccgacaaataattgacgaaattaccgtcactattcactttcacccggttatcatcgacaaattctttgcgcacagccgccttcagccacggctcaacttccataccgttccccagacgcatgttgtaactcagcgttgcgcccagttcacgatatatactgcgggtatcgactgatttcgatttcatgccattggataaatgatattcggggttatcagcggtgaaccccgttaacgatgcatacggcgtcaggttccagttaccatcggtaaatcgcatcccggtttcaatgtgaccgcccagcccgttgctgtggtaactgccattggcggctccaccgctgctcattttacctgctacgttacttttaaaacggttcagcttcacgacaccgtccagatagaaaccactttcatgttcccaaccggcggcggttttggtctttcttaccattttgccaatggtggtaaccccacgcggcgttctgcggtgctctcttccatgcagggcagcttgccgggtggctgcgatgcggtggataaaatccctgttgcccgcattgttgaagcactggaaaaccctggtggcgcatatcaacacaacggtatgaaccgacatttcccggatattcgttttatctggtgggcgggcggtgccaactttactcatcatcaggataccaatcgcctgatccgtgcctggcaaaaaccggagctggtggtgatctctgaatgcttctggacggcggcggcaatacatgcggatatcgttctgcctgcgactacttcttttgagcgtaatgatctcaccatgaccggtgattacagtaatcagtatctgtgccgatgagggatcttctagagtgacctcatgcat

SEQ ID NO: 8816 - DNA, 2058 bp, Homo sapiens
  SIMILAR (37)..(1026): 981254mologous to Escherichia coli similar to,accession number D90889,Smith-Waterman Score=1755.
atgcttcgtttacgttgggcaataccggcggtttccgttgatcttgggacctatgagtatgtcctgaaaagtgacggcaccagcaactggaccctgaccaatgatgtcaaacccaacccggaccccatcccaaatccaaagccagacccaaaacccgatccaaagccagacccaaatccaaaaccagaccctactcccgatccaacgccgacacccgttccggagaaacgcattacgccttctacggcagccgtactcaatatggcagcaacattaccgttggtatttgatgctgagctaaacagtattcgcgagcggttgaacataatgaaagcgagtccaaacaacaataatgtctggggggcgacgtataacacccgtaataatgtcaccaccgatgcgggtgccgggtatgagcagacgctgaccggaatgacagtggggatcgacagccgtaatgatattccagaaggaattaccacgctaggcgcttttatgggctattcccattcacatatcagttttgatcgcggaggacatggcagtgtgggcagttattctctgggcggctatgccagttgggaacatgaaagtggtttctatctggacggtgtcgtgaagctgaaccgttttaaaagtaacgtagcaggtaaaatgagcagcggtggagccgccaatggcagttaccacagcaacgggctgggcggtcacattgaaaccgggatgcgatttaccgatggtaactggaacctgacgccgtatgcatcgttaacggggttcaccgctgataaccccgaatatcatttatccaatggcatgaaatcgaaatcagtcgatacccgcagtatatatcgtgaactgggcgcaacgctgagttacaacatgcgtctggggaacggtatggaagttgagccgtggctgaaggcggctgtgcgcaaagaatttgtcgatgataaccgggtgaaagtgaatagtgacggtaatttcgtcaattatttgtcgggcagacgtggaatataccaggcagcaggttaccccattcatcgtattctgcgtaccattctgtgtcccttccgtgctgacaagcgccagcggcagcccgcgatggtcgcagtggtacaggtgaatttttcgcgccggcgtgtataccgggtccatctggctttgcatctgcgccaccgtcaggccgcacgatgccagccagcggcggctttcctcactcacccggtcagccaggatttcactttccagccggtcgagcatctgcaccagcaccggcgggaacaccacactgccaccgtcttcgccaccggactgctgaagggtatccgccaggctgcggcgctgcgttttcgccagctcaccggtggcggtttcaaccctgatgagtggcgtgaagctccccggctgataaatcgtctggatgcgggttctgtcgataagtatcgtggtcaggcggtcgccgtcccagccgtaccagaacgccacacgggcagtctgaatgatgaatggatgatggcgggagatctgattgtcgccagtcccggtgttgcactggcgcatccatccttaagcgctgacgctgatgccggaatcgaaatcgttggcgatatcgagctgttctgtcgcgaagcacaagcaccgattgtggcgattaccggttctaacggcaaaagcacggtcaccacgctagtgggtgaaatggcgaaagcggcgggggttaacgttggtgtgggtggcaatattggcctgcctgcgttgatgctactggatgatgagtgtgaactgtacgtgctggaactgtcgagcttccagctggaaaccacctccagcttacaggcggtagcagcgaccattctgaacgtgactgaagatcatatggatcgctatccgattggtttacaacagtatcgtgcagcaaaactgcgcatttacgaaaacgcgaaagttagcgtggttaatgctgatgatgccttaacaatgccgattcgcgttgaatgggttttgcggtttaccgagttcatggcaaaacccgatggctattgtttgaagacctga

SEQ ID NO: 8817 - DNA, 1992 bp, Homo sapiens
  SIMILAR (895)..(1584): 991254mologous to Escherichia coli GALACTOSIDE TRANSPORT ATP- BINDING PROTEIN MGLA,accession number D90884,Smith-Waterman Score= 1137.
atgaaaattgaactgaagattacaatcaatttaacaacaagttacacaaccaattcagactccgccagcccaccaatcatgattggacggtgtaaggacaacaccaacaaaaacaggaagttagaagtctcagcaaaacaccgaccagacggctttaatacctgcctggtatattccacgtctgcccgacaaataattgacgaaattaccgtcactattcactttcacccggttatcatcgacaaattctttgcgcacagccgccttcagccacggctcaacttccataccggtccccagacgcatgttgtaactcaggcgtgcggccagttcaccctgcgcccgaataacagattgtcagatatgcaggcaacaatggaacaaacccaggcctttgaaaaccgtgtgcttgagcgtctgaatgctggcaaaaccgtgcgaagctttctgatcaccgccgtcgagctcctgaccgaggcggtaaatcttctggtgcttcaggtattccgcaaagacgattacgcggtgaagtatgctgtagaaccgttactcgacggcgatggtccgctgggcgatctttctgtgcgtttaaaactcatttacgggttgggcgtcattaaccgccaggaatacgaagatgcggaactgctgatggcattgcgtgaagagctaaatcacgacggcaacgagtacgcctttaccgacgacgaaatccttggaccctttggtgaactgcactgcgtggcggcgttaccaccgccgccacagtttgaaccagcagactccagtttgtatgcaatgcaaattcagcgctatcaacaggctgtgcgatcaacaatggtcctttcactgactgagctgatttccaaaatcagcttaaaaaaagcctttcaaaactttgtgtcgctgatgctcgggcgcgatcacgttgatattgcgccggtagcccctcaggaaattgtggatcaggccgtgctggaagtccgtgcgttacgccataagcccaagctggaggatatcagttttacgctacgtcgtggcgaagtgctcggcattgctggtctgctgggggcagggcgcagtgaattgctgaaggcgattgttgggctggaggagtatgaacagggcgaaattgttatcaacggcgagaaaatcacgcgccccgattacggcgacatgctgaaacgcggcattggctatacgccagaaaaccgcaaagaagcggggatcattccctggttgggcgttgacgaaaatacagtgctgaccaatcggcaaaaaatcagcgccaacggtgtgctgcaatggtccaccatccgccgcctgaccgaagaggtgatgcagcggatgacggtcaaggccgccagtagcgaaacacccatcggcacgctttctggtggcaatcagcaaaaagtggtgatcggtcgttgggtctatgctgccagccagattttgttgctcgacgagccaacgcgcggcgtcgatatcgaagccaaacagcagatttaccgtattgtccgtgagctggctgccgaaggaaaaagcgtggtgtttatctccagtgaagtggaggagttgccgctggaacgttatcgcatggaacagataacaaaaccgcattgtggtgcacggctggatcgcttaccggattgccgctggcattcatcaatgtttgccatcgtcgcgtttggcttgcttgtctgctggagtaatgccgttggtggcttgatcctcgcgcagctgaaagcgttgggctggacagataattccaccacagccacattctcagcaatcacgaccgccggaatgtttctcggtgcgctggtgggcggcatcattggcgacaaaaccggtcgcagaaatgcgttcatcctctatgaggccattcatattgcctcgatggttgtcggtgctttctcaccgaatatggggacctatgccatatctgttatcttgtatttgataatagactttctaactagggagagatga

SEQ ID NO: 8818 - DNA, 3132 bp, Homo sapiens
  SIMILAR (2303)..(2458): 941254mologous to Escherichia coli VisC,accession number D90281,Smith-Waterman Score=229.
atgagcgaggcggactttgcggaagtgctcaaggcccttggccaacgttcatatgccaccgagctggcgcgctgggtccacggcaagggcgagcttccgctggaaagcctgctgcagcaacacggcgtggcggtactggaagaaccggcccagctggcacaaaggctggggctgcgggtcagcgaaaacaacggcatacaggtcaagaccgtgctgcgcggcggcatcgccgaaaaagccggttttgcggcgggtgatgaatggctggggctggagcccgccaccagggccaaaacacccgcaagcagcggctggcgcatgagccggctggacgaaagcccgagtgaacaattccccaaccgtcaacacacaattcacccccaggatcccaaccacaaaatcagggtgaaaaacctgattcacctcacatttcatcgcaatttcttcatcgccgtcataagcgaatctgattgtgctaccatcgaaaatctacgcagttgcccaaaatttgggcgcaatcggacatcaacccatctgctgaaaacgctggtgggcgatctgcaaccggacagcggcaccgtaaaatggtctgagaacgcgcgcattggttactatgctcaggaccacgaatatgagtttgaaaatgatctgaccgtgttcgaatggatgagccagtggaagcaggaaggcgatgacgagcaggcggtacgcagtattctcggtcgtttgctgttcagccaggacgacatcaaaaagccagctaaagtgctttccggtggccgttgtgaacttctccccgttcgtgggcctcttcatgtccgcatcgtggatattaatcgtccaagcatactagtcactcgcactgatgtgaatgctaaagcacgcaaaattaaccgattgacacgtaggcggcattccctctactgcgttgaaaggcgcgggtctgttaccgcacatccgcgcgaccgtaaagttgccgatgattgttatgaagcgcacgctacagcagctcctgggtggcgcaccgtttatatcagcggttataagactggacgaaaggacatcatgaatatctactacggaaatatatggagactgttgttgccacgaaaatcctctgtgatcgatacgtaccagttcgtacttttccaccagaaaattgactgcatcggccagagtgataccagcatcgatatgttccttaataacagtttcatcactgaacggcgtgtcgttcagttgggtgtacccgccgccgttggggaacgcggttgtcctgttggttttgggcgaactgacgaccccggcgggttaagcttgtgtagccctcggttcctccttggttttcggaactgtctttgtaacgggccttggaatttaggtcgcccgggacgtgtcgggccttcgaccaaaggaccccctggaagaggccggaggccccggattgttcggcccaatgggacgaatggctccaatggttgtaatggcctgaacgggaaatgccctgggaataaggatggcgggcgccctaaattaacctcgctaaatacccctggcccctgtctgccgcgcccaggccggacggttgttggtgctctggatgtgcaatgtgtaatgggccaggcccttgtgctcacccgtaccagggtgttcgttgtggagatgtgtgacgcaggatcaacaaattgtcacaacatggataacatgcatatgacacatgatgtacgaacttgcgagctcagaggtggaatacaagacatcgaaatacaaatcaccgtggtagcaaatgcgggcacttttagtatgacgaatgtaacaaagctggccagcgagccgtcaggccaggaatttctggtatttacccttggtgatgaagagtacggtattgatatcctgaaagtgcaggagatccgtggctacgatcaggtaacacggattgcgaacacgccagcgtttatcaaaggcgtcacgaatctgcgcggcgttattgtgccgattgttgacttacgaattaagttcagccaggtggatgtggactataacgacagcggtctgcgtatcgagctgccgcaggtggaagaaaccggctgctttggtgcggcccttgccgcccgcgtcggcaccggggtttatcacaacttcagcgaagccctgctgcgcaagccggaatggatgaaaatcaagcttccagcggactctacacgtatccaggcatcaaagccgcacttcatgatcaccacaagtcgataccagcgacaacagcagcgagatagtaaacaaccaggcaccgaccgccagaacggggagcggcttacgcgttgccgtactggagcagcgcgtacaggaacctctggcggcgaatgcaccaccacaactgcgcgtttcggctatcaatgccgccagctaaaaattactcacccgtcttggcgtctggcaggacattctctctcggccagctgttatcacggtatggaagtgtgggacaaagacagctttggtcacatttcgtttgacgatcaaagcatgggctatagccatcttgggcatatcgttgaaaattcagtgattcactacgcgctgtggaacaaagcgcatcagtcgtcagatatcactctgttagcccccgcagaattacagcaggtcgcctggggagaaaatgaaaccttcctgacgctgaaagatggcagcatgttaacggcgcgtctggtgattggcgcggacggcgctaattcctggttgcgcaacaaagccgatattccgctgactttctgggattatcagcatcacgcgctggtagcgaccattcgcacggaagaaccgcatgatgcggtggcgcggcaggttttccatggcgaaggcattctggcctttttaccgcttagcgatccgcatctttgctcgattgtctggtcactgtcgccagaggaagcgcagcggatgcagcaggcaagtgaagacgaatttaatcgcgcgttaaatatcgcttttgataatcgcctgggcttatgcaaggttgagagcgcgcgtcaggtgttcccactgacggggcgttatgcgcgccagtttgcctcgcaccgtctggcgctggtgggcgacgccgcacataccattcacccgctgcggggcgagtaa

SEQ ID NO: 8819 - DNA, 1215 bp, Homo sapiens
  SIMILAR (236)..(376): 531254mologous to Escherichia coli catalase hydroperoxidase I,accession number U00006,Smith-Waterman Score=102.
ttaggaacatatcgatgctgtatcactctggccgatgcagtcattttctggtggaaaagtacgaactggtacgtatcgatcacagaggatttcgtggcaacaacagtctccatatatttccgtagtagatattctgcgagaaggcgctctaccggcttgctgcctggtatattccacgtctgcccgacaataattgacgaaattaccgtcactattcactttcacccggttatcatcgagtgacaatgacctccgtggtggcgacaaacgcggtggtgccaacggtgcgcgtctggcattatagccgcagacgcgaactggcgatgtgacacgccgacagccgattcgtgtctgcactgttattgagatgtttgagctgctggagccattgctgacggtttccgtaactatcgcgctcgtctggacgtttccaccacgagtcactgctgatcgacaaagcacagcaactgacgctgaccgcgccggaatgactgcgctggtgggcggcatgcgtgtactgggtgccaacttcgatgcagcaaaaacggcgtcttcactgaccgcgttggcgtattgagcaatgattcttcgtgaacttgctggatatgcgttacgagtggaaagcgaccgacgatcgaaagagctgttcgaaggccgtgaccgtgaaaccggcgaagtgaaattacggccagccgtgcggatctggtgtttggttctaactccgtcctctttgttcgcatattgggaggttttttctgtgagtattcgttgacaattagaattctgcattagcctgttcgccaatccagccacagggcttttggatctacccgtcaggatcagggttcttagcgccagaaccagtcctggatcggcgcttacattaggtatgagccacagttcatcggtgctctccggtgtccgtggccctatttgcgttggccgttgttcgtcatcagtggttcgttgtccctgccggttagtccccgtggagttcgtgtggattaatcccgtttttcgtttgcgtcgcagccgcatttcttcgctgcattcttccgcagcgtttagcatctgcttggccattgtcacaagataaaacgcactggccagtaccgcaagtccagaagttggggtttgcttcttggttttgtgcgtgtttccgtctggtcttgtttctattgggtcatttgttgtctccctgtcctttcgtgtcat

SEQ ID NO: 8820 - DNA, 1437 bp, Homo sapiens
  SIMILAR (570)..(4): 941254mologous to Escherichia coli K12 putative 2-component sensor protein,accession number AE000342,Smith-Waterman Score=906.
ttatttcgtgtttttcgacgacggtaattcaatgcggaaacaaacgtcttgcccgctctcgtcgaccagatacagttccccttgcatacggcgaatacaatccctggcaatgcttaatcccagaccgctgcccttcaccgccccttttcgctggtggcttccctgaaaaaagggttcgaagatcatggcgcgttcctcttgcggaatgggcgtgcctgtattgatgacatcaatataaacccgcgcaccatgtaaactgctgcgaaggcaaatgttaccggattcagccccgtagtgcaccgcattggagtaaagattatccagtacgctcatcagcagcattggctccgccaggcaagctgttgctttgagatcgacgtcggtatgcatcattttagcccgtgcgggcaggctatgagcagaaaccactgtctccaccagcggtgctaactcaacattctccagttccaccgcactgtccgcctgtttacggtggtaatccagcagttgttcgatcaggttttgccaattggggttggtggtattcaaaatggtccccacctctttttggccttctcgttcacgccatgccttcagttcggcaagtttatccagcatttcaggaatgaacggttgtccggcaaagccgggatcgacagtcatgaccgtaattttatcggccttatggatatagtatttcatggcctcaactggcgtctccgggttaaggatcagccccactttcatgtcatgacggcggatttcatcaatcaggcggaacgcctggccgttgatggtttccggatgcagagtgatgaaatctgctcccgcacgcgccagttgagcaatgtaatcctgcggccgcgtcaccatcagatgacagtcgagcggtttagttgccagttttttaacctgacttacgaagaacggtgagagtgtcagattggggacaaagtgaccgtccatgatatcgatgtggaagtaatcggcatggctgtcgataaattcgatctgttctttaaatttcagcagatccatacacattaacgagggggagattttcatgttcaattccttacttatgataagacggtcaagggcgacagccgcgataattaatccgcccatcaccaccagttggtaataggtttgtacctgcaaaatattcagaccgttgttgatggtgccgatgatcaaccagagcagagcattgttggcctgagcgcgacctgggatgtgacgaagaatgtcagtctgaccggcggcgtggacaatctgttcgacaaacgtttgtggcgtgcgggtaatgcccagaccacgggcgatttggcaggggccaactatatcgccggtgccggggcgtatacgtggtatatgagcgtaaacacccacttctgatgctaacgtcagattgttgacaaagtgcgcgtcgttcat

SEQ ID NO: 8821 - DNA, 902 bp, Homo sapiens
  SIMILAR (338)..(436): 931254mologous to Escherichia coli K12 putative alpha helix protein,accession number AE000341,Smith-Waterman Score=160.
acacatagacccccgaaaagtgggccaccatgcgcaaagatcacacggacaacccatgtcaccgccaagccccttttcccccaaacgaacccaaaacagacagttcgccgtatgcaaggggaactgtatctggtcgacgagagcgggcaagagtttgtttccgcattgaattaccgtcgtcgaaaaacacgaaataatgctacagcctatcctatcaggctattttatttgtcagttcggccccgggcaggctcgaaatcttcacgtacgatatggattttgctcgccgacgcaaaattacgccgtatgagcgccgccagctggtcgcgcgtattgaagcgtaagtaccgagatcccggcacaggttcgcccactgtatcaactctggcgcgatggtcaggcgctgcaactgcaactggcggaagagcgccaacgttaacgggtggcgccgataccaaacaagacggggccactacgacaaaagacaaacaacaaagatagacaaagggcacaaggagccaaccaagcacgagagaagtacagcaacagagtacacagaagcacagcacgagccgaccgccaaaccacagcgcccagccatcaaacagtgccttggtcaccaggcagtagtggcgcacgcctttaaacctagcactgggaggcgaggcaggcagatttctgagttcgaggccagcctggtctacagaggttgcactaccccgtgtaccacgaggataaaagcccagaggccaaagacggacaaacacgaaacacacagaaaaacccgtgggtgcacagcatgcaccacgtcctacaaccaggccaatggcacgctggtggttgaaaacgcaggcagaaacaagccatttgtagtaacaacgtttttttctaaatacaactag

SEQ ID NO: 8822 - DNA, 386 bp, Homo sapiens
  SIMILAR (174)..(70): 251254mologous to Homo sapiens p126,accession number U15131,Smith-Waterman Score=38.
cagagcctccactacagacaggagatgcctctgcgcacactgacacacaccgagtgtcacagcaattccactggtgggagacagacaccccggagcatttcaacaatcgcttttctctgttgaagttttcttctgccccattcactgtctcctctgaccacacaatttggttttgcctctttctacatgtcaaaggctttcttgtgtctggtggtcttcgactatttatttctgagcatgaggcactgataaaagatgtggaaccccccgagtgcgtgtgtgtgagagtgagagtgtctgcgacataaagaggtttgcctgtgggaccggggataaccagggaagcgcgggggtgacatactggggaactctagaatcacgcatat

SEQ ID NO: 8823 - DNA, 348 bp, Homo sapiens
  SIMILAR (119)..(81): 611254mologous to Hepatitis C virus polyprotein,accession number AF211059,Smith-Waterman Score=37.
  misc_feature (1)...(348): n = a,t,c or g
ggcctccctgggtaatccccggtcccccaggcaaacctccttatgnnnnnnnnnnnnnnnnnnnnnnnnnnnnnnnnnnnnggggttccacatcctttctcagtgcctcatgctgagaaataaatagtcgaagaccaccagacacaaggaagccttcgacatggagaaagaggcaaaaccaaattgtgtggtcagaggagacagtgaatggggcagaagaaaacttcaacagagaaaagcgattgttgaaatgctccggggtgtctgtctcccaccagtggaattgctgtgccactcggtgtgtgtcagtgtgtgcagaggcatctcctgtctctagtggagactctg

SEQ ID NO: 8824 - DNA, 393 bp, Homo sapiens
  SIMILAR (303)..(359): 361254mologous to Conus pulicarius conotoxin PuIA precursor,accession number AF132129,Smith-Waterman Score=60.
  misc_feature (1)...(393): n = a,t,c or g
aaaaatcctgcgtgattcaagagttcctcagtaatgagacccacgcgcctccctgggtatccccgggtcccacaggcaaacctccttatgnnnnnnnnnnnnnnnnnnnnnnnnnnnnnnnnnnnnggggttccacatcctttctcagtgcctcatgctgagaaataaatagtcgaagaccgccagacacaaggaagccttcgacatggagaaagaggcaaaaccaaattgtgtggtcagaggagacagtgaatggggcagaagaaaacttcaacagagaaaagcgattgttgaaatgctccggggtgtctgtctcccaccagtggcattgctgtgacactcggtgtgtgtcagtgtgtgcagaggcatctcctgtctctagtggagactctg

SEQ ID NO: 8825 - DNA, 669 bp, Homo sapiens
  SIMILAR (275)..(388): 361254mologous to Ricinus communis sugar carrier protein,accession number L08193,Smith-Waterman Score=62.
  misc_feature (1)...(669): n = a,t,c or g
nnnnnnnnnnnnnnnnnnnnnnnnnnnnnnnnnnnnnccccagcccaccaggcttcacttatgttccggctgtatgtggtggaatgtagcgatacaattcncacagaaacactatgccatnnnnnnnnnnnnnnnnnnnnnnnnnnnnnagagtctccctaaagacaagagatgcctctgccacacttgcacacccacagagtgtcacacaaattccactggtgggagacagacaccccggagcatttcaacaatcgcttttctctgttgaagttttcttgtgccccattcactgtctcctctgaccacacaatttggttttgcctctttctccatgtcgaaggcttccttgtgtctggtggtcttcgactatttatttctcagcatgaggcactgagaaaggatgtggaaccccnnnnnnnnnnnnnnnnnnnnnnnnnnnnnnnnnnnncataaggaggtttgcctgtgggaccggggataaccagggaggcgcgtgggtctcatactgaggaactcttgaatcacgcagatttttctcatgggtgtgtttccctgaaagtaatccccccgtccttggcgcgcgaggcgtaaggatcgtacattgtgtgccatggggagcggagcgcaagtttcctcaagagtcagctatcacccatctacgtgtgc

SEQ ID NO: 8826 - DNA, 624 bp, Homo sapiens
  SIMILAR (312)..(31): 341254mologous to Gallus gallus type II collagen,accession number M74435,Smith-Waterman Score=113.
ttttggcctgggaccttccttaagaggctccccctggccgggaaccgggtggcccctaggctcttttggccccgggcttgtcccaaccttcgctggtgcagggcatcccctgggctgggcaagtttttccaaatccgcccttttccggccctggcaattgccacctgtcctaggtttcgggggtccggtgttggattcattcttcggctttccccccggttttccccggttttttccttccagtcgcattctttgataggccgccagcccgactctacagaatgcacacctggagccatatggaatctcaggaacctgcaaggcttccctcccactacgcggactaagggcaaggctctcagaaacgtgagttcctgcagcagcgggtgggccggcttgttgttcatctctccccagtttgttctgtggtctgcagagattgagggaagcctgaatcatataactcttggtttccgtctttcccacgggaccacatcagcagatggcatgacattttaagaaatatttcaaatatttcaaaagttttatataaaaatatttattctcttcagatttctaggatgtatgtgctgcaagtagaaaggccagtggttgattagaatg

SEQ ID NO: 8827 - DNA, 4353 bp, Homo sapiens
  SIMILAR (1)..(2964): 991254mologous to Homo sapiens unknown,accession number AF009205,Smith-Waterman Score=5054.
gcgaaggacggcaccaaggacgggctggagaggaccagggcagccgtgaagaggggccgctccttcatcaggaccaagtctctcatcgcacaggatcacagatcttctcttgaggaagaacagaatttsttcattgatgttgactgcaagcacccggaagccatcttgaccccgatgcccgagggtttatctcagcagcaggttgtaagaagatatatactgggttcagttgtcgacagtgaaaagaactacgtagatgctcttaagaggattttggagcaatatgagaagccgctgtctgagatggagccaaaggttctgagtgagaggaagctgaagacggtgttctaccgagtcaaagagatcctgcagtgccactcgctatttcagatcgcgctggccagccgcgtttccgagtgggactccgtggaaatgataggcgatgtcttcgtggcttcgttttctaagtccatggtgctggatgcatacagtgaatatgtgaacaatttcagcacagccgtggcagtcctcaagaaaacatgtgccacaaagcccgcttttcttgaatttttaaagcaggaacaggaggccagccccgatcgaaccacgctctacagcctgatgatgaagcccrtccagaggttcccacagttcatcctcctgctccaggacatgctgaagaacacctccaaaggccaccccgacaggctgcctcttcagatggccctgacagagctcgaaacactagcagagaagttaaatgaaagaaagagagatgctgatcaacgctgtgaagtgaarcaaatagccaaagccataaacgaaagatacctgaacaagcttctcagcagtggaagccgatacctcattcgatcagatgatatgatagaaacagtttacaacgacagaggagagattgttaaaaccaaagaacgccgagtcttcatgttaaatgatgtgttaatgtgtgccaccgtcagctcacgcccctctcatgacagccgtgtgatgagcagccagaggtacttgctgaagtggagcgttccactgggacatgtggacgccatcgagtayggcagcagcgcaggcacgggcgagcacagcaggcaccttgccgttcacccgccggagagcctggccgtggttgctaacgcgaaaccaaacaaagtttacatggggccaggacaactgtatcaagatttacaaaacttgttgcatgacttaaatgtaattggccaaatcactcagctgataggaaaccttaaaggaaactatcagaacttaaaccagtcagtagcccatgactggacatcaggtttacaaaggcttattttgaagaaagaagatgaaatcagagctgcggactgctgcagaattcagttacagcttcccgggaagcaggacaaatctgggcgaccgacgttctttacagctgtgttcaawacgttcacccctgccatcaaggagtcctgggtcaacagcttacagatggccaagctcgccctagaagaggagaaccacatgggctggttctgtgtggaagacgatgggaatcacattaaaaaggagaagcatcctctcctcgtcggacacatgccygtgatggtggccaagcagcaggagttcaagatcggaagttgcacccatcaaatgggtcagattgccatcgtctcgtttcaaaattccactcccaaagtcattgagtgcttcaacgtggaatctcgcatcctgtgcatgctgtacgttcccgtcgaggagaagcgcagagagcctggggcacccccggaccccgagaccccggccgtgagagcttctgatgtccccacgatctgtgtagggacggaggagggaagcatttccatttataaaagcagtcaaggctccaagaaagtgagacttcagcactttttcactcctgagaagtcctcagtcatgagcctggcttgcacgtctcagagcctgtacgctggcctggtcaacggggcagtcgccacctacgccagagccccagatggatcctgggattcagagcctcaaaaagtgatcaagttaggcgtcctaccagttagaagtctactcatgatggaagacacgttgtgggcggcttccggaggtcaagtcttcatcatcagtgtggagactcatgctgtagagggtcagctggaggcccaccaggaggaaggcatggtgatctcccacatggccgtgtccggcgtcgggatctggattgccttcacctcagggtccacgctccgcctttttcacacggaaactctcaagcacctgcaggacatcaacatcgccacccctgttcacaacatgctgccagggcaccagcggctgtcggtgacgagcctgctcgtctgccacggattgctgatggtcggcaccagcctgggagtcctcgtggccctgccggtcccacgtctgcaagggattcccaaagtgaccggaagaggcatggtctcctaccatgcacacaacagtcctgtcaaattcatcgtcctggccacggctctgcacgagaaagacaaggacaaatccagggacagcctggctcctggccccgagcctcaggacgaagaccagaaggacgcacttccgagtggaggagctggttcatctctgagccagggtgaccctgacgcagccatctggttgggagattcactgggatcgatgactcagaaaagcgacctgtcctcctcatctgggtccctgagcttgtctcacggctccagctctctagagcacagatcagaggacagcaccatctatgatctcctgaaggatcctgtctcgctgagaagcaaagcacgccgggccaagaaagccaaggccagctcggcgctggtggtctgtggagggcagggccaccgccgggtgcacaggaaggcccggcagccccaccaggaagagctggcgccgaccgtcatggtctggcagatccctctgctgaatatataagcaggacggccgccttctgctgtcagaatttgcaatcaagggtgacttctcagctaatcctacagcctgagtggttaagctgtgtctacactggttgggaataaattaaaaacagtatttgggggagaaacgtgcaatagcgtaatggtggtgtccctgccaattccttccttctcttctgtacagcagaagtaattacaagcacttctcacgaaggcagaagactgatgcaattttcgagtaattgagtgcagttctgggaaaataccacattctttttgactgctgtagtccatatatgaatactaaatgttaaacttcatcagcgtcagacctattgtatcatattagagaatttgcagactaagaatttatgagaaaatatatgtattcggtagtgcaggcatttattaacaattcttaaaagttttacctgattcagattcacgacttttatttatattctatatttttgaatttcagagtaaaatttgttaacaattttaaaagccaggtaacacctaccagtccagttagcatgatttgctttcagaagtgagctgggttttccaaagtggtataatgtgtgtactgtatattttaacaaagtaatatttttgtattgcatttttctattaaaaaattaacagttaatgtttcagtcaatgyattatctgtagcatttcacaaataatgtttgctttgaaccaaaatgctcagtgcctatcaacatttggactcaagcatcaacaccaaattattcctcccttctcgtataaatagagtgactatccacaggagaaaagtgtgtgctttagtattagaggagataggcagagaagtcttgcttagttccttcgtgcagcttcttgcccctgttgacgtggaatgctgtgtctgctttagcacgcacgctccgaatgactcctggtgctaggccatgctggctgctgtcactgagcgggactcaggccaagaggcgtgacctcgggccagcctgtctgttgtgcagacgcctcctctgcagaacgcatcagtttctattctgcagttgcagagccagccccgcgtgagaacgtgcataatgagtgcacaccatcatgtcaaggtgcatacttagtgagcgccatcctgctgaacgtgtatttcagtgtttcacttactggacggataacaagaaaaaaatcctaacacaggcagtcaccagaaataaatgtctcagcactttacagatgactaaaaatgttaattttatgacttagccaaatatgttctaggttgcatatatcccccatgtgaaagtgatttcttcccaagcttctcaaactgttagctgctgtctgacttcatcaataaagtatttttattttaaaatgyaaaaaaaaa

SEQ ID NO: 8828 - DNA, 2727 bp, Homo sapiens
  SIMILAR (190)..(879): 981254mologous to Homo sapiens KIAA0294,accession number AB002292,Smith-Waterman Score=1211.
atggcagatggacggaaagtgggaaagggtcttccagcatcacacgtgctttcaggacagtcccacagtggtggcgatgccacatgcgtggctctgttctccatgcaggtggctgccgccttctccgtcactgtgtctgtttatatctcccgttacctcagggacaaacactggtgtgaattttctggatctgggcgaccgacgttctttacagctgtgttcaatacgttcacccctgccatcaaggagtcctgggtcaacagcttacagatggccaagctcgccctagaagaggagaaccacatgggctggttctgtgtggaagacgatgggaatcacattaaaaaggagaagcatcctctcctcgtcggacacatgcccgtgatggtggccaagcagcaggagttcaagattgaatgtgctgcttataaccctgaaccttacctaaataatgaaagccagccagattcattttccacggcacatggtttcctgtggatcggaagttgcacccatcaaatgggtcagattgccatcgtctcgtttcaaaattccactcccaaagtcattgagtgcttcaacgtggaatctcgcatcctgtgcatgctgtacgttcccgtcgaggagaagcgcagagagcctggggcacccccggaccccgagaccccggccgtgagagcttctgatgtccccacgatctgtgtagggacggaggagggaagcatttccatttataaaagcagtcaaggcgccaagaaagtgagacttcagcactttttcactcctgagaagtccacagtcatgagcctggcttgcacgtctcagagcctgtacgctggcctggtcaacggggcagtcgccacctaccccagagccccagccgctgggggtgggcagctgctgtgtgtctgttctctctccagcccctgccgcgttggtggcagctgtgctttgcaggctcttcctgtggatctggccgccgctgcttgtgggagctctggagctgtccggcgtaccgtgtgggagcgtgcgaggcggcctgcgcagaagcgcatagcctgccacttcgttcttggtgatggatcctgggattcagaacctcaaaaagtgatcaagttaggcgtcctaccagttagaagtctactcatgatggaagacacgttgtgggcggcttccggaggtcaagtcttcatcatcagtgtggagactcatgctgtagagcacagtgggatgcgggctaatgccgtcttcagccaggaaagggctctccggctggcccctggagacgtgggtttggttaggaatgcgaggtccacactggggcaaggtgcagatgggacctgggtcctgagcctcctggaggccgacgctctgccgtggatcatgaatagcattcccgcgcctcaggctggcacagtgagccgaaatccaggggcattgcatcccacggttactacgagtttcacgacggcagcagcaaagcgtcaagccaagcatgcgtccctgcaggcacagggccctcggcagctgcctagggatggtgcccatgtggctagctggtcgaggggtcagctggaggcccaccaggaggaaggcatggtgatctcccacatggccgtgtccggcgtcgggatctggattgccttcacctcagggtccacgctccgcctttttcacacggaaactctcaagcacctgcaggacatcaacatcgccacccctgttcacaacatgctgccagcacccgagcctccaaatcctgccccagctgccctgcagcgcagacctccctccggggcgaagcagcccacggttaccctggttccagagttccgagagcagccacggaaatgcagcggccctgcaggatccttggtgtttatccctctccggctcatagtttccaggcggccgatgatggatccatcccaagcccaccacaagcctctcacttggcagcagatgcatggggctctgcagagccaccatcccctggcgcccactctcccgggcccctccaacatcctgggctggctctccatggccacagtgcgtgctctcagccccctgctccgggggcccctgaatcggcaccagcggctgtcggtgacgagcctgctcgtctgccacggattgctgatggtcggcaccagcctgggagtcctcgtggccctgccggtcccacgtctgcaagggattcccaaagtgaccggaagaggcatggtctcctaccatgcacacaacagtcctgtcaaattcatcgtcctggccacggctctgcacgagaaagacaaggacaaatccagggacagcctggctcctggccccgagcctcaggacgaagaccagaaggacgcacttccgagtggaggagctggttcatctctgagccagggtgaccctgacgcagccatctggttgggagattcgctgggatcgatgactcagaaaagcgacctgtcctcctcatctgggtccctgagcttgtctcacggctccagctctctagagcacagatcagaggacagcaccatctatgatctcctgaaggatcctgtctcgctgagaagcaaagcacgccgggccaagaaagccaaggccagctcggcgctggtggtctgtggagggcagggccaccgccgggtgcacaggaaggcccggcagccccaccaggaagagctggcgccgaccgtcatggtctggcagatccctctgctgaatatataa

SEQ ID NO: 8829 - DNA, 8467 bp, Homo sapiens
  SIMILAR (3732)..(7094): 1001254mologous to Homo sapiens KIAA0294,accession number AB002292,Smith-Waterman Score=5779.
ttccccaaattgatggacataaacccatatgcttatctcagcatgtgtttaaaaagcacttgctgagattcagtgaccatccaacattaaaaactgctgatagaaggaaactcacttagctgaattaaggacgtgttcttaaaatctaccgccaacgtaatggggaggagctcacggcgttcgttaatttattcattccgcaaatatgttttgggcagttacataccgaatagtagatggaggtgtgcctgctgtcatggagatagggtgatttcatcctgttgatcaggaaaactcctaggtgcttgcaggtaaatgtgccacaaagaaagtgaggaccaaaggttagttgatgtaaaaacaagtttgaaatgcattttggggtaatttatccggtcgcttcgggcattcctcgcggaaggcgtggtctggtgactcagaagccaacacactgcgggagtccagccgtcggccccctgccgtgtggcgaggcccagtgtgtcccctttgtaaggacagcacaagcaggagttaatggaccggccatccatagcggtggtggggcagggagccagtttccgaaagaaactcacgccgccgcaggagggccctgtgggatgctctgtgcagagctgttgtgcggaccgggagacgggaaagcctggtggctgcaggagggcaccgtgcagaagtatccagtaaaccacccacagcacggcagcagaaaaacgaggaaattatatgtgtgtatgtttataagaactcagaagcaatggtgagcaaaaagcaaaagcaagaggagaaagtcacagtgtgctggcatcaagttgcattgagaggagcccgcggggtagtgcacccgcatttcctcgttgcgttgagaggcgcccgcggggtagtgcacccgcatttcctcgtttgagaggcgcccgcggggtagtgcacccgcatttcctagttgccttgagaggtgccgcggggtagtgcacccgcatttcctagttgccttgagaggtgcccgcggggtagtgcacccgcatttcctagttgccttgagaggtgccgcggggtagtgcacccgcatttcctcgtttcattgagcggtgcccgcggggtagtgcactcgcatttcctagttgccttgagaggtgccgcggggtagtgcacccacatttcttcactcgtttagagttcggggctctcagaacacagggagaatatgggagaattccttactagatgttacagaggccacacagggccacttttttcttttttttttattgtgtcaggtatacgtaaatattcctttcggtcagttcagcacgtaggactgagtggcattaggtacgctcactgtacagccaatgcctccataggccactttttaaatacgcggggctaagggccaacgacaagattgtcatcgaggacaataagtcgatggcgctgcctggtcactggcttggtcagaaaacacatgccagggtgactggatttaacgttcagttttagaaccacaaatctgccagcccaggcattcaagaggaagtgagtaattcactgaattgatggttagcaagacccttcaaagtccttggaagttccgtgtttgctgggggtcacaacagcaattgcgtttctaaaacattgaaaaccacccgtttttcacacatctgaatagcctgagttgtaacagacctaagtaaaggcgtccaaacgtgcctgatcctgtggctgggtcccaggagccttaacaaggcattgagagagctggattgattgattagactcttgccaactgctgtgcggaatacagaaaatgcagctccagctctcaaagggctgaaaatctaattgaggtgaaaaaggtaacatgtgtgaaaaccatgtctgtgtagacttgttttgtatggaccagaaaagttggaagtccagagatggatgcgaggaagtaggggatggagtttccttataacctctggagggacagtccagatacataccggggtgtgtagcgggtggaggttctaagacaggctggaggaacagtgcagacacacaccagggtgtgtagggggtagaggttctaagacagtctggagggagagtgcagacacacaccggggtgtgtaagcagtggaggttctaagacaggctggaggaacagtggagacacacaccagggcgtgtagggggtagaggttctaagacaggctggaggaacagtggagacacacaccacggcgtgtagggggtagaggttctaagacagtctggtgggagagtgcagacacacccggggccgtgtagggggtacaggttctaagacagtctggtgggagagtgcagacacacacggggctgtgtcggggatagaggttctaagacagtctggtgggagagtgcagacacacaccagggcgtgtagggggtggaggttctaagacaggctggaggaacagtggagacacacactggggagcataggggtgcttttctctgagtcccctagtacatggtagaggctgtagaccctccgctcttgggcacgtgggtaggctctcaggatgactcttggctcttgggcatgtgggtgagctctcaggatgatgcccagccccaattttcaggcaattgtgcaaggacttgacccattcatccgctgagctgagttgctgagactgctgggtgcccgggtggtgatcattgtccgtggcatacagaacacactgcagcttctgcaaagtgagctcatttcacgcattttatggctttgccaggctgctgttgacctgccagaacttttaatcagacatttggaggacctgttttgtagtcagtggagaaatattacaaggatagggtaatttgaaatatctaaggattgtaagtgacaagttcatgtctaattttgcatttccagtgaaagcaagtgttggctttgaatgttacttatgtgctgagatgtgtatattcctcagtgcttaattactaaggatttttagggccaagttttgttacagtgaatgattgtggatgcataaagaataaatttaatatttttaaggcatggagattatttgtatctaagaaaccaggtaaaataaagaaacatttatgcttgtgtgactgataaaagagttagagagacactcatattctgggagtttgaagaatgtcattttcattctctaaaagtcttgttagtgtcacagcattgaaaatttaaaaatccgtgtgtattttcttgctagtgctggtacttgaatatctgtatcatccacctatccatccacctacccatatttctataatccaccgtccctcgacatgcctatcatctgtccaccatttctctctgtctaattttcaaaacatcctgtaagtttatataaaggaagatttttcttcttgtgaagttctctaaggctgacaagttacctggcatgactgtggcggatgcccatagccaggtggtcctcggggtacagatggggcaggggcacttgtgagaaacacctgaagtgcttttccccagcctccccggccctgccgggtggtggaggcgctgcacggtgccttccatggagcaagcccggggctccgcagggtcctcagcatgattcagatttccttccacccccagctctagatgatttggtaaaaccacaaacaggcacaaaacagcccacatggaattctaaagttttaatttcattttggaatttatgcactcagatgaaatgatttatgatgatgttgagaatggggatgaaggtggaaacagctccttggaatacggatggagttcgagtgaatttgaaagttacgaagagcagagtgactcggagtgcaagaatgggattcccaggtccttcctgcgcagcaaccacaaaaagcaactttctcatgacctaacccgtttaaaggagcactatgagaaaaagatgagagatttgatggcaagcacggtgggcgtggtggagattcagcagctcaggcagaagcatgaactgaagatgcagaagctcgtgaaggccgcgaaggacggcaccaaggacgggctggagaggaccagggcagccgtgaagaggggccgctccttcatcaggaccaagtctctcatcgcacaggatcacagatcttctcttgaggaagaacagaatttgttcattgatgttgactgcaagcacccggaagccatcttgaccccgatgcccgagggtttatctcagcagcaggttgtaagaagatatatactgggttcagttgtcgacagtgaaaagaactacgtagatgctcttaagaggattttggagcaatatgagaagccgctgtctgagatggagccaaaggttctgagtgagaggaagctgaagacggtgttctaccgagtcaaagagatcctgcagtgccactcgctatttcagatcgcgctggccagccgcgtttccgagtgggactccgtggaaatgataggcgatgtcttcgtggcttcgttttctaagtccatggtgctggatgcatacagtgaatatgtgaacaatttcagcacagccgtggcagtcctcaagaaaacatgtgccacaaagcccgcttttcttgaatttttaaagcaggaacaggaggccagccccgatcgaaccacgctctacagcctgatgatgaagcccatccagaggttcccacagttcatcctcctgctccaggacatgctgaagaacacctccaaaggccaccccgacaggctgcctcttcagatggccctgacagagctcgaaacactagcagagaagttaaatgaaagaaagagagatgctgatcaacgctgtgaagtgaagcaaatagccaaagccataaacgaaagatacctgaacaagcttctcagcagtggaagccgatacctcattcgatcagatgatatgatagaaacagtttacaacgacagaggagagattgttaaaaccaaagaacgccgagtcttcatgttaaatgatgtgttaatgtgtgccaccgtcagctcacgcccctctcatgacagccgtgtgatgagcagccagaggtacttgctgaagtggagcgttccactgggacatgtggacgccatcgagtatggcagcagcgcaggcacgggcgagcacagcaggcaccttgccgttcacccgccggagagcctggccgtggttgctaacgcgaaaccaaacaaagtttacatggggccaggacaactgtatcaagatttacaaaacttgttgcatgacttaaatgtaattggccaaatcactcagctgataggaaaccttaaaggaaactatcagaacttaaaccagtcagtagcccatgactggacatcaggtttacaaaggcttattttgaagaaagaagatgaaatcagagctgcggactgctgcagaattcagttacagcttcccgggaagcaggacaaatctgggcgaccgacgttctttacagctgtgttcaatacgttcacccctgccatcaaggagtcctgggtcaacagcttacagatggccaagctcgccctagaagaggagaaccacatgggctggttctgtgtggaagacgatgggaatcacattaaaaaggagaagcatcctctcctcgtcggacacatgcccgtgatggtggccaagcagcaggagttcaagattgaatgtgctgcttataaccctgaaccttacctaaataatgaaagccagccagattcattttccacggcacatggtttcctgtggatcggaagttgcacccatcaaatgggtcagattgccatcgtctcgtttcaaaattccactcccaaagtcattgagtgcttcaacgtggaatctcgcatcctgtgcatgctgtacgttcccgtcgaggagaagcgcagagagcctggggcacccccggaccccgagaccccggccgtgagagcttctgatgtccccacgatctgtgtagggacggaggagggaagcatttccatttataaaagcagtcaaggctccaagaaagtgagacttcagcactttttcactcctgagaagtccacagtcatgagcctggcttgcacgtctcagagcctgtacgctggcctggtcaacggggcagtcgccagctacgccagagccccagatggatcctgggattcagaacctcaaaaagtgatcaagttaggcgtcctaccagttagaagtctactcatgatggaagacacgttgtgggcggcttccggaggtcaagtcttcatcatcagtgtggagactcatgctgtagagggtcagctggaggcccaccaggaggaaggcatggtgatctcccacatggccgtgtccggcgtcgggatctggattgccttcacctcagggtccacgctccgcctttttcacacggaaactctcaagcacctgcaggacatcaacatcgccacccctgttcacaacatgctgccagggcaccagcggctgtcggtgacgagcctgctcgtctgccacggattgctgatggtcggcaccagcctgggagtcctcgtggccctgccggtcccacgtctgcaagggattcccaaagtgaccggaagaggcatggtctcctaccatgcacacaacagtcctgtcaaattcatcgtcctggccacggctctgcacgagaaagacaaggacaaatccagggacagcctggctcctggccccgagcctcaggacgaagaccagaaggacgcacttccgagtggaggagctggttcatctctgagccagggtgaccctgacgcagccatctggttgggagattcgctgggatcgatgactcagaaaagcgacctgtcctcctcatctgggtccctgagcttgtctcacggctccagctctctagagcacagatcagaggacagcaccatctatgatctcctgaaggatcctgtctcgctgagaagcaaagcacgccgggccaagaaagccaaggccagctcggcgctggtggtctgtggagggcagggccaccgccgggtgcacaggaaggcccggcagccccaccaggaagagctggcgccgaccgtcatggtctggcagatccctctgctgaatatataagcaggacggccgccttctgctgtcagaatttgcaatcaagggtgacttctcagctaatcctacagcctgagtggttaagctgtgtctacactggttgggaataaattaaaaacagtatttgggggagaaacgtgcaatagcgtaatggtggtgtccctgccaattccttccttctcttctgtacagcagaagtaattacaagcacttctcacgaaggcagaagactgatgcaattttcgagtaattgagtgcagttctgggaaaataccacattctttttgactgctgtagtccatatatgaatactaaatgttaaacttcatcagcgtcagacctattgtatcatattagagaatttgcagactaagaatttatgagaaaatatatgtattcagtagtgcaggcatttattaacaattcttaaaagttttacctgattcagattcacgacttttatttatattctatatttttgaatttcagagtaaaatttgttaacaattttaaaagccaggtaacacctaccagtccagttagcatgatttgctttcagaagtgagctgggttttccaaagtggtataatgtgtgtactgtatattttaacaaagtaatatttttgtattgcatttttctattaaaaaattaacagttaatgtttcagtcaatgtattatctgtagcatttcacaaataatgtttgctttgaaccaaaatgctcagtgcctatcaacatttggactcaagcatcaacaccaaattattcctcccttctcgtataaatagagtgactatccacaggagaaaagtgtgtgctttagtattagaggagataggcagagaagtcttgcttagttccttcgtgcagcttcttgcccctgttgacgtggaatgctgtgtctgctttagcacgcacgctccgaatgactcctggtgctaggccatgctggctgctgtcactgagcgggactcaggccaagaggcgtgacctcgggccagcctgtctgttgtgcagacgcctcctctgcagaacgcatcagtttctattctgcagttgcagagccagccccgcgtgagaacgtgcataatgagtgcacaccatcatgtcaaggtgcatacttagtgagcgccatcctgctgaacgtgtatttcagtgtttcacttactggacggataacaagaaaaaaatcctaacacaggcagtcaccagaaataaatgtctcagcactttacagatgactaaaaatgttaattttatgacttagccaaatatgttctaggttgcatatatcccccatgtgaaagtgatttcttcccaagcttctcaaactgttagctgctgtctgacttcatcaataaagtatttttatttt

SEQ ID NO: 8830 - DNA, 378 bp, Homo sapiens
  SIMILAR (117)..(170): 381254mologous to Hepatitis B virus surface antigen,accession number AF271108,Smith-Waterman Score=41.
ttactgtgcaagacatgcagaatgcctttaggaatgccagcatttggggtcctaagtttagttctgacaccagccctgacaggttcaattgtgtcccctaaatccctgtgctgaaatcctcacccccagtctgctggtgagctcgtctgcaaacaggtgactgcaggtgcaattggtttacaggaggctgtgctagagcaggctcggctaacccagtgtggcagtgtcctcatgacagcagaggccagcacagggacgaggagccacctggcagtgcaactgcaggaactcccgggagtgcccacagccggcgggcgctggaagaggcaaggaaggctgtgacctacattcccggggagcacacacagcctgccagca

SEQ ID NO: 8831 - DNA, 634 bp, Homo sapiens
tttttttttatcttttaaagtatccattttaattcatctttaaagtacaccacgtctggcagcgggagaattttaaacgtacttaaaactgcccaagagtcaagtgtgtcctggcgctccccaacagcagcctgaggggttctggagcagcagtcagtgtcagacaaacatcagtgatgaatgcggaaaagactcaacaaggaccattatatttggttaggactttgccgtttacaaggtcatttcacttctatgatcttgtctcccagggcaggtggaacaagcattaatgtccccaacttgacacatcgtgtgggccaacttgcaggtgaggagctgggtggattcagccacagtggggccacttcactgaaaactaactttccaggtgttacatggagaggggggttctgggacagttaaacttggaagccatactgttaagtgataaacacctttagtctccacactatgggaagcacctcataacaccagggaaacgggtggagacaccttactctgcatcctcgcaattctaagcatcctctagagcagcccacacctggagttctccagctgcgacctcccacggcctcactccgtcagctcctctccaacgcagggtgcagtgggc

SEQ ID NO: 8832 - DNA, 2503 bp, Homo sapiens
  SIMILAR (69)..(1865): 311254mologous to Herpesvirus papio NTR,accession number AF200364,Smith-Waterman Score=358.
  misc_feature (1)...(2503): n = a,t,c or g
ctacggggcgccctgctcccctcggggcggcttctcaggcaggctgagagcgaacgggatgagcacaccccggacgtccaagggggcgcccagcgcctcgaagccgccgccctggcctgcgtcgccgccggcctcgccttcccgggcaggctggaagcgccaggtgcccgcgcggctcacgcagtagatggcgccgtccagggcggcgcagcggaagggctgcaggcccgtggggccgccggggaggcgcaggggcgcgacgcacgggctccactgcttggccaggcagtggtatcgggacacgctgaccccgctcggccccgccgcctgcgcctcgccgcggctgccgctcagatcgaagcggtagatgaagccgtcgagagccaccatgtcggccgagcgctcgcggctgctgctgcacgggcactcctgccactcgtcgcgccgcgggtcatacttgagcaggcgatagaagagggagcccccggacacgtagatctcgccgtggcaggtggtggcctcatgcgccacggcgaaggcgccccggggcagcggcgccacgggggcccagcggtcggcgcgcgggtcgtagcgctccacgctgagcaggcactcgccgcccacggcgtagaggtgaccgtccagggccagcagccgcagctgcgagcgcgcctggcgcaggggcctcacggcgctccagctgtccgtggccgggttgtagcagaagacctggtcggacgggcgcgcgcggccgtcggggcccgcgggcgccacgccgcccgccacgaagaggtagttgtagaggacgcacaggccgcagccccgcgccggcgcgccctcgggcagccgcgtcagctcgcgccactctccggccgccgcgtggaagcagtagacggccgcgtccccgcgcgcgtccggtcccccgaggggctctgaggccggctgcccgcgcgctcccccgccggcccgagcgccgcggccaagaggtgggcgcggccggcgcgcaggcggcggcgcagcagcaggtcccgctctccagttattgttgctcatgaagcagtaggcggcgtcgcgcagctcgttcagccgctgccgcttggccgcgctcaggacctcgtagcagttggccaggctcagctgcggccccacggcgtcggtggcgcgctgcgcggcgccgggcagctgcaggcggcgcgcgccggccaccacctcggccactttgtcgggccgcacgcccgccatgcgctcgctgtaggcgtaggcaaggagcagccgcagcgccgtcaggctcactccctgcacccgcagcacgtcccgcgacgcgcgcgcgcggaagtagtcgctgcgcgccgccagcaccgccttgtgcgcgcgcagccggcgccccgacacctccagcaccaggtccggctccccgtacaccgccccgaaccccgggggtacgggcgcgggctccccgggctcctcgggggacgcggggtcctcaagccaaacgcgcggttcgggggacggcgccgcgggctcttccgggcacgcgcgctcctcaggggacgcgagctcctccggggacgcggcgcccgcgctgccggcctcccactgccgctccaccacccgcgggccaccgctggagggcggggaggtggccgcgccttccgccgctgaggcgagggactgcggcggggactcttccccggagctgaagcacagggacgcgccgagactgcagggtgtctgcgccggggacgcggcgccctcgctctcgctctccccggcagccccgggctcagtccctgggtagaggacgcagggggccaccgcgtgctccatggccgggctgtgctgcgctgcgcccgcgcgcccccggttccgcagcctgcaggtctggccaaggtcgagccttactccggggtttccagcctcacagcttttccccaggcccccatcctgctgtccagtggtggccagtccagggccggggaaaggaccacgatgtaagggtgacccgaaatggaaaagctgtgaagctgcatcggtgaagggcaccagccctgccacaggcaaaagcaggccagcagctccctgtccaccaccatcagcgatgttgtttctgacaccaagatcttcagctacgctgttgagtagcagcagcaagggtgcatcagggggttgggagccctccgccgcccctctaggaggctctgggcagcccttccgggagatggtctcacagcactgaacgtgcctgccctgccgcgggtctccctgcagaatggacgtggtgtcacacaccatgtgggaaatgaggttaagcaggaggcccttttctgtctcaaattatgttaaaagaaactcaacattaagacnnnnnnnnnnnncccaaagggcccctttgcgaaattttttcctttaaaaaaatgggaggggaggggcctttgggctcaacaatccctggggggtaaaaaaaccccgggggattgtaggggcaaaattttttgggtgggaa

SEQ ID NO: 8833 - DNA, 554 bp, Homo sapiens
  SIMILAR (92)..(217): 461254mologous to Homo sapiens dJ697K14.9.2 (novel protein, isoform 2),accession number AL121829,Smith-Waterman Score=69.
cctatgaccatgactactaattcttggtccgtacccgcagatcgttgctatggcgagctcctggccgctaaccctcttcatggtctgggagggctccaccagtggacacctcacgaggtgctctcctgtaagagctctgccttctcctgccgggttacctgcgttcggccatcggccaccctctttgggggtctccagtgagccacctcccactctgactggctgtcggcaacaggagttcctacagaagggcttctgattttgtacaggggcttccgaggacccagggcatactgtggatgccccttagagcatgagaatgcaatacctgatcagactgccatgccattccaccctgattcaaaagcacatgaccttgtaatcgcagcgactcaggctgtgaaacacccttatgttgggctttgcaaacagagaccctttcagataacagccgagaaggccaaacagcagcaccgcgacgtgaatagtatgggtccctacagggtggtttcagtcccaacgatgtcgaggtacggaccgtgaatccgtaatca

SEQ ID NO: 8834 - DNA, 2283 bp, Homo sapiens
  SIMILAR (823)..(1164): 291254mologous to Mus musculus collagen pro-alpha-1 type I chain,accession number U08020,Smith-Waterman Score=71.
tcaaactacaacacgttgtatctcctgagatgcttgcagcagaccttgagcatcttttctagtttgcaaagggtaggggttctcatcagtgttctccttcagctgaatggctgggttctgaagctggggttttgagaagcgggaattccttctgtggctgcagcaggagtgttgtgggaaccgacccagcccagcttgcctggctcccgccagggccctgaggatggcacaggaccttttgtgttggaaagggcttggccgagcttgcgggggagcctcctgggttgcaggccggaagtcccaggtcagggtgctggcaggctgtgtgtgctccccgggaatgtaggtcacagccttccttgcctctttcagcgcccgcccggctgtgggcactccccgggagttcctgcagctgcactgccaggtggctcctcgtccctgtgctggcctctgctgtcatgaggacactgccacactgggttagccgagcctgctctagcacagcctccctgcgtatcagctttgaagctgctgccgtgtttctcattagctttagaaagtaacagcaccggcttacgtacaggacagcgctgtggattcactatcgcccagacccgaagccactcatgtctttccgcccagggcaccagcggctgtcggtgacgagcctgctcgtctgccacggattgctgatggtcggcaccagcctgggagtcctcgtggccctgccggtcccacgtcttagtagtccaagtctcccaccagtggaattgctgtgacactcggtgtgtgtcagtgtgtgcagaggcatctcctgtctctagtggagactctgggatcaaattagtgactggtacacgaacactcatccaaccacccaggcccccatcctgctgtccagtggtggccagtccagggccggggaaaggaccacaatgtaacggtgacccgaaatggaaaagctgtgaagctgcatcggtgaagggcaccagccctgccacaggcaaaagcaggccagcagctccctgtccaccaccatcagcgatgttgtttctgacaccaagatattcagctacgctgttgagtagcagcagcaaggctgcatcaggggctcgggagccctccgccgcccctctaggaggctctgggcagcccttccgggagatggtctcacagcactgaacgtgcctgccctgccgcggggtctccgaggtgctctcctgtaagagctctgccttctcctgccgggtcacctgcattcggccatcggccaccctctttgggggtctccagtgagccacctcccactctgactggctgtcggcaacaggagttcctacagaagggcttctgattttgtacaggggcttccgaggacccagggcatactgtggatgcccgtttctgagagccttgcccttagtccgcgtagtgggagggaagccttgcaggttcctgagattccatatggctccaggtgtgcattctgtagagtcgggctggcggcctagcagagaatgcgagctcttgcgggtctcttcagggatcaaggcgagaacgttcattaagctgctgcagggcacctggcacacggcactgcctgcgagggacaggttttcattgttgcttttcatcatcgtcagtgactttgtggcagctgcaagttggcccacacgatgtgtcaagttggggacattaatgcttgttccacctgcccttccgtcatgggatgatgcagcccgaaggttcttgccagatgtggctccttgatcttgaacttcccagcctccagaactgtgagaaataaatttcttttcattgtaaatcacccattcccaggtattctcccagggcgcccgagcagaagctctgcagctgatcagtgtcccgcaccctcctaagtacacaaccccgtgcatccccacatcccgaaaggcctgggggttactcagggaggccatccgagattcactgttacagttttttaaagagatttcctggcaccctacaaacagcagcattttaatcccagacagcagccggaaggagcgattcgtcatcctggtcagaaaacatcgagggctatttggctgagcacttagatatcctcttatattgatggaaatagtttaaagccattttcaaacatttataccccacaagtactttttcccaagtgtattagctaattcggccggaaaactttgtttggaaaaacttgaggctgggaagcactcccgctgcgcccacctggcacggtgaggaccttgtccggacacggag

SEQ ID NO: 8835 - DNA, 931 bp, Homo sapiens
  SIMILAR (33)..(254): 321254mologous to Homo sapiens Fragment of human secreted protein encoded by gene 89,accession number Y02884,Smith-Waterman Score=80.
cgccgcacaccccaggggacagcatcacagatccttccgctccgcaccccaggggacagcatgacagatccttccgccccgcaccccagggaccccagaattcctttcagggagacacacccatgagaaaaatctgcgtgattcaagagttcctcagtatgagacccacgcgcctccctggttatctccggtcccacaggcaaacctctttatgccacagacacgcacacgcacacactcacgcacacccggggttctcccatcctttctcagtgcctcatgctgagaaataaatagtcgaagacccccagacacaaggaatgccttttgacatggagaaagaggcaaaaccaaattgtgtgggtcagaggagaccagtgaatggggcagaagaaaacttcaacagagaaaagcgaatggtgaaatgctcccgggtgggtgtgtctcccaccagtggaaatgcttgtgccactcggtgtgtgtcaagtgtgtgcaagaggcatcttctgtctctaggggagactctgggatcaaaataagggactgggacccgaacacttcttcccaccccctaaaagtaggaagaaaacggcgcgcaggccttttattatgaaacaggctatgggcaacaaggacgggccctcgggatgggaagtgggtttgaagagaaagaggaatcaagaaaaatcccaaaagttttgactgcaacacctggaaggagagcagccccctgtaccgagatggaggtaacaggaagaagagctccttgtgggggaaagcaaagccctggtgtgggtggcctgaggctgtagaaagtgtgtgatgctccagataaggtgtcagctgacccagtattcaggtctgggctggaagtgagattttgggagcttcttgggtatggatgtgatttacaggtgactttgcctgggaa
